United States Patent Application Publication US 2007/0161031 A1 - sequence listing, part 34

SEQ ID NO: 43175 - DNA, 2300 bp, Homo sapien
gctatcacaggcctccccgggacagcttgtctggccagtagaactcacagagaaacagaattgagggtgtgtagtagctgctgaggcttctcctctttcttcagtagaagtgaagtgcatcaggccgggcatggcggctcacacctgtcaccccagcactctgggaggccgggcgcagcagctcctgcctgtcaccccagcattctgggagtcagggtgcggcggctcacgcctgtcaccccagcactctgggatgctgaggcgagcagatcatgaggtcaggagttcacgatcagcgtggccaagatggtgaaaccccatctctactaaaaatacaaaaattagccatgcatggtggtgggtgcctgtaatcccagctactcaggaggttgaggcatagaactacttgaacccgggaggcagaggttgcagtgcgccgagatcgcgccattgcactccagcctgggggacagagcgagactctgtctcagaaaactaacaaaccaaaatgaagtgcatcatgtgaagaataaagtaaagtttcctaataaccgaattctccacacatgggaaacacagagggctgtatctgcctccgacacacactgacttggacagcccgccttccacttctcaaaggggaggacgtcggaagctttgtcagtgtttagacgtaaaaagttcctgaaggcacgttactgttctgacctatttaaatgacagtaaaatacacagaacaaaatgcacatttttaccattttctgagtgcacagttctgtggcaccaagtacattcacactgttgtgttgccatcaccaccatccatctccagaactgtctcaccttcccaaacagaaactctgtctccttgaaacgaaacaactcccggttccctcccacctccatcctcctggtgtctctggatctgcttcccacctccatcctcctggtgtctctgtggatctgctccccacctccatcctcctggtgtctctgtggatctgccccccacctccatcctcctggtgtctctgtggatctgcccccgacctccattctcctggtgtctctggatctgctccccacctccatcctcctggtgtctctgtggatctgctccccacctccatcctcctggtgtgtctggatctgctccccacctccatcctggtgtctctatggatctgctccccacctccatcctcctggcgtctctgtggatctgctcccacctccatcctcctggtgtctctgtggatctgccccccacctccatcctcctggtgtctctgtggatctgctcccacctccatcctcctggtgtctctgtggatcgccccccacctccatcctcctggtgtctctgtggatcgccccccacctccatcctcctggtgtctctgtggatctgctccccacctccatcctcctggtgtctctgtggatctgctcccacctccattctcctggtgtctctgtggatctggcgactctggggcctcacagaagtgggtcatgtagaatttgtctttttgccctggcttatttcatggaacataatgttttcaaagttgttctcgtgttttttatatttagggtgaatcctggttctttcgttggctacctggaaagaaaaagacagaagcttatttgccagatgacaagaacaaatcggtgagtgctgtcaaatacgcacgggacgtccgaagaattgtaatgatttttctgtcactttcagagcagacctgagtaggtgtttcctgaagttttgaagtgtcatcattaatcagatgctaattctgtttaggttcagtctgctgaccttttttctttttaaaatcttggcagattgtttgggatgaaaagaaaaaccagtgggtgaatttaaatgagccagaagaggaggtaaattgtcattctagttcctgttgggtgtgaggtgtgagtggagggaacagcctcatgtggccctgtgatatttgggtggctgttgccccttttggagcctcctgactgtgccatcccagtgggtttctgtgcacacagtgggtgtctgaagctgtgtttccctctgcagaagaaagccccgcccccacctccaacctcgatgcccaagactgtgcaagctgccccgcctgccctcccagggcctcctggagcccccgtgaacatgtactctagaagagcaggtaagggtggccttggagtgggagcttgcttgaacgattaactgtcccagagagagaggccaatgtgtagctgttgtgcgtggggaggaggtggcttcccgcacgtccctg

SEQ ID NO: 43176 - DNA, 2300 bp, Homo sapien
tgccggctcacagatcctttctcccagccgtggactttgggactgctttcagtgtggggctgggatccgtcaggccccaggagcctccttgcctatctattggcgaatgcgcttgtttttcttaggtgcgtgccaaggagctgagggtttagctcgcaggatgagcgtgtgttcagctttaggagacactgctgagcagttgtcctaaatggttggttgccccaagtcacacatcctgcagcagaggacaagggccctggatatccctcatcttcaccaatactgggcagtgccggttctttaacttagccattgtgctggggctgatgacatctcattgtgtcttcctctgcatctccacagcgaggtgtgacgctgggcaccttctcgtgtccctgttaccatctcaccactcttttggggcagtgcttgttcaagtctctatccgttgttttttttttcccccataaagatggggtctcactattgcccaggctggtctcaaactcctgggcccaagtgatcctcctgcctcgtagctgggactgcaggtgtagccaccacacctggctttcctttccatttttaatggtgttctcttcaggacttgcaggagtcctttctgtattatggatataagtcctctgttaggtgtatttattgtgatatcttctcccaatctgtagattgcctttttacttgtaatggttttttgtttgtttgtttgtttgtttgttttgagacagggtctcactctgtcagccaggctggagtgcattggcatgatcttggctcactgcaacctccgcctcccaggttcaagcaattctcctgcctcagcctctccagtagctgggattacaggtgcccaccccactcccagctaattttttgtatttttagtagagatggggtttcaccatgttggccaggctggtctcaaactcctgacctcaagtgatctgcctgccttggcctcccaaagtactgggattacaggtgtgagccaccatgcccggcctagtaatggtattttatgaaaaatatcattcttcattttaataaagttcagtgatcagatttttcttttatggctgctgtcttgaaaataaacacacatttaattccaaatttgtgtgagctctgagataaaacatgatacttgagcaggtttccagtgcataggctatcacaggcctccccgggacagcttgtctggccagtagaactcacagagaaacagaattgagggtgtgtagtagctgctgaggcttctcctctttcttcagtagaagtgaagtgcatcaggccgggcatggcggctcacacctgtcaccccagcactctgggaggccgggcgcagcagctcctgcctgtcaccccagcattctgggagtcagggtgcggcggctcacgcctgtcaccccagcactctgggatgctgaggcgagcagatcatgaggtcaggagttcacgatcagcgtggccaagatggtgaaaccccatctctactaaaaatacaaaaattagccatgcatggtggtgggtgcctgtaatcccagctactcaggaggttgaggcatagaactacttgaacccgggaggcagaggttgcagtgcgccgagatcgcgccattgcactccagcctgggggacagagcgagactctgtctcagaaaactaacaaaccaaaatgaagtgcatcatgtgaagaataaagtaaagtttcctaataaccgaattctccacacatgggaaacacagagggctgtatctgcctccgacacacactgacttggacagcccgccttccacttctcaaaggggaggacgtcggaagctttgtcagtgtttagacgtaaaaagttcctgaaggcacgttactgttctgacctatttaaatgacagtaaaatacacagaacaaaatgcacatttttaccattttctgagtgcacagttctgtggcaccaagtacattcacactgttgtgttgccatcaccaccatccatctccagaactgtctcaccttcccaaacagaaactctgtctccttgaaacgaaacaactcccggttccctcccacctccatcctcctggtgtctctggatctgcttcccacctccatcctcctggtgtctctgtggatctgctccccacctccatcctcctggtgtctctgtggatctgccccccacctccatcctcctggtgtctctgtggatctgcccccgacctccattctcctggtgtctctggatctgctccccacctccatcctcctggtgtctctgtggatct

SEQ ID NO: 43177 - DNA, 2300 bp, Homo sapien
ttgtatttttagtagagatggggtttcaccatgttggccaggctggtcttaaactcctgacctcatgatctacccgcctcagcctcccaaagtgctgggattacaggtgtgatccaccaagcctggcctttttttttttttttttttttccctaagacatagtttcgctctgtcgcctaggctggaatgcagtggcgccatcttggccactgcaacctccgcctcccaggttcaagtgattctccagcctcagcctcccaagtagctgggactacaggcatgtgccaccatgcctggctaattttttgtattttttggtagagacagggtttcgccatgttggccaggctagtctcgaactcctgacctcaagtgatctgcctgcctcagcctcccaaagtgctgggattaaggtgtgaaccactgcacctggccatctctttttttttttttttttttttttttttttgagatggagtttctctctgtcgcccagcctggagtgcagtggtgcgatcttggctcactgcatcctctgcctcccaggtttaagcaattctctgcctcagcctcctgagtagctgggactacaggcgcccaccaccacacccagctcatttttttttgtatttttagtagagatggggtttcaccatcttggccaggctgatcttgaactcctgacctcatgatccacctgcctcagcctcccaaagtgctgggattacaggcatgagccaccccgcccagcccggccgtctctttttctacagtagaatttcttttctaattttttgatctcacaagaggatgtcctggaattcagtagaatttctaacattgtcactggttttcctgaaagtgagatttatctcattagacatgtttggtataaatacctcctctgtttgctctactcctaaccaggagggatggttgcttttatacagaccgcattctggaaccttctttacagatacccagcccttcacgggcatcccatcagtaggcgattgctatagtttgaacttgcattaggtgttttaccctttaaaatactgtgtccctggaaaagtaaaaatgagggttgagctattaaaaattgggacttgacccaggaataaatatttttaaaaatcattgtatctttgagaacacccatcgcccccctctggccagtcttccctcagtgcatgctcacactccgtttcttccagcccggaatctccatcgaacgccctcatttgcattctgagtgctgagtgctcccagacggagctgcttattaagtgcggctggctcttctctagtcaggccaggtagaggctctgggaggcccagtcagggggctgctctccccagcccccttcctgcctccctctggtcaccagagtcatccggcctctcagtgatgtatttaggaaacacgcctggggaattgcatccccctctctctttcggttcctgtgaggagccccaggagagcctgttctgcatttccttgcgacagaccccctcgaggacggtgccagactcggaggcccccccagggtgggatcgtgccgactcgggtcccacgcagccacctctgtctctctcacccgctcccgaaacaaagagacccggacaggcagccaagaaagaaacgaaggaacctaagaaggtagtacagcctgcccacggtgcgcctggcggccgggagggtttgggcaggaggcacgcttcccagagcgccatcctcttaattcaccacacatgcaaatagcctcctgatacaaacagccgagtgtctacagtgcacacggcatgatgggtgtctgtgtatttgtgccttcagataataggataatagcccacccaggtcagcatggggacacagcccggcccccagaggtcgcctctggccactacctgtcagacccacccgcaagggaccagacggcagccgctgctttgtcactgtggtgtgtgcctgctgccggctcacagatcctttctcccagccgtggactttgggactgctttcagtgtggggctgggatccgtcaggccccaggagcctccttgcctatctattggcgaatgcgcttgtttttcttaggtgcgtgccaaggagctgagggtttagctcgcaggatgagcgtgtgttcagctttaggagacactgctgagcagttgtcctaaatggttggttgccccaagtcacacatcctgcagcagaggacaagggccctggatatccctcatcttcaccaatactgggcagtgccggttctttaacttagccattgtgctggggc

SEQ ID NO: 43178 - DNA, 2300 bp, Homo sapien
gccctcaggtgagcccaggtgcgcggctgctgccctcagacaagcccctgcttcctgtgggctgagccatggcctgcacccttgcctcctggagaactgctttcagatgtggactgttggaggcagtgtctcacaccacctcggtggttgtggggctcctcggtctcctccctcttcccttcatgcttcctcccctgaggagcccatggaggggaggctcatggctttccatgtccataaatatccatgtgctggcgacactgccctgagcgcccgctgcctgctcagcctccctgcttgtttctccgggagcctcagccgcaccgtgtctgggcggcgccctcggctgtgcccctctgtaacctgcttctcccagtcggccccgtcggtggaagggccagcccagagctccagggagtcaagtccagatgccccctcctctctcgcgcttctcggcttccttcgtcagtgaacctcaccagcgcggcctgcacgcaggtccgcatgcctggatgagcacgggctccttcctgctcgcctcctgcttcttccccagaccctccagactctccatctcacctgaggacaagccagggtcctcacggtggccacaggccctccaagcttggccctgagccctcctgccctcgtgccatgtccactcccacgctgtggaccagccacactcctgatttgggcccactgcccaccctccctgcctgatgtccagtctgcttcgtcctcagacaccgttaccacttcctggttgattgctgtccttagcgctttctcttactcagttcatctgtcccgacccccatgaggacccagcatttcttttgttgttgaagcatccagggcccagcatggtgctggtaggcagcagccctctcaggttttatgttgagtcggaagaatgaaggaatgaacgagtggcctgtgtgacccctggccgtggaggaggggactcgggcctagcagagctctgtgccaggcggccgccatgggcttgcgtgtgggccgggccctggagcccgcgtgccgctgtgactgctcaagtgcccctcccctagaaaaggaagcggatactctgcttttctgcaaaccacggatggtgcggtggggtggtggcttcaggctttctgctctgttggacctcccttataaaagaaatggggctgtacaaaataacttgtcataaacacgtcgagtgtcagctccttccagtaactcaagctaccctcagtaaccccagacctcttctccaccgttcccatgcagctccgcagacgctccctgacggcccattggccagtcctgccagagtgccgatgttcccagtgccactgcccccggggcccctggagccgggtcctggctgtgtgaccccagggcctgcacttggcttcctggagccctccgggcctggcctcccacctggtgtgccacctctgcaggaaaggagacacttgctccaggaagccaggagcccagacccaggtggggctgcagagatgctgtctcgagagcagaagcagcatggggtgtggtgtttgtggggattggtggaagagattgaagttatttgagcttgaaacaacttacattacttgtcttaacgtagaccagaaattctggaagttacagactggatgggttcagagtctcactacaacagcagtgttaatgccagttccttttgtaacttggctttttgttgtgaagcttaaatggccatttggggcagggcatggtggccatgggtctcctggggtctgtctttagacggccctgctggacgcctggtgagatgcacaggggcaggtcatgaactgtctggaactcgatttggtggatcttgtccctggtctgtgcctatgtctacatgtgtgtatatggacaaagcaaaacataggcctagttttaaaaatgaaagagtgtgcacacatgtgggaagatgttcagccttggtttctgcagatcatgctggtgtggcggtagctgggtgggaaggtggtgtgcctgttgatctgtgcgccacacacacgtcccgccttctcgtgactgagatcatagttgctctctttcccgttgacagggatagtgccgcaggaggcgcctgttggaaactcactttccgagctaagcgaagaaaattttgatggaaaatttgctaatctggtactttgtcacattttcttaaactgtttgttttccataaagttcatcgagtgggcacccagactccttgttgagttgtaagatgatggtagtgaggactatgaaattgtttctaaaat

SEQ ID NO: 43179 - DNA, 2300 bp, Homo sapien
ctctgtctcctgggttcaggtggccctcctgccttggatcctttcaaagtgctgggattacaggcatgcaccactatgcctggctccttattttcttttttgcttgaggtgttttgctgtcctttttgctgggtgctgtgtggtcatcgcagtctgaatttgattttgtgaaaatggaagagctcgggagtgggccaggcctgggaggattacgcaccgtggcaggagcctcagggcggctcatgagggtgttgcgggagctttctcagtgtacaagggaacagctttcatgcttaatgattcagacatttttcttttcctgacgtatgctgaagttctacttttaagtatgatattaaacaattaccgacttttgagttggaagtctgtcgtgataaatctaacctgtgatttaagctgtgtgagcacattgaaaatctaggctcagaagcatcagtgacaagctgattgtttctttttcaatttattttaaatgcagtttcatcaagaccaacttctcctgaaaaattttcagtgcctcatgtctgtgccaggtttggccctggcggtcagcttatcaaagtgattcccaatctgccttcagaaggacagccggccttggtggaggtccacagcatggaggtaatggcacacgcagaagcgtggcgtcactgctctgctgccctggggaactctctgctttgcagtttgtcatcttcaattgtcagaccttgtctctggacatacgtccttggaaaatgtttattcctgtgaattttcaatttgtagggtttttcttctatttgatcatatatttttcctcctagaagtcagtattgtaagcgtctgccttgggtgttcaacgtggtttgattgtatatgcattttctgtcctcgttttggggatgtttgctttattggtgcttttcaatgatagatgcagtgggtgggcccggtgctgcccaggtgaggggggcgggtggggtggacgtgcacggcgctgccgaggtgacgggggctggcatgcgcctcttcctgcagcttctgcaggcttctgtcacatgtattggggttctgcctcagtatttggggagagaaaatggatttcactacttaaaataaagtttgaaatcatggctgtggtccacacaggccatgttccatgtaacagcctcgacagagccttcacctgctgtggggcggggcaggtgggccatgccatcctctcctctcacgggcagcatccgtgcctgggttggccggcctgccagcagggtggctgcgcactggctgccactgacccacggccctctcctcgtaggccttgctgcagcacacgtctgagcaggaggagatgcgggcgttcccgggacccctggccaagtatgttccttgttgaggcatttctttgtgagcccggccttgcagacatcactgctcactgtgtgttctttctgcagagacgacacccataaggtggatgtcattaattttgcacagaacaaagctatgaaatgtttgcagaatgaaaacttaattgacaaagagtctgcaagtcttctttggaattttattgttctcttatgcagacaaaatggggtatgtttctttctacttctagagtgtttcttcttgctggtcttcatttcgtcttgggaatgctcagcctcccgaaggagcagggcgggatccgcgtggccagctatgggagcctcgagggcccccttaggaagcacactgtagtggctgggtagggagggagagggaacgtgcggttgggatgggatgaggtttcagcccagccttgccagcctttcgggtagttgtgggtctggctgtgtccagggtggggctttgtgcctgtggtggtccaacgcgtcctcacctgagagccgttgttctccttcctgttcctgttgacccaaacagaccgtggtagggaccgacattgcggagcttctgttacgagaccacagaacagtgtggcttcctgggaagtcgcccaatgaagcaaacctgattgatttcacgaatgaggcagtggagcaggtggaagaggaggagtctggtgaggcccagctctctttcctcactggtggtccggcggctgccgccagctcgctcgagagagagaccgagaggttcagggagctgttgctgtatggccgtaagaaggtgcgcctcctcatcatggcacctggcgcctgcacatgtccactgggtcgggcctggtgcggggttgcagccttcagggagggacgtggccccctcttgggagcatccgcgctgcagtgtggggc

SEQ ID NO: 43180 - DNA, 2300 bp, Homo sapien
gagaccgggcactgtgggtcactcctgcaatcccagcactttaggaggctgaggtgggtggatcgcttgaccccaggtgttcgagaccagcctcggcaacatggtgaaaccccatgtctatgaaaaatataaaaaattagccaggtgtggtagcgcgtgcctgtagtcccagctactcagaagctgaggtgggaggattgcttgagcctgggaggtggaggttgtgttaagctgagatcatgtcactgcactccagcctatgcgacagagtgaaacctgtctcaagaaaaaaaaagaaagctcagtccattttgtcctctactgagcataatatcaaaaattctaggacttattttagcattgacttttataggctacagcaatgagaacacaaaaagggtcagttctttttagccgaacggctcttagttattttaccaagatgaatttgaattagccgtatggtgggaaattccacagtctcatccttgctactgttttgaatcttctaattggaatttttgtacaaccaaagtgctttgatgaatgcccattgctttgggaatgatttgtattggctgatgtcacactttaagaaataggtaatttgtgttttaacagcactgtgtgttttttcaggcaaggatatcctgaaggatactatagttccaaaagtggatggagcagtcagagcgattactatgcaagctattactccagccagtacgattatggaggtatgtcaaggaactccaagcagctggccttagcaggtgccttgtgcaaaagacactgatgacatgcagccctggccagccagcacctgctggtgacttccaggaaatgtccccttttattaatctctttatgtttttgcccaaaagccaaaatagttgaaaatactttgtatttggaaataattatattgatatttttcattactaaattacatcttaatcttagcatgagtgcatctttgtcatattggcagatttctctgattttctagtggaacataactagcagttcgagagctgctgtgtccacacgtgccttcgtaaacataaacggatgaaaaggaagtgaaatgaaaaaccatctcctcggtcccaccagccgtgtttcccgcactcctgaccacaggaggctggcagctgctgcctggggcggtgtggacatgggccaccccaccgggcagcgacctgggtgctccctggcgacgtccagctgcagccacatctgtcctccatgcagtgtgtgcggcacagtggccatgtccccgggaagagcctcctccggtcactcctgccctggctgtggcctctagtgctctgggccctgaatccccttgacaagtatcaaatatcctctttgatatttgcacctgttttaaatataaatttaaaaaagaaaagacatctttagaaaagatgataaaagaccttttaagaactttttcttaatacttgctaaaaacacttgctgaaaatggtatatccagtttgtttagagcccttttaaagtaaccttttaatattgagattatttttgaaaaccttatgagtcacattaaggagaagaaatagtagtaaaatttacagttaggggattaactagtcaaaagcagcaaccgtgaaagagaactggctgggcacagtggctcacacctgtgatcccagcacttagggaggctgaggtgtgggagaagcacttgagcccaggagttcaagaacagcctgcgaaacatagtaagaccccatctctgtttaagaaaagaagaagaaaaaggacttaataaagaaatcttttagcaccttttctaaaaatattttttccttttaatctaaaacacttgtattgagagaaaaatcagccagttgcctttaggtagctagggccctccagatctcatggcttcctggtgtcgtgctggtttccaggaagaagctgggtttctcgaggagtccttggagcataaagtcctggggtggtgtcgcttctttagtgatatctgaggcatttcttcttttgcatgttactgtattaatcattaattccttgctcacagatccaggtcactgggatcgttaccactacagtgctagagtcagggacccccgcacctatgaccggaggtattggtgtgatgcagagtatgacgcatacaggagagagcactctgccttcggggacaggttggtggagcacccctggggaggcagaggctgggggcagccagggcgcgctagtgcttctctgccctcatgtctgggttttaacaaagagctgtggtagtttgg

SEQ ID NO: 43181 - DNA, 2300 bp, Homo sapien
aaacattgagtatctgtgggtctggtagcatatcacagcagtggtcaggttccgcactgtccctgttgttgtggcgcgggtctgcggcagcaatgggccctgtgagtagaggatcccaggggagggagtggccatctagacatactccatcagctcgcagccaggccatccagggttctcactctgtcccctgccccccagaacagttcctcagggacaggtgttctctgctggggtggggtgtaggggagagagagtccttgggatttaagtgacataaaatcatgttcaatgtttctctttttccttagttttcctgattgcagctaggactttgaatatatggattttatgctgattttctctttttcttttccagctccaattaaggaacagctatatcctgcttccttctgtaagcagcatcgacttgtgcaagggttcagtcatgcagccaccgccccagacggtcccgtctggcatggctgggccacctccagccgggaatcctcggagcgtgttctgggctagcagcccttacaggagacgggctaataataatgcagcagtggctccgacaacttgcccgttgcagccggtcacggatccatttgcttttagtagacaggcgctccaaagtacaccactgggcagttcgtccaaaagcagtccacctgtcttgcaaggcccagcccccgcagggttttctcagcaccccggtttgcttgttcctcacacacatgccagagatagctctcagggaccctgtgagcccctgcctggacctctgacacagcccagagcacatgccagtccgttttctggtgcattgacaccttcagcacctcctgggcctgagatgaacaggagtgcagaggtcggtcccagttcagagcctgaagttcagactctgccatatcttcctcactacattccaggagtggatcctgaaacgtctcatgggggccaccctcatgggaacatgcctgggctcgaccgacccctgagcaggcaaaacccacatgacggtgtggtcaccccagcagcatccccttccctccctcagcctggtctgcagatgccaggacagtgggggccagtgcagggaggcccacagccctcggggcaacatcgttcaccctgccctgaaggacctgttcccagcggggtgccctgtgccaccagcgttcctcatttccccaccccgtccatcctacatcagggccctggtcatgagcaacacagccctctggtggctcccccagcagccttgcccagtgacggaagagacgaggtgagccacttgcaaagtggaagccacctggccaataactctgatcctgaaagtacattcaggcaaaatcccagaattgtgaatcactgggcaagcccagagctcaggcagaatccaggagtgaagaatgagcaccggcccgcctctgctcttgtgaaccccctcgcccggggagatagcccagaaaaccgtacgcaccacccactgggggctggggccgggtctggctgtgccccgctagaagcagactcaggagcttcaggagctctggcgatgtttttccaagggggagagacagaaaatgaggagaatctctcatctgaaaaagcaggcttatctggtcaagcggactttgacgatttctgctccagccctgggctaggccgtccgcccgcacctacacacgtgggggcaggcagcctctgccaggcccttctcccaggccccagcaatgaggctgctggtgatgtgtggggtgacacagcgagcacaggggtgccggatgccagcggctcgcagtatgagaatgttgagaacttagaatttgttcagaatcaagaagttctgccaagtgagcccctcaatttggacccttcctccccgagtgaccagttcagatatgggccccttcctgggccagctgtgcccaggcatggtgctgtgtgccacaccggagcccctgatgccacactgcatacagtgcaccctgacagcgtgtcatccagctatagcagcagaagccacggaaggctctcaggctcagccaggccccaggagctggttggcacattcattcagcaagaagttggaaaacccgaggatgaagcttcaggtagtttttttaagcaaatcgattcttctcccgtaggaggtgaaacagacgagaccactgtgagccagaattaccgtggcagcgtgtcccagccctcaaccccgagccccccgaaacctacaggaatatttcagacaagtgcaaatagttctttcgaaccggtaaaatctcact

SEQ ID NO: 43182 - DNA, 2300 bp, Homo sapien
cccagagtgctgggattacaggcatgagccaccgcgcccggcccagggaattttattctgtaacctcaagtcatctaattcttttattgttccaaagaggccagctgatcttgaaaatgcagtattcataaacctagctagtcagttaaactgccttgtaaccatgtggatacctaagcaaaactctttttagtacagttctggctacagaactgaggcatttaaaatgcatgcacacccctctcctcttgctgccactggcttcatattttaagtgaggaaaacaatagtgtgccaggaagcccctgagtttacctactgcctacagtctccctcacggtggctgctagtgacgccctgtcagactgtgggatgcttgacacaaagacatgatcaactccaactcttctaagttagaatcgcaaccacatacagttagatgttgaagaggaagccagcgacagaggaggccagcagcctaacactgatgaaaatgacgaagaccctggtattcatgaaagatgcttacagaagaagaaatcacattaacatttacccactaccatgacctcttgctggatttggcaaaaaaagacaaagaaaaagaaaaaaaaagtgcccactgcctcaaagaaaactttaagtacaattttgagactcactgtagtaaccactattaacagtaaacgaggaacaaggaacaagaaagacacgctattttgcctcttgtctacaagataccagcacctgaaacttaagaaaggggatgaggaaaaaacgcagggaggctgcattgtgctgaaacttgcaaaagtatcacttctaggaagaaccgtctgcggttccgtttgcttcgtattgccacatgggggatgggaaatacctctttggttaacatcggcatcacacatgtaaaacaaaatcttaatatacaatccacacccaacttacaagccatttaaaagtgttcttaagcggcaaaaactgactttaaatggctctgatgtttctgaaggctctactgtaacacttccatcacaaaggggcgagccggatcacacacactcctctaaccctcggcctctgttgcaacatcctgatcgcccaatcaagaaattacaaacaaacaactctgctctttggttcaaatgtaaatgtgtctcttcaccagcatcgctaaggaagccttctagccggtgaggacaagacacgctcatttgaaaagttaagagtcttacgaggggtgcctgggggtccagcctcccgccccgggaaccggcgtcaccgcagcccagccgggtccacgtcagtccctcgagtcccacggcggcccgcgccgcgtccggccttccgctctggcccgggggcccggacgtctgtcccctcgaccggccccggcgggacccgagatgcaccgcccgctcggggctgggcccagccgcctcctctcctccgcgccccgacctccacggcctggctccgccggccggcctccgccttcctcctcccgcgctcgccccctcacccgcgctcgccccctcacccgcgcggctgagaccgatccctcaggagccgcgggcgaaagcccacccgacgctggcgacgagcacagacacctcagccgccgcagccatcttggcacatccggctcgggtctccgcggccgccgcgccgccgacgtgtccggcttacgacatcagcgcgcgccccgcccctggccccgcccctcggctcgtcggcccagacgcgttctctttcagcccttcacagcccatccctcggccccgcccctcgccggcgtccgtcctccccgcctcatccctctgtcccgccccctctgcccccgcccctcgccggcgtccgttcttccccgcctcattctttcgtcccgccccccgcccgtcttccacgccttatcctgtagttcccgctccccttggccccgcccctcttccgtcgttcctcgcctcattctttcgtcccgcccccttagccccgcccgtcgtccgtctttctccgcctcatcctgtcgttcccgcccctttggccccgcccctcggccgtccttccccgcccgtggccccgcccccctccggcgtccgtctgccgcctcaccgcttggccccgcccctcgccacctgcccggccaggcgcgccggggccgtcccagtacgtcgccctgtttacgctggctctttctcccagtcttttttcgttttaagatgtgagaagagatgggattcttcaatcaaggccacaagcgggaaatcagtctgcaggaccgatgccagcaggctcac

SEQ ID NO: 43183 - DNA, 2300 bp, Homo sapien
cgcctctgcctgacttccctggagaacacagatgggcccgacgccctccccctcgcacctcgctgactgcgaaggtcccaggtggaggcaccagttgtcccggactcagctgtgctcggggtcaggctcccagggccacgtaagcctggccactgccccagaccaccaggcggccctgaggagggcaggtgggcacacaggcagccactgcctacctggaagacaccttgtgcgtcggcagacacagccgcatgcagcggggtgcggcccatgttgtcctggatgttggcatctgcgctggcctccagcaggcgcttggcggcatcagagcgtgagtagcgggcggccaggtgcaaggcggtctcgcccgtgcggtctgtctggttgtgcaggctggcgccctggtagatgaagtcggagatgacggccggcgcgtcctcctcttcctcgctgttgcccgtctccaggccgcccccgctgcaggaggcgatcatgagcggggtgaagccatctgcagaggcagagacgggtgctcagtctggagggccggtccccagctgcagcccagggggaggggggcagcagccccaagctcaaggggccacggtgtggatgcaccacccagcacttggtggccccgtgcacacagccaccaaggggcagctgaagtccgcctgggctgctcagtggacagagccgaatccagcttaaactcctggcgggcaactgcttcctgacctgcccaagacctggcacccaaaatccacccaggaaaaagaggaccccagaagcatgcagttagaaaattaatgcttcagcaggatgcggaggctcacgctgtcatcctagcactgggggaggccgaggtgggcggatcacctgaggtcaggagttcgagaccagcctggccaacatggtgaaaccccatcgctgctaaaaatacaaaaattagccaggtgtggtggcaggcgcctgtagtcccagctactggggaggctgaggcaggagaattgcttgaacccgagaggtggaggttgcagggagccgagatcgtgccactgcactccagcctgggtgacggagcgagactccatctcaaaaacaaaaaaaaaagaaaaaaaaaaagaaaaagaaaatcaacgctttccatgtctcaagaaggtttcagaaaagagtaatttacagggacagagtggccctgcggtatcaccccaggaaggggttggtggaagaacaggaggactccaggacccccccacgtctactctgaatgggaaacaccccaaggatgaaagctctcacccccaattctaagtttccagagtatcaactgtaccccagcctcggggcttaggggagagaggcaggtgggccacggggctagggaagccctggctgctggcacccttaccaggcccgcggacattgacgtccatgcagtcggcgtcaacctcaccctggggcggtgtgggggccatggcagacatgcgcaggtcagcggcatccaggtgctgctgagtccactgccggtggtctgtctggtcgtccaggtcaggcagaaccacgggctcctcgaactacatagagggagtgagcagagcctgtcagggcagcccggcagcaggtgcccgggagcccaggagcccgggagcctcgcgactcacccggaacttcttggtctccaggtcctcgtccccccactcattctggttgtcgtccatgagggcaccgtctgaagcgttcttcaggggcctggggggtgaggggtcgagaagtgaggctgagcgagctccctaggaagcccccagagacccctggcccgggcctggcgtgggaggtgggccctgggtcgggaggggcagactcccggtgaggatgctcggccaggtcccacctcccaccggggacccagaagcaggggcggcgtccgctcacttgaggcccacggagtcctcgccgaggggctcccgccgcttcttcttgctggcctcagacactttgaagccctcagggaaccagagctggccatgctgccgccggcgcttgcgggacagcagcaccccgcagcccacgaagaacagaagcacaaaggcggccgccgccacgtacatgaagtgcagctgcgccggcgggggcggctccacggtctcacctgcgggcacgggggccaggggcaggtgcccggacatcaggcagcggctacgcagcaggctggtggccggggggcggcggactggctccgcgtccgggcgcctcctcacccactctcctccatcccgccctccaaaataaggtcattt

SEQ ID NO: 43184 - DNA, 2300 bp, Homo sapien
tgcgagtgcagcgatttgaagttgactaatcctccttccttaaaggagaaaaaagtaaaagccgtctccagatagagtcggctggtgcaggagagaatttagcgatagtttgcaattctgattaatcgcgtagaaaatgaccttattttggagggcgggatggaggagagtgggtgaggaggcgcccggacgcggagccagtccgccgccccccggccaccagcctgctgcgtagccgctgcctgatgtccgggcacctgcccctggcccccgtgcccgcaggtgagaccgtggagccgcccccgccggcgcagctgcacttcatgtacgtggcggcggccgcctttgtgcttctgttcttcgtgggctgcggggtgctgctgtcccgcaagcgccggcggcagcatggccagctctggttccctgagggcttcaaagtgtctgaggccagcaagaagaagcggcgggagcccctcggcgaggactccgtgggcctcaagtgagcggacgccgcccctgcttctgggtccccggtgggaggtgggacctggccgagcatcctcaccgggagtctgcccctcccgacccagggcccacctcccacgccaggcccgggccaggggtctctgggggcttcctagggagctcgctcagcctcacttctcgacccctcaccccccaggcccctgaagaacgcttcagacggtgccctcatggacgacaaccagaatgagtggggggacgaggacctggagaccaagaagttccgggtgagtcgcgaggctcccgggctcctgggctcccgggcacctgctgccgggctgccctgacaggctctgctcactccctctatgtagttcgaggagcccgtggttctgcctgacctggacgaccagacagaccaccggcagtggactcagcagcacctggatgccgctgacctgcgcatgtctgccatggcccccacaccgccccagggtgaggttgacgccgactgcatggacgtcaatgtccgcgggcctggtaagggtgccagcagccagggcttccctagccccgtggcccacctgcctctctcccctaagccccgaggctggggtacagttgatactctggaaacttagaattgggggtgagagctttcatccttggggtgtttcccattcagagtagacgtgggggggtcctggagtcctcctgttcttccaccaaccccttcctggggtgataccgcagggccactctgtccctgtaaattactcttttctgaaaccttcttgagacatggaaagcgttgattttctttttctttttttttttcttttttttttgtttttgagatggagtctcgctccgtcacccaggctggagtgcagtggcacgatctcggctccctgcaacctccacctctcgggttcaagcaattctcctgcctcagcctccccagtagctgggactacaggcgcctgccaccacacctggctaatttttgtatttttagcagcgatggggtttcaccatgttggccaggctggtctcgaactcctgacctcaggtgatccgcccacctcggcctcccccagtgctaggatgacagcgtgagcctccgcatcctgctgaagcattaattttctaactgcatgcttctggggtcctctttttcctgggtggattttgggtgccaggtcttgggcaggtcaggaagcagttgcccgccaggagtttaagctggattcggctctgtccactgagcagcccaggcggacttcagctgccccttggtggctgtgtgcacggggccaccaagtgctgggtggtgcatccacaccgtggccccttgagcttggggctgctgcccccctccccctgggctgcagctggggaccggccctccagactgagcacccgtctctgcctctgcagatggcttcaccccgctcatgatcgcctcctgcagcgggggcggcctggagacgggcaacagcgaggaagaggaggacgcgccggccgtcatctccgacttcatctaccagggcgccagcctgcacaaccagacagaccgcacgggcgagaccgccttgcacctggccgcccgctactcacgctctgatgccgccaagcgcctgctggaggccagcgcagatgccaacatccaggacaacatgggccgcaccccgctgcatgcggctgtgtctgccgacgcacaaggtgtcttccaggtaggcagtggctgcctgtgtgcccacctgccctcctcagggccgcctggtggtctggggcagtggccaggcttacgtggc

SEQ ID NO: 43185 - DNA, 2300 bp, Homo sapien
tccacggggggatcgagggggaaggtcggtcctccctgatcccgggactccagaaccccacgccccgggccgcccgcttttccctctccatgctggcctccccgccgcccgctcccagccgtggggcgcgcgcgccgggcgccgccaaagtttccaaagggcgcggaaagtgggggctcgcgggtgggtgggcgcctacctcgtgcggcgagcgcgggcagcagcgccaggcagagcaggggcgccaggagcggcggcatgcctccccaccggctgccctctgcgcccgggcggcggcctcctgcgctggccggcggggctgggacgcacacgcgcggcgtacggtcccggggcggcggcggacggtcccgccctctcttccccggctggctggcggcgctgtgctctcgcaggcccccgggcccggctccgcgcccggctcgttccttcgctgcgctcgcgcccgcgcccgcgccccgcgccccgcgcccttgcgctccctcccgcggccgaggcactagtgaggctcagagtcgaggtgcgctccgcccccgccggccccgccccgcccggccccacccccgccggtccccccgccccctccgcggccacctcctcccgcacgccccgtccgcctttgcgcctccccgagctgagccgcgcgtcccgagcccagcctctccggggaggagggacccggcggcgcggcgtgggtcgggagcgggcgcctgggactacttctcgtttgaaagttttcagaggccaaaagtttgagccggggctgcggaaggatccggctctggcggttgccgcgctcggcgacaactggcgactgaaatttgcatgtgaataagcggaggagcccggggcggaatggggagggcgaggccgcggacagccgtgtgcaccgtgcgctgggccgggcggggagcagctgaggccacgttgggggaccccgggcccggggcagggctctgggagagtggcctagccgtgtgtgcgcccctagcccagcggcttcactccctcccgagggccccgtggccgcggctttaggcgtccagaggatcgatcgccgccagacatccctggccgtgattgcccgagcacttgaccgcgagggatgggggcgccgcggcctctgggcaggggactccgggcgccccgagggagcagccgggaccagtgcctcgcggacggattgtgccccgctcccccaagggggacccgcgtcgacacgctcctcggtcaccgtcctcctcctgcccgggcgccgcctgcctaaggtggccccagaaagcacaaacgggtcgggcggatctgccgctggcgccggcgcagcccttcccacgtgctccttccggctgatttatttctccaccacgatgccaggcacgggcaccctgtgccaagcctggttaagcgccaggagtccaaaatgcctgccatagtccctgcgcaaagttcacggcctcgtgccagggacagacagcgccccctccccaccccaacacagggtggtgagtgcgatggcagaaggcgcgtgtcccggcgcccctcctggagtaggagggctaagcctgccctgcggggagaccgaaaggctgggagggacctaggactgtgggggcctggggggagggctgcagaaaccccagagcatggtggcagaggcaggcacagaaagcaggacaaatctcacacctgaccccagcaagcctttcctggcacacctcttgccaaatgctgagcactctggaaacagccagtgcaggcggcctgtcccgcccctgtagctgctgctgggagcctccctcgcctgcgtcctcccagaatctggcctcacttctgcaggcctggggtaacatcttggggtcagcgccccaggagaggaggcgcctggaggcagcagagatgtttatgtaacagcagccaggcagcctggaggagcagattttccatagaaggaagcgcggggctgtgcagctcccaggctgaggactctgcccaccacgacgtcctctgctcctggtgggtgggggtggggtggggcatagggaggcccgaaggcctcaggcctggtgctgatcgggtgcgggtgcgactgcctgtgtgcctccattggcatctctgcctgtgggccccaggccagaagtaatggcccatgtagcccaggcccgggggccagtcctcagcattttgcggaggggcggcctgggaggggaggaggggatccctggatagggggtctcccctggtctgccccagctgtgccgacagcacctccaccttgggcctcc

SEQ ID NO: 43186 - DNA, 2300 bp, Homo sapien
gctgggtggcctgacgggtggacaccgaatgggccactctcttctctgctggtagaggatggaggcccaaggtggaggtgctgtcggcacagctggggcagaccaggggagaccccctatccagggatcccctcctcccctcccaggccgcccctccgcaaaatgctgaggactggcccccgggcctgggctacatgggccattacttctggcctggggcccacaggcagagatgccaatggaggcacacaggcagtcgcacccgcacccgatcagcaccaggcctgaggccttcgggcctccctatgccccaccccacccccacccaccaggagcagaggacgtcgtggtgggcagagtcctcagcctgggagctgcacagccccgcgcttccttctatggaaaatctgctcctccaggctgcctggctgctgttacataaacatctctgctgcctccaggcgcctcctctcctggggcgctgaccccaagatgttaccccaggcctgcagaagtgaggccagattctgggaggacgcaggcgagggaggctcccagcagcagctacaggggcgggacaggccgcctgcactggctgtttccagagtgctcagcatttggcaagaggtgtgccaggaaaggcttgctggggtcaggtgtgagatttgtcctgctttctgtgcctgcctctgccaccatgctctggggtttctgcagccctccccccaggcccccacagtcctaggtccctcccagcctttcggtctccccgcagggcaggcttagccctcctactccaggaggggcgccgggacacgcgccttctgccatcgcactcaccaccctgtgttggggtggggagggggcgctgtctgtccctggcacgaggccgtgaactttgcgcagggactatggcaggcattttggactcctggcgcttaaccaggcttggcacagggtgcccgtgcctggcatcgtggtggagaaataaatcagccggaaggagcacgtgggaagggctgcgccggcgccagcggcagatccgcccgacccgtttgtgctttctggggccaccttaggcaggcggcgcccgggcaggaggaggacggtgaccgaggagcgtgtcgacgcgggtcccccttgggggagcggggcacaatccgtccgcgaggcactggtcccggctgctccctcggggcgcccggagtcccctgcccagaggccgcggcgcccccatccctcgcggtcaagtgctcgggcaatcacggccagggatgtctggcggcgatcgatcctctggacgcctaaagccgcggccacggggccctcgggagggagtgaagccgctgggctaggggcgcacacacggctaggccactctcccagagccctgccccgggcccggggtcccccaacgtggcctcagctgctccccgcccggcccagcgcacggtgcacacggctgtccgcggcctcgccctccccattccgccccgggctcctccgcttattcacatgcaaatttcagtcgccagttgtcgccgagcgcggcaaccgccagagccggatccttccgcagccccggctcaaacttttggcctctgaaaactttcaaacgagaagtagtcccaggcgcccgctcccgacccacgccgcgccgccgggtccctcctccccggagaggctgggctcgggacgcgcggctcagctcggggaggcgcaaaggcggacggggcgtgcgggaggaggtggccgcggagggggcggggggaccggcgggggtggggccgggcggggcggggccggcgggggcggagcgcacctcgactctgagcctcactagtgcctcggccgcgggagggagcgcaagggcgcggggcgcggggcgcgggcgcgggcgcgagcgcagcgaaggaacgagccgggcgcggagccgggcccgggggcctgcgagagcacagcgccgccagccagccggggaagagagggcgggaccgtccgccgccgccccgggaccgtacgccgcgcgtgtgcgtcccagccccgccggccagcgcaggaggccgccgcccgggcgcagagggcagccggtggggaggcatgccgccgctcctggcgcccctgctctgcctggcgctgctgcccgcgctcgccgcacgaggtaggcgcccacccacccgcgagcccccactttccgcgccctttggaaactttggcggcgcccggcgcgcgcgccccacggctgggagcgggcggcggggaggccagcatggagagggaaaagcgggcggcccggggcg

SEQ ID NO: 43187 - DNA, 2300 bp, Homo sapien
acagttggtgcatccagttcttccctgtctccccccactggatttggcatacattaggcgctccataaatgtttgcccattgcttggcccaactcacatgcctctctaggtggaaggtgtgctcatctccacccggacagcgtatgtgtgccagcgagggctctggtctcctggcctccccacctttgctcccaacgtgccgtcagccagaaagccaggaagctgttcccgcaggaaagtggcagccgggagagcaggggcaggccaaggacctcaggcaccccaggcctccgcctcctctcctgggacccgcctccctcacactccctccttggccccaggggacatctgaggtgggggctgcagtgtcctggcgcccaggctgagtctccactgcccagactgccccgtgctcctgcgtccagagccggcatgtcctggcccagctgcggctgttgggctgtggctcagagcctggcctcggggccggtgtgacttgggtggggttctgccacttgctggtggtgtgacccagccagcagcctcggcttcttcaccacttccctcacaggataaggaagtgaaagatggcaggtgcttacggagcagtgggcgcccacggagactggccacggccacgcaggggtgcagggggatggccagggtcccgtccacgtgggacttaggtctcacttagttccaaggagagctgtgccccgggaaccggcctccatgctgcctgcaccaccagctcctgcgcctcgaggggccgcacccggcagaagtgcctggtgtggggccttcgtcgaggcaggtcttggctggcagcacctgccacaggcctgcgctgggttcagcacgtgcttcacaaaacagcaagtaatgcctgcactacagaggaaaattggccagtgcggaggtgggaggagaggaaaaaacagggctgggctggctggagatccccgctggggctggtggccccccaggcctcccccaggtggttctcacacaggcagagcggccgggcaggacttcccagcacctgtgcctttcccccaggtgacagcaggccagacaccacgtgctgacagtgactctgagtttgtgtcgccttttcctttaaaagaatgacctctccttcagcccaaaccctcttccatacacctcggcaagcccacctcttccctagcttctcctaggctggctgtggctggtgtgggtgcccggctgacagccccacctagggccctctcatgtccttctggttttggctgctggggagtttactgccctggaaggcagtttccacactagctctctgccagccgctctctgcacctgcctgggaggcctccaggcacgcccctgcccagcctcttcatgtgggagtcccaggggcagcagccgccggggccaggccttccggccaagctcagatgcctgctctttccagagcctcccgatcgccccaagtagaggagcctacagagctgcccccagcaaggagcctcttctcacccacgatctctttcattttgcagcggctcagggtgccgccattctctccaactcacaggggagaggacaggacagagacactcaccggagggcacctggtctggaggggccgcctccttcagctccaaccagccccaggccctgcaaagcccctgagggccaggcccacccgatgctgctcgactcagtagcctggcccagcgtggcggcacagcttgcaggaggcacgaacctgttcccagcacacgggccccaccacttcccgccataccgtttggggctcgcgtctcctgtgtgggtgctggtcccagacctggggcctgccagtccccacaccagtgccatcgaactccaagggccctgtcctccccactccgccacaccccgtgggcggcccacatctcctgcacggctctcagcccctccccctgcagtcctgagggtctccccataatggccctctttggcacttcctaaacccaaagaggcaacagatcagagacaggcagggctggccgaggctcctgcagggaagtgggcaaggccctccctcaggcctgtgcccccagcccccaatcccacacccccatcacccccaggtcgccctgcaggcactgtgtgtttggacagctggaagcagagctcggcctgtgacctgcctggtccagcaactggaccttctggaggtgagcctgggagtggccgagcagaggaaatcacccccatggggaggtaggggaggggtgaggccccccccaccaggttctggaatgttccgtggg

SEQ ID NO: 43188 - DNA, 2300 bp, Homo sapien
tgcctccacttcgcagggccagggcaacggccccaggaggagacacccgaacgcagcacctgctcacaggcgtacaccgtctctcccgctattttctcccctaaaagcttggagcgcctggtccccagctctccccacacgggcaggcggggagaggacagggcggcccccagatctccccaggcgggcaggtggggagaggacagggcggctccagctgggggccgggctgctgaactgccgccacctcaactggctgccccacaggccctgagctctcgggaacttctccttccgtcgcgggagatgaagtgctttttcctcttgacgttaacggctgccccatctgtcgggcctgggcaaatcacagcccaccgagtgggacttctgtgccatgtactggcgccaggcgtgagggcagcctcagggggccggcaagtcccccttcctcagccccatgggaacctcagcaggggtgggaagcagtctccagggcctgcaggagcgggatcccagaagctggacactgggaccagccccgttcgtggcgctgaggaccccgaagggacacgcgaggccctggcagctgcattgggtggggactctgaactcactcgagggtcacatgaccctccttcaagaatctgctggaagctacggacccctccttcctccctcctgggaaggacccaggcacaaactgtctgccccatgactgggaactggagaccccgggaccctccccagggctccgaagaccctccatgccctggtctgacacgaggggaaactgaggcagagaagccttcagggcacccatggtccctgactctactggagctctatgacaaccccgcaagagagacagggatgaagcctccagggagggaccccccacacccttcccagaagcccacagaccccagaagcacaggcatccccaggggaggggtgccccacacactaggggctccatctggggctcacgctgctccacaaggctttctcaagtcagaccaccagtgcccacctcgtgagctgccaggcagcacccagtgtccatctggggacccctctcccaggctcactccacagtggaggcctcttctctctcctcccctccagactccctgggtgctgctggggacatccacggagcctgcagcacacagccccctgagcccacactgcgctctcaccccagccaggtgtctcccctgtgaagcaagtctctccctagggacggattctgccgtttaaaaaataagattttcttcaccttcctacatgaacaaaaataacaatacagcaataccactgcaaaatcatcagaatggctaaaatgaaaaagacagacaacagcaagtgctgacaagggtgtggggcggccaaatgctcctgcactgctggcaggggacctgagaactgcagggcattccctggcttcctgcccctcctgggactggggaccccccagggacagcctaagggaactgcatttatcttcacgtctgccaaaagataacacgaagatgttcaaagctaagcccccaggctggtaagagctccaaggcaccagcagtgtgtgcagaactggggggagtctgttctcccagggatgctcccatcacctgctgccagcagtggggcatgccggtcccctggggtgtggccaaggggctgtgtctcctgcccgggctgccggcccctctcaggttcactttcccatctctaagcccacgtctcgctgcagttcaagtttgccaggccaccaacgggtgacacgcccggcgcagtgggggactccgcactttctgcgcacctgctccaagtcacctcttccaggtccgggtccctgccctgtggagcgcgcacccgggcaggggcatggagcaccggcaggactggactttgtgctgagtgtggtggcgccttaggaggaggtcacacaacccgatgtgtccctccgcgaaactccctgagcactgggtgtgaagggcagcggcgcccagcaaggccgaggaggggcgactgttatccaggcaggaagcggggtggaccggaccagggtaggggcaatgtcaggagaaggggacactcagatgcaaagccggtggggacctgccaagaagccagcccacaaggccatggactcctccacgccatcagctggagcagtgggcagccccaggaagggagacgggagcggccaggggaagggcgaggggtcccccgggcgacccccgaggctcaggcgcccggactccagtcctgggcctccgttttccacccttgaacaa

SEQ ID NO: 43189 - DNA, 2300 bp, Homo sapien
aggacacccccagatgtgtgtgacacagcacgggagcttggaggggccccaggccaaggcagggaccagccacacaggagccttgaccagtgagggatggcgagtggcgaggcccggcaggaagggactggggtggcaagacaggctgagcggtccgagaacagcctgttccgtgggtccctgaggcccatggtgagggggtgacgggaggggacaagcatggagtccaagctctctcccctaaaagagctgccagtgaggctgtgagcccctgccctggagatgggcaagcaggcccaatgccctcagccccacttcacaggggtgctctgggctggcagcaggctgcggccgggggtgtggggagggatgcgggacactgtgggtgatcacagggggtgctctgtcagattcccggcgtcccagcctccaggtctgaccctcatcttccctgttcacacggcagtgggagcctcaggccgagcgagccactgtggcaaaggtgggctgggtgggaggggacacggtgccgaagggagctgggtggctttggagggcacgcctggaaccccaggagagcagggcctctcccaaccccgctgtccgtggggtgtgagccctgctttggggtcagcccctgtcggcctgatgcctgggacacccccatttccctggccctgggcggtcagtgtgcccccacctctccagccccactcagctgggcaacttgagccaagggaggctggggcagctggggaaattccccacgggactttggagggcaggtggaaacctcacccacacgcgatgcgcctccccctcaagcaggaaccagctcccctctacccacggccaggggaagggtctgctctgggcgccaggctgtggtcagggctcagggcctcagccaggcaggacctcactcttctccgggcctgtttctgcacctgcttcatggtcactgagctggtttaagggggcgctcctggcacccaggcaccgctggtctgagcgggaggggcctctttccagaggtggcccctgccctgaggttggagcagataggcagaaccccatttccccacctcctccacactaggccaccctgggatctggcccttaccctactggctgcaccctcagccgccctgtgcctccctcggccccctggctctcccacccaggggctcatcctgccctggccagcctgtccctccagctgtcaggagggggttgcagtgaagaacaagttggcagcaggccgggcccagtcccccaggctgtcacccaggagtccagtgccaggaggacagcctggggaggacccagactctgccctcgcccctggctgtaagcacagcagtcagttcaccgggaaggcccccagcgggccaagccttagcaactcgtgcactcggctacttagctactccaccgtataggggcccagtaggcttgtgcccccatcccaggaggtgccctcttgccctctgcctgcatccctgcggcctgccccctcctcccccacctgcatgcccctggatctgccctggcctcctggtggaaggacccacaagcatggggtgggctagatccagccctttctgtgtacagagggggaaactgaggcccagagggagaagtgaccggcccaggtgagcctggaggccggacagggctgggatgctcggcacaggaggctgcctcacccttccttcctcttcttggggagccccatgtcccccaccccagcttgtcctatgtcccaacctggagcagcccctgtcatcagacctatccggccaggggacagctcggggcaggaatagctaagtagccgagtgcacgagttgctaaggcttggcccgctgggggccttcccggtgaactgactgctgtgcttacaggcaaggggcgagggcagagtctgcgtcctccccaggctgtcctcctggcactggactcctgggtgacagcctggggggctgggcaccgcctgctgccaacttgttcttcactgcaaccccctcctgataagctctgccctgcccccagcccctccccaggccaagactagaccctccccaagggaaggaggcctgggctcaggcccagagtgccagctttgccctatcccatagcctggagccaccacaggaggggcactccactctcttgggctcctggagcctcagaggcaggtacaggaggtgggctgcggccttgccctaatgtcgggggcccagcggggacaggaggggcggggggttggcaggggacagacatgggttcttggacgc

SEQ ID NO: 43190 - DNA, 2300 bp, Homo sapien
cctgtgccgagcatcccagccctgtccggcctccaggctcacctgggccggtcacttctccctctgggcctcagtttccccctctgtacacagaaagggctggatctagcccaccccatgcttgtgggtccttccaccaggaggccagggcagatccaggggcatgcaggtgggggaggagggggcaggccgcagggatgcaggcagagggcaagagggcacctcctgggatgggggcacaagcctactgggcccctatacggtggagtagctaagtagccgagtgcacgagttgctaaggcttggcccgctgggggccttcccggtgaactgactgctgtgcttacagccaggggcgagggcagagtctgggtcctccccaggctgtcctcctggcactggactcctgggtgacagcctgggggactgggcccggcctgctgccaacttgttcttcactgcaaccccctcctgacagctggagggacaggctggccagggcaggatgagcccctgggtgggagagccagggggccgagggaggcacagggcggctgagggtgcagccagtagggtaagggccagatcccagggtggcctagtgtggaggaggtggggaaatggggttctgcctatctgctccaacctcagggcaggggccacctctggaaagaggcccctcccgctcagaccagcggtgcctgggtgccaggagcgcccccttaaaccagctcagtgaccatgaagcaggtgcagaaacaggcccggagaagagtgaggtcctgcctggctgaggccctgagccctgaccacagcctggcgcccagagcagacccttcccctggccgtgggtagaggggagctggttcctgcttgagggggaggcgcatcgcgtgtgggtgaggtttccacctgccctccaaagtcccgtggggaatttccccagctgccccagcctcccttggctcaagttgcccagctgagtggggctggagaggtgggggcacactgaccgcccagggccagggaaatgggggtgtcccaggcatcaggccgacaggggctgaccccaaagcagggctcacaccccacggacagcggggttgggagaggccctgctctcctggggttccaggcgtgccctccaaagccacccagctcccttcggcaccgtgtcccctcccacccagcccacctttgccacagtggctcgctcggcctgaggctcccactgccgtgtgaacagggaagatgagggtcagacctggaggctgggacgccgggaatctgacagagcaccccctgtgatcacccacagtgtcccgcatccctccccacacccccggccgcagcctgctgccagcccagagcacccctgtgaagtggggctgagggcattgggcctgcttgcccatctccagggcaggggctcacagcctcactggcagctcttttaggggagagagcttggactccatgcttgtcccctcccgtcaccccctcaccatgggcctcagggacccacggaacaggctgttctcggaccgctcagcctgtcttgccaccccagtcccttcctgccgggcctcgccactcgccatccctcactggtcaaggctcctgtgtggctggtccctgccttggcctggggcccctccaagctcccgtgctgtgtcacacacatctgggggtgtcctgggggagggcccagcatccttggcccaaagatgcagcagctcccttctgtccagccacacgtgagcatggcctgtgaacccacggtcctgggagggccctgggcttgcgtcctccaccccacactctccccagggtctccagcagggtccagccctggtttctggctgttttggggctagactctgatggcccaggggacggcttccccacccctgggcagtttgtccaggccccctcacacggtggcccccacccccctcagcctcctgtttgtccgacgacacgtccccgttatcagcggagaacacacacaggaagtccggctgggaagggcccatcccaatcccgattacccaggacggagcataaaaagccgcccttcctcgcccggggggagcctccctgcaccaagctggccctgcacggctgcaagggaggctcctgtggacaggccaggcaggtgggcctcaggaggtgcctccaggcggccagtgggcctgaggccccagcaagggctagggtccatctccagtcccaggacacagcagcggccaccatggccacgcctgggctccagcagcatcaggtatggcaggggtggc

SEQ ID NO: 43191 - DNA, 2300 bp, Homo sapien
ggccccccttggaccctggagacgcccttgttctccctctccccagcctcatgcagagtggctgaagccccatcccaaagcccccaaaaccacagtgggtcctagaaggccccactttttgtctcatacgtccacaccaagaagcctgtctgagaacccccactttccaaatggtgcctagccaggatgggggcagcgagggctgagtcggggcagccctggagctgccctttctgctccatcgcctcttccagactcaggcaggagaggtggggaggcaggtcaaagggttaagtgaccgcagatccagagatgaggccaggggcaggggacagggagggtggcggtggctctcccacccagaggccccctaggccccactctgaacacttcactgctgggggctaggtaagagctgccctgcgtgggctcagggcgccaggaggcctaggactccccagtcagatgaggaacgccccctgacagcagctgctctggtcgtcccttggaccacgtgccaggggcttccagggcccctggtccagagcagtggccactggattgcagggtggggcggcctcattttggggactcctctccagggacctgggcccctcccttcctccagctcccatgcaccaaggtaggaccaagctggtggccctctcggacccatctgcaggccccttgcccagcaccctgggttacatggagagacctccagctccactcacagcagcctcccatccccatgccagggagtccagggctggaggcaataaccccattttactgaggccaggggctgcggatccgagaggacaatcagctcaggacaggatggggtcggggtaggtgcaggacaggggcctgtaggcctagtgcaggcggaggtcccacagcagcaccgaaagctggtcccgggccccttcccagcccccagacatcagggtgaccaggactgtgcataggcactaacccacaactcctctccaaccagcagcccccaggaccggggaggcacaggtggcccccaccacccggaggagcagctcctgcccctgtccgggggatgactgattctcctccgccaggtgagtcccagcaaaccccttgctccgagggaacacttctcacaccggcgcccacgcgggttatgacacagggcgctggctccggctggggtctgaggggctgctgaattgggctggcccgagccccacgtgccgcgcccgcagtaacagctgtaacaattgttgtgtggccacgacctcaccgtcactagatcccagggctgtttagccccatcttataaatttggaaatggaggcctggagaagagaggtgaccagcccagggacctctggtgtgaggagactctctgggggcctgtggattcgctgggaggagtgttctgcgatggccctgactgtgctgaactcagcagtgacccagtgaccccggtgagggtgcctgatgcctgagagagggccaggtgggggccggcgcaggggcccccaacctaacacgctaaggctaggaggcaggcctgggctctgccatgtggtctcagaggagatctgggtctctgggcctgcggtggggacggtcatgatgcccactgcctgcgaggctgcaggacccagctcagtgctaacctgcgccgggcgcctaccgcgcggccccccagcggctgagatgggcgtcccggggtggttttcagcctggggggcttgaaagctagcaaagggcccgcagccccgtcagtgtgggcgccctgggcggcctctcctggctcctggcggccgggcttggtcgtgcgtccccagcgaccgcgcagcgagcgccctgccgcggggactcgggccccaggattcccggagggggtgctggcgggccgcggctcagaggcgcgtttgcgtcagccccgggttccagcagagtcactgcccgcccgggggcagctcgtccgccgcggggcctcagtttccccgtctgcgcaatgggggcggggcggggccgccaggtggggcggggccgggggcggggcggggcggggctcggggcccccacggcgcgggctcgggcggcagtggcggcggcgcgtgcgcgccccggatccggcggtgagtgcggagcgagcggggcgcgccggggtcggggtccggtcgccgcccgggctgggtcgagggcgggacccgcggagcccccgggggcggggaacctggccgcgcgcggagctgggggcggctccgggacgaggcagcgcgaccgctggggccgggggcggagcgggccgg

SEQ ID NO: 43192 - DNA, 2300 bp, Homo sapien
gctgtcagagctgaggaggggcctcagagaccctattctagtgtgtgaggaaactgaatcccagagaagggacagccttaccccagcctctgccccgacccgaagcctggcctttccctgcggagggccctgcagtgcctcggaaggaacccacccagcctttgggaagcacccgtgagaggccctgggtgggaccctgcagcatggcaggggctcgccaggtctccagacccctggctgcgcataggacagaatccccatccccggcattgccacagaccattaattctgggctctcatgctctcaggaagcctcacccgggcccctggctcctgctgcacagccaggagggggttggattccggttccggtgacactgtcgggggctgctcctcacccccaggtgtgcacctggcacagccactgtcccaggatccctggaggctgattgcacacatatcccagcctgggaaggaccccctctaaaatgaaggccgcccctctggtggtcttagaatgtgtgcaccctccgcacggttcctgctggcttgcagctgctggcccacctgctggggccggttccacactcagatgagaaatcaaattccagaagggctgaggccggcaggtccctggtggggctggatcccagctctgcccacgaacaccccgtttgcatagactggggtgcaaactcacccctgccctgctgtgaggagggccctggaaccaggcaggacaggagaaacggccacccgtagctggagccatccttcccggagcctcgggcagatgcccagcaggatccactcgattcctgcaccaagagctctggacagcgtcaccccccctgtgcccccaggctgtggccccagctgtttgtgcctggcgagggtctggctagctggaagagggggccagcggaggagagagtgggcgccaccgtggggctgtcccaccggtggaggctccagcggagatgagctgggcaggcctcgcggagcaagtgcaaactgcacccgcgtcctgggggcatctgcggggagacttaggggtcatgctttgtgccccaggccacccagaggagaaggccaccccgcctggaggcacaggccatgaggggctctcaggaggtgctgctgatgtggcttctggtgttggcagtgggcggcacagagcacgcctaccggcccgggtgagccaagccctagcctgggagtgctggggtggggggaccgggagccctcagcacctcctagaggcggccctcagcacctgtcggggactccctgggggctcctgctgagggtcctgccccggccacatgttcccatcattcttgggtcctgctctgggactcctgggctgaccccctctccacccccgcagccgtagggtgtgtgctgtccgggctcacggggaccctgtctccgagtcgttcgtgcagcgtgtgtaccagcccttcctcaccacctgcgacgggcaccgggcctgcagcacctaccggtgagtgccccaccacaccgagctcacccagccccagcctcccaagtcggccacacatcagcatgtcaggggcgaggcgggggtgaatcctgggacccaagatgggaaactgaggccagagccatgagagggctgcctgagatgggcgacccagggcggccggagccaaggggttccacgatcacctccagtgtcctaatccttgctcttgccccgacacgtctcaaaggaccgcacctctaagagcatccccatgtttagaggggtcacccatcctgtctgcacccctccacttccgggggactaacccctccctaccctggcatccctggctgcaagttcccatatacacagaatggtgcctgactcccctggtcccactccactgggcacccccctccacatgacggcccccagtgggcacagatgagaccctgaaatgtcctgtatgcccacacaaggggcacacacccctaagtctcagagtcctccttcctgggtgtgggagctccaccccctgctgggggaggggcctgggaattcagacttctggaggtttaagaagggctccgatgcccagggcccacactctgccgtgactcgccgtaggccgggcacaccctctcctctgggcctggatgcccccacagtaggagaccagataggtgggggcacacacaggcctggccactgcctctgctccatgcggagtgtggctgggccttcctgctgtggcttgagtcccggccagcaccggaaggcccaggcagggaaacggctgtgcagtgacccc

SEQ ID NO: 43193 - DNA, 2300 bp, Homo sapien
gggtttgtgtcgcatgggaacagacgtcagccagagaaggtggagagttctggagatagagggaggagatggctgctagacaccgaatgtgcccagcgcccatgaactgtgcacccggaaaaggccaaggagatacattttatgttacgtgtattttaccacaatttttttttaaaggccgggcgagttggctcaggcctgtaagcccagcactttgggaggccgaggtcggcaggttgtttgagcctaggagttcgagaccagcctggccagagatggtgaaagcccatctgtaccaaaaatacaaaaactagcgaggtgtggtggctcacgtctgtggtcccagctagtcaggagcctgaggtgggaggagcccaggaggtggaggctggagtgagcccagattgtgacactgcacaatgtgacacattgtgtcacagagcaagacagagcaaggggagcctgggtgacagagcaagaccctgttaaaacaacaaaaatccccaccagtatggctttgagagaaggccccggctttgaatctctgctctgtggcctggggcagttactcagactcatctgtagaaagtgtggggcccttaggactgctgggggatcaaatggtggggggcactagtctgcatggagaggggagcagcactggcagccccccagtcagcgctggcacagccttgccccggccatccacccctgctggagcttcggagtggagctccgtcctcctggctccatccccgccggctgccctgtgatggggtgccctatctggggtgtgcccagagcttcctggcagcacagcagggcagaggttgggacgctcggagctggtcagagtcttcgggtaccccttggacatccctggtcccaaccatgacgggctgcttggacaaggccacctcacatttgcaggtgctccaagggcagcccccagtgggctgggcccctgccagagtgggggctgctgtggccagggctcaggtggcccagaccctggctctgctgctgctcctggtgtgacctcagacaagccccgagcccctcgccgcctcttcacggggaaagggaaccggcctgattctgtagggtaggggtgagagagggtctcggtctcggctcttttctggaagaacctttcggaggtcgtttcagaggtctccactggcgccgacactttcttcctgatgtggccctgccttgaggggccagtgaccttccccagggtgtgtggggccccatttcctctgctggggtgcagaggctgctctccccgacgtgggtccttcatagcggacgtgagagccagtgccagttcctttccggctgggtcccctgtggggtggatgagggctgggtgggccctggatgtggatttggaagtgggcgccttcccatgctcctagcatccgagttccagaggctctgggttttcctctgttgctggggagacggaggcagggcagccgtccaggtgggtgagccgggcccgggactctgtccgcttcaggggctccctcccctgtgtctcccggtctcctgccccgtgccaggagggcccctccccagcctcctccacaccccacccccaggccttcgcgccccagcctcggctgcgggatctgtgggacccgtgttcatggtggcctcccctgcagcatcatcggctggttcgtgcgaagcttcaagtacttttacgggctccgcttcgaggtgcgggacccgcgcaggctgcaggaggcccgtccctgtgtcatcgtctccaaccaccagagcatcctggacatgatgggtaggccgggcctcgggggtggcttctggggtttgagtggggccggctgagctggggctgtgtggggctgggtcccggggacgaggacacagggctgcctgtgcctgggcgagctcggcctcagtacctccctcagggccagacacagaggctcggaggccacacgacccgtccaggtagccagggagaaggcagggtgccaggcaggcctgtgggtgctcagcagctgtcttccagcgcacgctgtctccccctctctctctgtctctgtctctctgtctcccaggcctcatggaggtccttccggagcgctgcgtgcagatcgccaagcgggagctgctcttcctggggcccgtgggcctcatcatgtacctcgggggcgtcttcttcatcaaccggcagcgctctagcactgccatgacagtgatggccgacctgggcgagcgcatggtcagggagaacgtgagtgtgcagggccgggctcggtggggtt

SEQ ID NO: 43194 - DNA, 2300 bp, Homo sapien
ccgcctcctcttggatcttgtcggaggaaaagtggacgtttctctcaacacttctgcaaggtgcagagaagagggaggaggtgaaattaggtctcaccctcttcaggagagcagtgggcaaaaccccaccttgtctggggaggcaacagggtcaccgtgtgctgccctggcactgttcctgccagccctggcaggagtcttccggctcagagtcagcctcttttcctctgtcacgtcccggctgtctggtgttcacccttgagagcctcagttttccctctgtaaaatggggatgcctttgctactatggaaagtgtgtgctgagcacctgctatgtgccagacattggcctgagtgctggtcgcacatggtgcacaaaacagatgaggccccacgggctccattccggggggaggagaggagggagaggtgtccaacacacacacagtcacctaggggtgcaggaagatggtggccaccctggaaaggtcggtgggctgggaggtaaaggacaagaagggggctggcatgtaaagcccctggacaggcctgatggttgtgaggactggattccacagccagggtacaacctgctcgggacctgggtgcacagagcctccagctgaaggtgctgtgaagccccactcctccaggaagtccacctgggaccccagcccacacccccgcatcccccagctcccggcagcggcactcctgtctgcagggtgcacccacctcatctgccctggaagatgaaaaccccgcagccgtcagcagccacctctcagcctctcagaggcacagcagtgcagctctcagacctcccggctgcggggtgtgcagttccggctccaagcgtggaaagaggtcaagccaggccctccaagctgattccagatgaagcccatatggatctggaaggagactgggctggaaaatgctctcctgggtttcgctgtaagatgcctacaggcctaaggcaaaaggatgtgtctccactttcaagaaaagctgggaccgcctgggcaggggctgctgagcccaggcagcgagaccccacgtccttcaggaccgcagttccccattcatttgaagagcagtttctgtatttgtcattctctcagtacagtttggggggtggttacaatgttcagggaaatgttttaacagctcaactctgcatctgaaaaaagaggggccgtgctcccctgctgacccgttagagcgcagggcggccagcactcccgcaactgcagcaaacccaagagtccctatgaggagggaccccaggaaactgcttttcaatctccatctgctccctgaggtgggacgccgggtgggggccgggccaggtgactgctgcccttgtcccagctgcaccttgccctgccacgctggccgtgctgccaagcggatgtgaacgccgccacctgacacccacctcgcctgcccccggagcgtccctggtgacaaggctacttctggcacccagggtggggcaacccagccccgcccagacacacgccccagttggcctgcgcgcccccacgagtctccccgcaggggaccgagaacaccctaagagccaggctttctgccaggtggccactggtcactcgggggcggttccggcggccctttgcgtggccaccggcctggcacgggcgcatccccgctggttttacgcccttggggagctgtggttctgcgcgcgggagcctgtggctgccccggcagcggggggagggggcaccgggcggggcaggaggcccagaccatggggggcagcgccagagcccgagccaccggcaagccatgatgggggggtcccctgggaccgggagggtgggagcagagcgccagagcctcggtaacctggcagaaggctgtggggagggagcgtggaggggaggtccgggccgggtgacccagggcgggaagggggggccgtgtcggggcggggttggggacagtggcggggcggggcctggtgaggggaccgtgtcggggcgttgttggggacagtgtcggggcggggcgccgcacctagcccttccctgccgcgcgctcctcccccacgccgcgccccgccccgcccagccccgccgccctcgcaataaggggcctgagcgcgcgggggagaagcgggagcgggagcgggagcgagctggcggcgccgtcgggcgccgggccgggccatggagctgtggccgtgtctggccgcggcgctgctgttgctgctgctgctggtgcagctgagccgcgcggccgagttctacgccaaggtcgccctgtactgc

SEQ ID NO: 43195 - DNA, 2300 bp, Homo sapien
tgtttaactccctgccatgcaattctgtggggaggggctcatcctttcaacagatgatgccagaaggattggatgtccatgtgcaaaaaatgctaacaaaacccccaagccccaaactgaaaaccctctgatccacaccctgcacaatacacaaaagttaactggaattgggtcattgacttaaatatgaagccgaatactatacaacttctagaagaaagcacagaaaacctttgtgaccttcggttaggcaaaaatttcttagagatgacacactcagagcacgatccgggctggtggcagtggctcactcacgcccagaatcccagagctttgggaagccaaggtgggaggatcgcttgagcccaaaagttcaagaccagcctgggcaacatggcaaaaccccatctctacaaaacattaaaaaattagcctggtgtggccaggcacggtggctcatgcctgtaatgccagcactttgggaggccaagccaggcggatcatgaggtcaggagtgatcctggccaacatagtgaaaccccgtctctactaaaaatacaaaaattagccgggcatggtggcttgcacctatagttccagctacttgggaggctgaggcaggagaatctcttgaacctgggtggcggaggttgcagtgagctgagatcgcgccactgaactccagcctgggctacaagagtgaaactccgtcaaaaaaaaaaaaaaaaaaaaggaaaagaaaagaaagaaactgttaagagaatgaaaagaaagccacagactgggagaaaaatctttgcaaatcacatgtgtaataatgggcagatatccagaagatataaagaagtctcggaccaggcatggtgactcacgcctgtaatcccagcactttaggaggctgaggcaggtggatcacttgaggccaggagtttgagaccactccggcctgggcaacatagcaagactccctctcaaaaaaaaaaaaaaaaaaaagtcttggctgggcaccaggtgactcatgcctgtaatcccagcactttgggaggccaaggcaggatgatcccttgagcccaggagttcgagaccagcctgggcaaaacactgagacccagtctcattctagatattaaaaattaaaaccaaaatgtaaataagtctcaaaacttaataataaagaaacaacgtgatttttattaatggtcaaaaacttgaatagactttggagaagatacacaggtggtaactgaacacgcagaaagtgtgttaaacacgcgaaccacagccccagcgagacgccaccaccagggaaatggctaaaatgtaaaaacctgccgatagcaagagccgcccgggatgcggagcagctggaagcgccggcggccgcggggagggagcgagtcttggcagctgctggctgcgccccacatccctcaccgtccaactcagcccccccaggtgtttaccgaagtgcaatgaaagcttctgttcacacggaacctgcctatggaggcggcaacggctcatccccgagcaccccacgcggaggcgaaggaagtgtcctcccggcgagtggccaaggcgcggggtctcagccaggagggaagggtcggaccccggggcgggctgcaggctcggccagcccagggctccgcgcgtctgaccccatcctgaggacccaggggaaggaccagccctggctctgcggcctcgaaccgggggcgcgcgtggggagccctgaaccccgcagcctgcgtagcgcacggggcctctctccagcgtgggaagagcccccgagacgcccaggagcccgacaggcgcgcccccggccccggctccgcctcccggcccatcccgcgcgcccccagcccctcccgcagcaccgttgcatgaggggcggggtctgcgggtgggcggggcctcggtgcccgccccctcctcagccgagccgggggtcgaaggcgggccgcgcgccaagccccgcccccgcgcgcctccgccgcgaccctcccccgcgcgcccccgccgcgccgccgtcggccgacagaaaggcgcgcgccctcgcctttaacgcgggcccgggggcgcgcggcccgcatggcgagggagcggcggccgctgcgggccgggccgggccggggctgaggccgagcgagccgcggggcccgcgcagccccggccggagcccaccatgcggcggctgcggcgcctggcgcacctggtgctcttctgccccttctccaagcgcctgcaggtaagcgcggtgcgcgcccgccgcccccggccgcctctgcctggggagg

SEQ ID NO: 43196 - DNA, 2300 bp, Homo sapien
ctcagtatctctgaaggaggagatgtctcttgccctctctccacagctagagctttcactagctacagagctacagccaactcctgcaccagctcagaaggtagagccagctccggctacaactcgggtgctagttccaggatcagagccagctccagcaacagctccagcagcacacccagagacaggggcagctctggtcacttctgtgccggctccactatagctccagcatccgccctctagccaggaccagttccaaaaccatttgcatggttagggccaaatatcagcatcaggttcagaaaaagagccagggccagcatcagctacaggcccagcttcagcaccgcggctcacaccagtgcgggttcctgtaccagctcaagaactatggccacagccagcacaactccagatctcactccagctgccgcaccagctctaccacctactccagaaacagaggcagctctatcaccaaatctggtgccacctccggtgactgctcgggcaccggctccaaaaccacttccagagtttcagccagttccaggtgtagacctcaagccagtgccaggttcagaggaagggccagctgcagcaccacctccagagccagagctggcaccagatataaagcgatggctgattccacaaccagaaccagaattagaggcagctccagagctacagccatctcagacctgcaccagcttcagaacgagagccagagttcctgccagctctagagcgaaatccaatcaagaaccagctctagcaccatatccagagctaggaccagctctgacacttttcccagggcaaagactagcaacagcaacacagctagaggcagctccagagcatcggtccccggggcagagccagcttgtctccaacaaccgtgtcagtgctaggacagagcctgcaccatctctggaggtggagcctgctgtggtgccagctccagccccaacaccagagctagaacccagcctgctggtggggccacacagggaggagcctcagaccgcgcagttgcagcccagttgcaaagtgtcctggggtcctgcgctggggcttttcttaggagccctggggtgttttctggctttgcaaaggcaatgaaaatttgagttgaatttatcaccagctcctgctccctctaagccagtacccgagctggagccagctcctatgccagctcccgcaccccggccttcctggcctttgcctgtggctgcagagagcaggctgagccagaagcctcatctcctggtgtcccctccaggcctaaggctagagcggtctgcgctgtgcaatgcggaggctgcccagccccaggacagcagcgcggccttcctcccggcccctgcggctcaggcctgtcatcccctgctctggagctcgcgtcctggtccgagtcccggcggctccaccgttcgcagcccggcgaccgcggcgagtcgcttggccgcgaggcctcggtgtcccgccctgcgcggtgaccgaggtcccaggacacagcgcagacagggcgctagtcaggcctggccgcggtaatcccgcctgccgggaccctcgcccgcctcagcactcattaggcgcctggtgtgtacccgcgcccatggccgacaccggcagagcccctggtggggaagggacggagcgcgtcgcgggagccccatgctgcccggggtgggcgctgctcgacagtcacgggagccgccccaatggctgggaccaccgggacccacgggctcgtggagcgtcctcctgacccggcctgggaatcctccgcgaaaacggggagccgcgcgtgtccgtggcgtgcccggcacccggcgggtcggaaacggcgcggccctggctgctggccccgtggggcggtcgcggtgcaggacacgggtcacggcgctgccgctgctctgcgtggcgaacccacacgcccgcccgccagccactgagcagcgcccacgtgcgggcgcggggagctgaacggccggggaccgctggggggcgctgcttgggcggggcggattgactcttgcgggccgccgtacgcgctataaaaggcgcggcgcttcccttctcgtcctctgcgtgcgccggaggctgccgtggcgggtgggccgcctgacttctcctcccggccagttctcgagcgcctcaccgggcctcgccctgcagcctcgctctcgctggcgctgcgcggcctaggggactgggctgctggcctccgggtgcggggtgggggcaggctccgacctggggcgtcctggccgcgcgagccgcgg

SEQ ID NO: 43197 - DNA, 2300 bp, Homo sapien
cccacagggtcctgtgacctcggccagtgtccacccacctcgctcagcggctcccggggcccagcaccagctcagaataaagcgattccacagcaaaccaaggatgcttttgactgggggccagccggggaattgcggggaggatggcgggggtcgtcaccaagggccaagccacagaaccatagagccagctgcaaagaagacgcgtgcccaacccagtcccttgccagagcccctctgggtcttcagacacccaaactcaggcccgggctcagaggcgggggctggtcagaggacacagcctgggaggaagccagcagtgagctccaccaggaccgcagctggggtgccagaggctccaaggactgcccaggacaagagagaggtggctggtggggctcagagcagcccctgactccccaggctcaggcttctctgggctggggttgtgtctcttgcctgggcaggggcagggaccccagacacctgagcctgcaggtcctcctgtgttctgatgggtgtggggggctgcgctgcctgccgtcctgggagaagcacaggccatgggggtctcggggctggatggggggctggggactgtgtgaggctcatgctggagtgaggcgaggtgcacacagatgccttgacctgcaaggctgggcatgcacacgcatgcacatgtgagcacacacccacacatgcacacacacacattcatgggcacgggcacacagccccggcccgcccttcggcacctgctcaggtgcttggtgccaggccctcaagaaggtggtgggggctgtgtgtgtggctgccgcgcagagctcaccatgtccacatctgccccagaagggccacgaccagccctttgcctgtcacctgggaggtctaggatgagggccagggcttaatgagtctcaggggcacacacagtgaccccaggccgggcactgagggcaggagggtcctggggcctcagaggggcctctgtctgccagggcagcccaggccagcagtgaccaccaggtggggcagtgccggcttccctggagtgtctgggggtggtccctgggcggggagagggtagcagagcccaaggccacacctgttgcctccctccgctccctcccctccctcctctcccgacacaggctggcggctccagagaggtttaaacactggccttggcggctgagggaggagggtgaagatgaggcaggggctgctggtgctggcgctggtgctggtgctggtgctagtgctggctgcagggtcccaggtgcaggagtggtaccccagggagtcccacgccctcaactggaacaaggtgagccatgtgccactggtccctgagccgggcgccggctctggagctggagcaggctcctgcacagtctcccggcagccgcccaggagcagggctaccagcagttccaggcacgggcgctgcccacctggcctctcccactgcagcctccagcacaggggccccgcaagttgcagggcaaaggcagggagcctcgagggggttcgggggcccaggggggtcagggagggccagggtggaggggcccagagagctgtggccgaggaggtcgggagacgcccagagtgcagagtgggtgtggagcaagcggggcatattctgtagcgggagggcccgggcacctgctgagtgagccgtgggagcagcactcattggcacggcggtgcccagggcgctagggttggcagcaggcagagttgggggccgggggccggcaggaagggaagtggccgagcagtacccagcccccaggaggccatgtgggaaggagccggggcctctgaggtagggggcctcccacctgctggcgcccacagcccagccctttgctgcctggggtccctgaccagccgggcacctgcttctctgcagccctgctccagtggccagggcttgagtggccgggaccgaggcggcacctgggcggagctgggactccggctcacagaagggtcatttgtctcctgggttctctagctgggaacctcgggggtggggacagcccccggtggcagctcctgtccccgcccacacatccgctgcgcagttttcagggttctggtacattctggccactgccactgatgcccagggattcttgccggccagggacaagaggaagctgggggcgtccgtggtaaaggtgaacaaagtgggccagctccgcgtgctcctcgccttcagacggtgagtgggcagcgccccccaggcaagggtctccccttccaggaggagggagctgcctcggggctgg

SEQ ID NO: 43198 - DNA, 2300 bp, Homo sapien
ggggtcgggggtgggggacaaagcttgggggctctgggtgtgcttggaggggtctcctggggaggggggctctcacttgaattggcccctctgtccctgtggccagcatcagctcagcggcccctggatggatacagcagctgccctcccctgaggcggggggttttgtttcctagcaataggcgtgctggagctctgggtgctggccaccaacttcagagactatgccatcatcttcactcagctggagttcggggacgagcccttcaacaccgtggagctgtacagtaagtgtgctgtgcggggcccacgtagggagctgtgtggtgcgtgggccactcggggcccacgttgggagctgtgtggtgcgtgggccgcttgggggccgcgtggggagctgtgtggtgagtgggccgctcgggggccatgtggggagctgtgtggtgagtgggccgcttggggccacatggggagctgtgtggtgagtgggccgctcgggggccatgtggggagctgtgtggtgggtgggccgcacaggaccacatgcaggccaagttcccccaccttgaggctcgctgcactggaggtggctttggaaggaccggggccagcatcccagggcaggtggcctccttcctgacccttcccagcccctccccggcccctccccagctctcagaggttgcttccccctgcactgccctggtgcccccaggtctgacggagacagccagccaggaggccatggggctcttcaccaagtggagcaggagcctgggcttcctgtcacagtagcaggcccagctgcagaaggaccgtgagtgtccaccggagcagcctcgggggaggcttggggcaagttctggagcccacagggcgtgatggggtgacagagaccctggggttgattctggcttctgcctgactcagtcgccctgaaggagtcaggcaggctgagggggtcttcacctgcccctgcccaaagtcaggcctgggggtcttgtccccacggcaggcgagtcttgtgggtggggccctggggtgctggggggctcagtcctttttcacagccagtcttgcctccccttctagtcacctgtgctcacaagatccttctggtaagccgccatcctgagcctcaccctgggctctcttgggggaagggggtgggggaggccaccctacgcacagtgggtgggaggaccctctgcccaagcccacggggttcatggctccactgtctctaaggcagctgagggtgtggaggagcctccatggtgggctgggccccctcacactcctcttggttttcagtgagtgctgcgtccccagtagggatggcgcccacagggtcctgtgacctcggccagtgtccacccacctcgctcagcggctcccggggcccagcaccagctcagaataaagcgattccacagcaaaccaaggatgcttttgactgggggccagccggggaattgcggggaggatggcgggggtcgtcaccaagggccaagccacagaaccatagagccagctgcaaagaagacgcgtgcccaacccagtcccttgccagagcccctctgggtcttcagacacccaaactcaggcccgggctcagaggcgggggctggtcagaggacacagcctgggaggaagccagcagtgagctccaccaggaccgcagctggggtgccagaggctccaaggactgcccaggacaagagagaggtggctggtggggctcagagcagcccctgactccccaggctcaggcttctctgggctggggttgtgtctcttgcctgggcaggggcagggaccccagacacctgagcctgcaggtcctcctgtgttctgatgggtgtggggggctgcgctgcctgccgtcctgggagaagcacaggccatgggggtctcggggctggatggggggctggggactgtgtgaggctcatgctggagtgaggcgaggtgcacacagatgccttgacctgcaaggctgggcatgcacacgcatgcacatgtgagcacacacccacacatgcacacacacacattcatgggcacgggcacacagccccggcccgcccttcggcacctgctcaggtgcttggtgccaggccctcaagaaggtggtgggggctgtgtgtgtggctgccgcgcagagctcaccatgtccacatctgccccagaagggccacgaccagccctttgcctgtcacctgggaggtctaggatgagggccagggcttaatgagtctcaggggcacacacagtgaccccaggccgggcactgaggg

SEQ ID NO: 43199 - DNA, 2300 bp, Homo sapien
gagccgctgagcgaggtgggtggacactggccgaggtcacaggaccctgtgggcgccatccctactggggacgcagcactcactgaaaaccaagaggagtgtgagggggcccagcccaccatggaggctcctccacaccctcagctgccttagagacagtggagccatgaaccccgtgggcttgggcagagggtcctcccacccactgtgcgtagggtggcctcccccacccccttcccccaagagagcccagggtgaggctcaggatggcggcttaccagaaggatcttgtgagcacaggtgactagaaggggaggcaagactggctgtgaaaaaggactgagccccccagcaccccagggccccacccacaagactcgcctgccgtggggacaagacccccaggcctgactttgggcaggggcaggtgaagaccccctcagcctgcctgactccttcagggcgactgagtcaggcagaagccagaatcaaccccagggtctctgtcaccccatcacgccctgtgggctccagaacttgccccaagcctcccccgaggctgctccggtggacactcacggtccttctgcagctgggcctgctactgtgacaggaagcccaggctcctgctccacttggtgaagagccccatggcctcctggctggctgtctccgtcagacctgggggcaccagggcagtgcagggggaagcaacctctgagagctggggaggggccggggaggggctgggaagggtcaggaaggaggccacctgccctgggatgctggccccggtccttccaaagccacctccagtgcagcgagcctcaaggtgggggaacttggcctgcatgtggtcctgtgcggcccacccaccacacagctccccacatggcccccgagcggcccactcaccacacagctccccatgtggccccaagcggcccactcaccacacagctccccacatggcccccgagcggcccactcaccacacagctccccacgcggcccccaagcggcccacgcaccacacagctcccaacgtgggccccgagtggcccacgcaccacacagctccctacgtgggccccgcacagcacacttactgtacagctccacggtgttgaagggctcgtccccgaactccagctgagtgaagatgatggcatagtctctgaagttggtggccagcacccagagctccagcacgcctattgctaggaaacaaaaccccccgcctcaggggagggcagctgctgtatccatccaggggccgctgagctgatgctggccacagggacagaggggccaattcaagtgagagcccccctccccaggagacccctccaagcacacccagagcccccaagctttgtcccccacccccgaccccacctggtgccagcatcaaggggctttcagacactgacggacagacagacaagcactgccccagcctgtcccaggtgtgaacgaggagcggctgggtcacaccagcccagccctgtacctgtagacagccactaaacaggcccctcgccctctgcacctatggggaccttggctggacctcactggtgtctgagcctgctgggaacaaggttccaatcctctgtccaggggcttctcttcaccctcaggatgggcagcaatcccaagaccagaacctgtagcctcctggctctcgggagcggagtcagccctccgtccctgcccgcagggggcctggggatgctgcagggaagaacggcctgggtgaggccgtggccgtcagactcacagggattctcaaacacccatccggagtttcgctttatcaggtccatgacactctggtcacaccctcccagcctggaaaagaaggggcctgtcacccactcagggtcaagaccccggggcccggtgagaggagacggagctcaggagtccaggccaggccagccagcagtgaggccagagcttccatcttctgccagatgccccgatgcccggaaacctgttctcggagagtggacggcgtgggagtcctgagaggggcggacactcccattcacttcctgagagatcctcagtgccagatctccaccaggaacgctgaatgctgctgaggacacaacaggagactcgacagacgggaggttcgcccgcgactcgggggaaagatggggtggggtgggggttcgcccgtgactcaggggaaggatggggcggggtgggggttcgcccgcaactcaggggaaggatggggcggggtgggggttcgcccgtgactcaggggaaggatggggtggggtggg

SEQ ID NO: 43200 - DNA, 2300 bp, Homo sapien
agggctggaggctgtagggctggagaactggaggctggaggctgctgggctggaggctggagggctgtagaactggaggctggagggctggaggctggagggctgcagaactggaggctggagggctggagagctggagactagaggctgcagggctgcaggctggaggttggaaggctggagggctggagcctagaggctgtagggctggaaggctggaggctggagggttggaggtctggggggttggaagctggaggctggagggctggagaactgaaggctagaggctgcaaggctggaaggttggaggctggagggcgggagggttggagactggaggctggagggctggatggttggagggtggaggctggaggctgcagggctggaaggctggaggctggagggttggaggctggaggctggagggctggatggttggagggtggaggctgaggctggaggtttggaggctggaggctgaggctggagggttggaggctggaggctggaggctggagggctggcggccctaacgggagccgcctcaatgcagcttcttgggccctggtacgtgcttgcggtggcctcccgggaaaagggctttgccatggagaaggacatgaagaacgtcgtgggggtggtggtgaccctcactccagaaaacaacctgcggacgctgtcctctcagcacgggtgagtgggcgggtcctgccaggccttcccgcaggcaggactgtggctcagccacatcatgtactttgcacatctgctcccgggcaccgcggcctgggggcttcccacggcccctctgcacccccgtcacttttcccactgggctctgtgcagagccaccagccctctgcccagctactcacatctgtgtccctggggcctccaggtggcactcccaccttcaataccgcggcgggcactgctctgactatgctccttcatgcatccctgtcctgggtcatctgggctgcaggctgtggtcagagctggggaagcctgtcctctcagcaggcctttttcgggaattctgtttaaaggaggataatgcattcggacctaagaaccactggttctttcataacataaatccccaaacaatatggtcatggacgctgttggccagactggccttgtggcctcaggcaggcgcacccgaccacatgcatggctggtggcggcgtgcaggggtcgggtgggccaggctgtggggcggccgtgctacacaggggacacctacagggcagccgggctgtgggggtagccgtgctggggcaggagtcggtgcccgcctcccttcacagaagagtggcctgctgggtggcgtggtgggtgtctaccccctggcaggctggcgacagagcccaggcctgaaccactgagccaggtacggggcccagagagaagaacctgccctcctcaccagcgtgccttccccctgcacctgcgcctgcagggtatgggcaggggccccactgcaccccccgggccaggcctggcctcagggcgagctgggaccaaggggctccaggctgaggtggcagctcccacgtggctttcctagttcttcttgctgttcctcccgcatggactcagcctcagtttccttccttggcaaacaccattgcacctttgctgggttttgctcactctggggactgaccacttagggagcgccggccccttcccccgagtcgcaggcaaacccccaccccgccccatccttcccctgagtcgcaggcgaacccccaccccaccccatccttcccctgagtcacgggcgaacccccaccccgccccatccttcccctgagttgcgggcgaacccccaccccgccccatccttcccctgagtcacgggcgaacccccaccccaccccatctttcccccgagtcgcgggcgaacctcccgtctgtcgagtctcctgttgtgtcctcagcagcattcagcgttcctggtggagatctggcactgaggatctctcaggaagtgaatgggagtgtccgcccctctcaggactcccacgccgtccactctccgagaacaggtttccgggcatcggggcatctggcagaagatggaagctctggcctcactgctggctggcctggcctggactcctgagctccgtctcctctcaccgggccccggggtcttgaccctgagtgggtgacaggccccttcttttccaggctgggagggtgtgaccagagtgtcatggacctgataaagcgaaactccggatgggtgtttgagaatccctgtgagtctgacggccacggcc

SEQ ID NO: 43201 - DNA, 2300 bp, Homo sapien
aggggcagtcctttccccttcagtgtggctgtcatttatctataatgcaactatatcccatgtttggaatttgtttattttacttttgagtataacagtataacataccaaattactttgattccaaagtcaaaactatacaaaaacgtttactcaaaaaagtctaacttcatccccccaccctgttccagctccccaccccagcagggaactagtctcattagactctgaggtttatcctttgtttttgtttgtttgtttgtttgtgtgtttgtttgttttttgagacggagtcttactcactctgtcacccaggctggagtgcagtggcgcaatctcggctcactgcaacctctgcctcccgggttcaagcgattctcctgcctccgcctcccgagtagctgggattacaggcttgcgccaccaccacgcccggctaatttttgtacttttactagagatggggtttcactaagttggccaggctggtctcgaactcctgacctcaggtgatctgcccgcctcggcctcccaaagtgctgggattataggcatgagccaccacacccggctgatgtagcgtgctgttttgtggctgcctcgagaaccaggctccccgcagcccttagggacactagtggggctggcaggtgtttccttctcagaggcctggcccagctgctcggcttcctcctttttgtatttttattttattttagagatggggtcttgctccatcacccaggctggagaggagtggcacgatcacagctcactgcagcctcaacctcctgggctcaagcaatcctcctacctcagcttcctgagtagctgggactacaggagcacgccaccatgtccagctaatttttaaacttgcttgtagagacgaagtcttgctatgtcgcccaggctggtctcaaactcctggactcaagtgatcctcccgcctcagcctcctgaagtgctgggattaccgcgagcagccacggctccctcctgaaggctccaggcctaagtgtcccgctcccttgttctgtggctcagcccctgggcaactcctgcttgccatggctgtggctggcacctccgtggccccactgcccggtcagtcttcgcaggcccagcccccagtagctgtgtggtttctgccttcctcctgcactctggtggtcacaggccctgctgcgtgggtacagggcaggtggccagggctgcagcataagctctgtgagtgcaggcggccctgggcactggagccttgttgcatggacgtgctccttgcacccttgttgatgaatgagcgaaggtgtgtgggagtgaatcccagagggtgcaggccacggcactgggggaggaccctcccggctgcctcccagtgggcttcaggggctcagatagaccctgccgagcacctctgtcctctgctcccggactggggctgcagagagctctcaaggggccttgggaggcacaagcaggccagggtcccagggaggggaggcaggaggcagcagggccggatggtgggctgcagaggtggaaggaacaggacagtctgttctgggggtgctggctgtgggggacagaggccaggccacaaagcagaatggtgggtgggccaggaggaggtgggagcctttttcaaaaggctttcagggactttttatatttaatgattgaaacaaaagatatccaaaaccgcagttcctgagaaccacttgttctcgccctggttcctctccttgggcttgaccttggcctcctgccgggcctggcagcggacagcagtctccctgcttcccaggctgggcgagggagagcgtgggtccccaggaacgggggaggtggtgcggctggctttaggatgcccattctggaaccttctggtggaagaaagcaggggatcagtatagtatggttgatccacacactccagaccctctcctggctgtgcagctggtctgatctgggctcagaggctgccactgctcagtgctcccctgggtaattttgcaggaggccaggagggttcctggcagttagtgccacccacacggagaaattcagagccatataaacgggtctccagggcctggagggactgcacatcctgggcctgcggcgcagtgtagacctgggaggatgggcggcctgctgctggctgcttttctggctttggtctcggtgcccagggcccaggccgtgtggttgggaagactggaccctgagcaggtacagtcctcctgggggtggggagagctggtcctcgggggccagcccctcctttaaggccacac

SEQ ID NO: 43202 - DNA, 2300 bp, Homo sapien
cctcatggccctcacctctttggacatgccctgggggagggcaatgcgggcccctgactgaccccagcactgctggggagactgaggcagggaggcaagtgtgagaaggccctggccgagggagcaggacgcaggggtgagagggcaggaggcaggggtgagaggccctggggaggggcagggggcaggggtgaggggccctgggaaggggcagggggcaggggtgaagggccctgggtgagggggcaggggacaggggtgaggggccctggggaggggcaggaggcagcagccactcttggcctgtgtgggggctgcacccacaggaagaatggagcatcctggcccagtccctatgggtctgcagtgctgtggggaactgggcaccctgtgaagacggcccggccactggggctgtgctgggcacacaggccccggtgccggggggggagctgggggagctgcaggaggccggggagttaggcccacttgggttttgcccctcaccactgatatgatcgtgggcacctggtttacacccctggaaatgggtcaccgttgtggccaggggactgccagccagcctgagcgctccacagcagacccacagacataggtagctacccagcgtactcctcatttcaaagatcaggaaactggcctggcgcggtggctcatgcctgtaatcccagcactttgggaggccgaggcgggtggatcacttgaggccaggagtttgagaccagcctggccaacatggcaaaaccccgtccctactaaaaatacaagacttaaccgggcgtggtggcgcacacctgtagtcccagctactcaggaggctgaggcaggagaatcgcttgaacccaggaggcagaggctgcagtgagctgagattgtgccactgcactccagcctgggcgatggagcaagactctgtctcaggaaaaaaaaaaaaagaaaaaaaaaatcaagaaaccgaggcacagaagggttgggtaacttatccaaggctgcacagccaggaagaggccaggcgggctgcaagcctgggtgatcaggctccagggccgggctccacactgcccccgggtggtgatgcctggtgcagcagaggccctccccactgtcactgtcactctggtcgctggcgctgtgcctccggcctccggagctctgactgcccactgcgtctggcacacatttcaaagggccaggcgtggggtggcacaggaaagtgctggaggctctggtccgttgcccatcagtgcccacagccctcgcagcgcaggccagaacgagcccaaaaaaacaagtgtcatgtggggtgggggtcaccgagccccaggtggtgtgggtggagctcctcttcctctcaggctccgagacggccccagcagcgtccaccgctgtccatatgccaggagggtggctgggcaggctgctgtctaggccaggctaacccctgcggtgggcgtgggtgtcaccagggccgatggcgcttgtgcagaaacccacgtctctgagctgccagcagccaagctgtcctgatgacattcccgggtgggcgcacaagcctgcactgtccgtatagaatcggcccaggctgtgcagcaggggaacccggagcccggaccccgccacggaggccaggctgccgtgcaccatcctgggtgtcctcgtggtgctccgggcgcaggtggcagcagccatggaggagctggaccggcagaaggtggcttctccttcttagttggtggggctcctcctacacccccaacccctcaggctcagggaaggaggcctctcccggtgtggggagctcgtggggacgctggtgcccggctagacacttcctgttagcggcattttcttctccgctgagtctgtgccggctgctgggccagaggcacattagcaggcccagagaaggtagatgccggagacgaagattctttcctcccgaaaatggtagggtttttaaaagtctcagcggaagtcccggctctgggcgggttgctgagggcaggaggcccatcctctggcgtggttggcaggctggcgagctgcgctacccgagccacctgttctctggcgtttctcactccgccgcgccctgcgggctttcttttccaggcctctgctcctgggtcctgcctccgaggtcaggcagggcctgtggttcctcccgacatgtcgcagaagccctagggactgttccgcagctctagatggcccagtggggaggggctgccctgtgggcattgctgtctgatggcctgaaggcaccgcttggagggaca

SEQ ID NO: 43203 - DNA, 2300 bp, Homo sapien
ctggagactcgccgtcctgcctggggacactggggctgttcagctttgcacaagtctgcaccaacgtctccctgcacacccccgctgggttgggaaacatggggggcaacaccaaatcgcccttgtccagaaggttctgtgggcagaacatgtagccccatcccgccatgatcttgaagaagcagctttcggggtagagtgccccgcctgggccaccacgcgtgaccgtggaggctgtgggttctgtggtggcttcatggacattccggggcttttcttgccatgcagcccccttcaccgaggaccaggcagaggccatggctcactgccactcagccagggactggggcatggcactgggtcctcccgcgccggggaaggtggggaagtgctggagccagggatggcctctggggcagcctctcgcctggggcagcagtggtagctggtgtgtgtttccaggtttgcaggagttttgggagcagaatgagctctccctggcctgtcagtggtggctttggaagagtgatgcccagcttgtggggagcaggaagggcgtttgtcgcgggagtgggtgatggagtaggcatgcgttttctacgcaggtggagccaaagcagcaggcgcctttgcccctggagtcaagacccacagccctcggggaccacctggagtctctccatcctccaccccccgcctgtgggatgccttgtgggacgtctctttctattcaataaacagatgctgcagcctcatggccctcacctctttggacatgccctgggggagggcaatgcgggcccctgactgaccccagcactgctggggagactgaggcagggaggcaagtgtgagaaggccctggccgagggagcaggacgcaggggtgagagggcaggaggcaggggtgagaggccctggggaggggcagggggcaggggtgaggggccctgggaaggggcagggggcaggggtgaagggccctgggtgagggggcaggggacaggggtgaggggccctggggaggggcaggaggcagcagccactcttggcctgtgtgggggctgcacccacaggaagaatggagcatcctggcccagtccctatgggtctgcagtgctgtggggaactgggcaccctgtgaagacggcccggccactggggctgtgctgggcacacaggccccggtgccggggggggagctgggggagctgcaggaggccggggagttaggcccacttgggttttgcccctcaccactgatatgatcgtgggcacctggtttacacccctggaaatgggtcaccgttgtggccaggggactgccagccagcctgagcgctccacagcagacccacagacataggtagctacccagcgtactcctcatttcaaagatcaggaaactggcctggcgcggtggctcatgcctgtaatcccagcactttgggaggccgaggcgggtggatcacttgaggccaggagtttgagaccagcctggccaacatggcaaaaccccgtccctactaaaaatacaagacttaaccgggcgtggtggcgcacacctgtagtcccagctactcaggaggctgaggcaggagaatcgcttgaacccaggaggcagaggctgcagtgagctgagattgtgccactgcactccagcctgggcgatggagcaagactctgtctcaggaaaaaaaaaaaaagaaaaaaaaaatcaagaaaccgaggcacagaagggttgggtaacttatccaaggctgcacagccaggaagaggccaggcgggctgcaagcctgggtgatcaggctccagggccgggctccacactgcccccgggtggtgatgcctggtgcagcagaggccctccccactgtcactgtcactctggtcgctggcgctgtgcctccggcctccggagctctgactgcccactgcgtctggcacacatttcaaagggccaggcgtggggtggcacaggaaagtgctggaggctctggtccgttgcccatcagtgcccacagccctcgcagcgcaggccagaacgagcccaaaaaaacaagtgtcatgtggggtgggggtcaccgagccccaggtggtgtgggtggagctcctcttcctctcaggctccgagacggccccagcagcgtccaccgctgtccatatgccaggagggtggctgggcaggctgctgtctaggccaggctaacccctgcggtgggcgtgggtgtcaccagggccgatggcgcttgtgcagaaacccacgtctctgagctgccagcagccaagctgtcctgatg

SEQ ID NO: 43204 - DNA, 2300 bp, Homo sapien
taaaccagacgccgggagaccgctgggtccctcgccggggctcaccgccaagaatctgggcacagccacacgtcacgtgtctgacgtgacagtcaccggcgtctggagggacactggcccttcctggcatggcgggaggaggtgggcggctctgaggcggggctgtttctcctgcgtttctgccgtgctgctgttgcgtttcctgcatctctgctcctctccatgagcttcgcctccactcccaggaccctctccctggagactcgccgtcctgcctggggacactggggctgttcagctttgcacaagtctgcaccaacgtctccctgcacacccccgctgggttgggaaacatggggggcaacaccaaatcgcccttgtccagaaggttctgtgggcagaacatgtagccccatcccgccatgatcttgaagaagcagctttcggggtagagtgccccgcctgggccaccacgcgtgaccgtggaggctgtgggttctgtggtggcttcatggacattccggggcttttcttgccatgcagcccccttcaccgaggaccaggcagaggccatggctcactgccactcagccagggactggggcatggcactgggtcctcccgcgccggggaaggtggggaagtgctggagccagggatggcctctggggcagcctctcgcctggggcagcagtggtagctggtgtgtgtttccaggtttgcaggagttttgggagcagaatgagctctccctggcctgtcagtggtggctttggaagagtgatgcccagcttgtggggagcaggaagggcgtttgtcgcgggagtgggtgatggagtaggcatgcgttttctacgcaggtggagccaaagcagcaggcgcctttgcccctggagtcaagacccacagccctcggggaccacctggagtctctccatcctccaccccccgcctgtgggatgccttgtgggacgtctctttctattcaataaacagatgctgcagcctcatggccctcacctctttggacatgccctgggggagggcaatgcgggcccctgactgaccccagcactgctggggagactgaggcagggaggcaagtgtgagaaggccctggccgagggagcaggacgcaggggtgagagggcaggaggcaggggtgagaggccctggggaggggcagggggcaggggtgaggggccctgggaaggggcagggggcaggggtgaagggccctgggtgagggggcaggggacaggggtgaggggccctggggaggggcaggaggcagcagccactcttggcctgtgtgggggctgcacccacaggaagaatggagcatcctggcccagtccctatgggtctgcagtgctgtggggaactgggcaccctgtgaagacggcccggccactggggctgtgctgggcacacaggccccggtgccggggggggagctgggggagctgcaggaggccggggagttaggcccacttgggttttgcccctcaccactgatatgatcgtgggcacctggtttacacccctggaaatgggtcaccgttgtggccaggggactgccagccagcctgagcgctccacagcagacccacagacataggtagctacccagcgtactcctcatttcaaagatcaggaaactggcctggcgcggtggctcatgcctgtaatcccagcactttgggaggccgaggcgggtggatcacttgaggccaggagtttgagaccagcctggccaacatggcaaaaccccgtccctactaaaaatacaagacttaaccgggcgtggtggcgcacacctgtagtcccagctactcaggaggctgaggcaggagaatcgcttgaacccaggaggcagaggctgcagtgagctgagattgtgccactgcactccagcctgggcgatggagcaagactctgtctcaggaaaaaaaaaaaaagaaaaaaaaaatcaagaaaccgaggcacagaagggttgggtaacttatccaaggctgcacagccaggaagaggccaggcgggctgcaagcctgggtgatcaggctccagggccgggctccacactgcccccgggtggtgatgcctggtgcagcagaggccctccccactgtcactgtcactctggtcgctggcgctgtgcctccggcctccggagctctgactgcccactgcgtctggcacacatttcaaagggccaggcgtggggtggcacaggaaagtgctggaggctctggtccgttgcccatcagtgcccacagccctcgcagcgcaggccagaa

SEQ ID NO: 43205 - DNA, 2300 bp, Homo sapien
aggagccctctggtggccctgtcagggcgtaacagaaggctcgcactcttgtcttctggtcacttctcactatgtccgctcagctcctatctctgtatggcctggtttttcctaggttataattgtagagcaaggattattataatattggaataaagagtaattgctacaagctaatgattaataatattcatatataatcatgtctatgatctagatctagtataactcttgttattttatatattttattaaactggaacagctcgtgccctcggtctcttgcttcggcatctgggtggcttgctgaccacagttttcctgctgtatctaactgctggcttaggtgaacctgtcaggggcgtggctgggaactggaacctcctgaagaccagtggaggccacaagcagaagccctcggctccttcccttccccgatgctgggggccaagggtctttctctgaccctgtccccctctcacgttaccagtggagggtgtccaggttcttggcattttgaacaaagaattggacaaaacacacaaacaaagcaaggaaagaatgaagcaacaaaagcagaaatttattgaaaatgaaagcactctttacagggtgggagcgggctgagcaagcagctcaagggccccggttacagaattttctagtgtttcaatatcctctagcggtttaccattggttacttggtgtatgccctatgtaaatgaagaggatgaagtcaaagtcattttctcggctgagcatactgtcacgcctgtaatcccagtactttgggaggctgaggtgggtgtatcacctgaggtcgggagttcaagaccagcctgatgaacatggagaaaccccgtctctactaaaaatacaaaattagctgggtgtggtggcgggtgcctgtaatcccagatagtcaggaggctgaggcaggaaaatcgcttaaacccgggaggcagaggctgcagagagccaaggagtgcaccactgcactccagcctgggcaacaagagcaaaactccatctcaaaaaacaaacaaacaaaacgaagtcatgtactcggtatgagccctacgtaaacggagaggatggagtgaaggtacaaagccattcacattcccgtcatcgttagtgtttccagttgatttggttctaggacgcccttgggctccctgcgtccaggccctcttctcctgcctcactctcactccagaggactggcagtgctggcctccctggcaggactcccgcccctgaccagaggggtctgggcgtgctccgaggccacctgctgctccttgcccagtgtccctgggtgctctgtggggacacagagaggtcacttgggaggttcctgcctctgccagactgcggcgccttcctggcgtcattgccccctgcacgcttatacaaccagtgataaggcggtatccaatgccgtaatcctccccagggccagcccagccctgtccggtcccgtccggtccctggcctgcttgctggaagcccagctgggggctgcatcgggggtggtgggggtctggagtgaggggtgcccaggcctctctcacagtgtgggggcacaagctctgccctggacactctgccagtgtgaccctaccccccatgttgggggtgagagaagggggctttctgggtggccagatcccaggagagggggcctagccagaccaaccccagcccagctctctgcagctgtaccccaaaggccctggcccagcccagccagacagagtgtggacagaggggcttgggtgcgagtccaggcaaggcaggacaagtctctgctgtggcttggcagtggccccgtgactggtgacatagtctggcaggcctaggggacaaatcctcagcccgggtgcatcaggccagagcctggctgtctggagccctccaggaaatgaccccctgggctgggggacatccgagtgattgtgccaaacaatggacaagggggccggagtctcagagccgaagtgccttccgcttccatctgctccgcccaggagcaggtgcacccaggtggtggcctgggctataaagctggccccctggggcttggggactcagcaccaggggctggagggcaggggaggggatgatgtcattcctgctcggcgcaatcctgaccctgctctgggcgcccacggctcaggctgaggttctgctgcagcctgacttcaatgctgaaaaggtaccaggggcctctgctgtcctgtggtgggtgggagctgggcccctgccagagacaacgtgataattgtgacaactgc

SEQ ID NO: 43206 - DNA, 2300 bp, Homo sapien
tgttcatggaaccactgcaagtgcgacacagcagctctggtgcccacaaagcttcctcgaggtcccttgcggtcaatcactgcccgcacctcagccctcagagccactgggaagccccctgccctgtgggctcacctgtcctagaacgtcgtataaaaggagtcgcagatcgcagccttttccacctggcttctgtccctctgcagggtgcacctgggattcagccaccttcgttccttttactgctgagtgtccatcacgtgctgctcatgcagaagtgctcaagttcgctgtaaacgtagttttcatttctcccgggtggagacctccataagtaggtaggttggtggaatgtttcactgcatgagagtctgccaggaagttttgcagtgtggtcccgtcttgttcttcccgcagagggtgatagctctgctgactcccagccctcacaggctctagggattgagcctgtttctgtggaacgccttccatggtctgcgaggtgcacagaggggtctcaaaaagcttccaggttgcatcttcccatggactgatgctgagcgtgttctcatctcccatccggatgttttctttggtggagtatcttttcagatctcttgcctttttatttttatttgtttatatatatattttgagacggaattttgctctttcacttaggttggagtgcaacggcgcgatcttggctcactgcaacctccccccacccacctcactttgggttcaagcgattctcctgcctcagcctcccgagtagctgggactacaggcgcccgccaccatgcccggctaatttttgtattttgagaagagatagggtttcaccatgttggccaggctggtctcgaactcctgacctcaggtgatccacccgcctcggcctcccaaaatgcgaggatcacaggcgtgagatgccacacctggcctctttttatttttaatggagtggcttgttttcttattactcagtcttgggagttcctcatggatgctggatttcagtctcgtctcaggtgtatgcgttttgtagatgttttctgtagggaccagccccacagggttggtgagtttctccctgtgtgctgagatgagagggcatagaaataaggacacaagaaaaagacataaaagaaaagacagctgggcctggggaccactaccaccaagacgtggagaccggtagtggccccgaatgtctggctgtgctgatatttattggatacaaagcaaaagggacagggtaaagagtgtgagtcatctccaatgataggtaaggtgacgtgagtcacgtgtccaccggatggggggcccttccctgtttggcagccaaggcggagagagagagagagagacagcttacatcattatttctgcatatcagagacttttagtactttcactaattgactactgctatctagaaggcagagccaggtgtacaggatggaacatgaaggcggactacgagcgtgaccactgaagcacagcatcacagggagacggttaggcctctggataactgcgggcaggtctgactgatgtcaggccctccacaggaggtggaggagtagagtcctctctaagctcccccggggaaagggagactccctttccctgtctgctaagtagcaggtgttttcccttgacactgacgctactgctagatcacggtccgcttggcaacaggtgtcttcccagacgctggcgtcaccactagaccaaggagccctctggtggccctgtcagggcgtaacagaaggctcgcactcttgtcttctggtcacttctcactatgtccgctcagctcctatctctgtatggcctggtttttcctaggttataattgtagagcaaggattattataatattggaataaagagtaattgctacaagctaatgattaataatattcatatataatcatgtctatgatctagatctagtataactcttgttattttatatattttattaaactggaacagctcgtgccctcggtctcttgcttcggcatctgggtggcttgctgaccacagttttcctgctgtatctaactgctggcttaggtgaacctgtcaggggcgtggctgggaactggaacctcctgaagaccagtggaggccacaagcagaagccctcggctccttcccttccccgatgctgggggccaagggtctttctctgaccctgtccccctctcacgttaccagtggagggtgtccaggttcttggcattttgaacaaagaattggacaaaacacacaaacaaagcaaggaa

SEQ ID NO: 43207 - DNA, 2300 bp, Homo sapien
aagacattccattcccagggacgagcaggagacagatgccttcctcttatctcaactgcaaagaggcctccctctttcactaatcctcctcagcacagaccctttatggttgtcagcctgggggacggtaaggcctttcccttcccacgaggccatatctcaggctgtctcagtggggggaaacctggacaatacgcaggctttcttgggcagaggtccctgcggctttccgcagtgcactgtgtccctggttaatggagaatggagaatggtgatgacttttaccaagcgtactgcctgcaaacacattgttaacaaggcacatcctgcacggccctaaatcccctaaaccttgagtcaatacagcacatgttcctgtgagcacagggttggggctaaggttacagattaacagcatttcaaagcagaataatttttcttagtacagatcaaaatggagtttcttatgtcttcctttttctacacagacacagtaacagtctgatctctcttttccccacaaatggcattaaattatttccatatattatagagtaggtccttccacattttgaagagtagcaaatctagcttttttgtacagacttataaattatctaaagacttcagccttttttttttttttgaaacagagtctcactctgtcgcccaggctggagtgcagtggcacgatcttggctccctgcaacctccacctcccaggttcaagtgattctcctgcctcagcctccccagtacctgggattataggcacctgccaccacgcccggctaatttttgtatttttagtagagacggggtttcaccatcttggccaggctagtatttaactcctgaccttgtgatccacctgcctcggcctcccaaggtgctgggattacaggcgtaagccaccgcacctggccaagatttcatctttttacctcatatttcttaggaatttaatggttatatgttgtcttttttcccatgccttttggctcaagcaacacgtatatcagtgttgactttttctttctttgatctagtttaaaaaaaaaaaccacataataattctttgaagaaaggaaggggttaatttttttccctagcactttcttgaagatcagggactttatcgatgaaaaagtagtaaatagttatttgtaacctgtgtgaagcagcagcctgacttgaagtcctccgttcttgctaatggttacaccagtgaatactagtggaattgtttgggctgattttagtttctcttaatcaaaattactagatgatagaattcaagaacttgtacatgttattacttggtgtatcgataattatttgaaagtaaagactctttgtcatgcaaaacaaaaggagtttgaggctcagctactaagctgctggttacagaaccactttgctaaacagtgattttatacatccccactccgtggtggcttatgagaaattcaatccctgattgtagtcctcaagcaaaataacactgacaatcatcaggcctctgcaagtgtgggaatgaggcccggccggggggaggagcgcacgctctcagccacgccccgcccggtgcccgccttcgccccgcccagtcgtcgccggaggtcacagggcccaagctcctagaggcgtggccaggccccaggccccacccctctcccctgcgctctagcaggctcgatccatgctccgcccccaatccaaggccctggcccctccgcctgcacccggcaggacccgcctcttagaacccgacacctccgcctgcgcaggcccgctccccggtcctgtctctcaggccccgcccccaggtcgcgtctccaaagtcccgtctctcaggccccgcccccagatcacgtctcccaggtcccgccccctccgcctgctgccgcgcggacccgccctcaggcgccgtctcctaggccccgccccctccgcctgttccagcgcgggccggtccctaggcctcgcccccagatccgggccctgcccctccgtccgtaactgcgcaggcctgtcctctgggccacacccccaggttcccgtcccgcccttccgcctgcgcctgcgcaggcccgctccccgagccctgccaaccatggtgaacttgggtctgtcccgggtggacgacgccgtggctgccaagcacccggtgagaaggccggtctgggacgcgggcctcaaaccccagaagctgacctgagcgaggcggggggccggggcgtgggggtgccctcgtcagggaagagtggcggaggctgggggcactctcttgctaaggg

SEQ ID NO: 43208 - DNA, 2300 bp, Homo sapien
cgagtagctgggattacaggtatgcgccaccatgcccagctaattctgtatttttagtagagacggggtttcactatgttggccaggctggtctcaaactcctgacctcatgtgatctgcccacctcggcctcccaaagtgctgggattataggcgtgagccgctgggcaccgcgccgggctgagctttatttttctttcatgtaaaagtccaagtgagtggtccagggttgacagggaatcggggaccaggctcctttcagtctgctccctgctgtaatggtctctgttcccaaatctgcctcatggccccaggcggctgcaccagcttcggccattgtgtctttatctcatttaagaggcaggagagagggcagcttgcctgccactgctgctctcactctgttggcctgaacgaagtcatcaggcacatccagtgccaggatgctcaggaaggcagagttgctctgggcagccatgcgcccactaaaattcaggtgttttatatctgaggaagaaggacagcaggtaggctctgcctcagctagattccaagcctggcccccaagaacgagggggaggtaagcagaccacacccttagcaggacatcccagcaccctgagggtgaggcctgggtgggagggagagaagggagaacctggagtttgcctggactggctttccaaaaacagtgaccagaaagggaagggatctatgtgacagcacatgggcaaaggccattgtcgggctggcttgggtccccccaaatttctgtcccccaggacctctgcatgtctctgtatttgaagacaggggctttccagaggtcattaaggtaaaatgaggtcattggggtgtcctcataagaagaggaaattaggacacagacacacagagggacggccacgtgaggacacagagaagacagcatctgcaagccaaggagaggggcctcaggagacaccagccctgctgacccgtgatctcagcccccagcctccaggctgctgttcacatcccccagtcggtggcgccttgtttttttgtttttttgttttttgtttttttgagatggagtcttactctgtcacgcaggctggagtgcagtgacgcgatctcagctcactgcaacctccacctcctggattcaagcaattctcctgcctcggcttcccaagtagctgggacaggcgcccaccaccacactgggctaatttttgtatttttagtagaaacggggtttcaccatgttgaccagactggtcttgaactcctgacctcaggtgacccacccacctcagcctcccaaagtgctgggattacaggcgtgagcctccacacctggccagtggcaccttgttatggccgcctgagcctactaaggcaaggctgggaaaaagtaccccatctcgtgtgtaccccatctcgtgcataccccacagagttccaggctgcctggtgctccaggtactcccctctaagggaagggtggagggggtgcagagatggagaacataccctttctggagtgacacatgaacccaagacccagtaattcccaaaggaaagtgggggtgaagcagggtgggctccagacagcacagagaggtcagggacagaagtcagaagagataaggtgggggtgtcccaagagccaggttacccagtgcatggagtttggacttggggctgggggtggggggtgcagagggaggtcccgtaaggcagtatcagaatagtatcagaatcgttttaggaggctcggcctgctgctttgtggaggatggcttggggcatgggaggggccagggagggaacccagtgcaggtgtgagctgccggtgctgcagacccatcacaaacctccccctcaaagaaagcacatccgcccggcagagctcctaagcctcgagcagctgccaggagactcatttcaattaggacacatgtctggaggccaccccaaggtggctgggggcagagtgaggcaggaggccctgcaattccagggttgcccaggcactgagaatcctggctctcatcataatgggctgaggttctggggacaatctgagtggcggctctgagcaagctgagcccagggaggctttgaggtacacagggtcccttggggggcctgagagcagccatgaggaggcacagtgagacagatgtggaagagcagacccaggagctgaagaccatcactcagctccagggtgagcctgcaccgccgtgaccagtctccctttcccgtctgggggtttctgggtgcacaactttttgtggggaaaagagaga

SEQ ID NO: 43209 - DNA, 2300 bp, Homo sapien
caagatagtaaaaataatgatcagtaaatactgagggaactcagagaccagggctggtgcaggtcctcgcatgctgagtgtgccagtcccctgggcccactgttctttctctatactttgtgtcttttttttttttttttatgagatggagtcttgctctgttgcccagacggcagtgcagtggcgcgatctcggctcactgcaagctccacctcctgggttcacgtcattctcctgcctcagcctcccaagtagctgggactacaggcacccaccaccatgcccggctaattttttgtatttttagtagagatgcggtttcaccgtgttagccaggatggtctcgatcacctgacctcgtgatctgcccgcatcagcctcccaaagtgctgggattacaggcgtgagccaccatgcccagcctctgtgtcttatttcttttctcagtcttcatcccacctgacgagaaatacccgcaggtgtggaggggcaggcccccttcacttttaggggatgtttgtttggagacagagtctcgctctgtcacgcaggctcgagtgcagtggcatgatctcggctcactgcaacctccacctcccgggttcgagcgattctcctggctcagcctcttgattagttgggacatcaggtgtacgccaccacactcagctaattttcgtatttgtatttttatttatttatttattttgagacgcagtctcgctctgtcacccaggctggagtgcaatggtgcaatctcagcacactgcaacctccacctcccgggttcaagtgattctcctgcctcagcctcccgagtagctgggattacaggtgcccaccaccacgcccagctaatttttgtatttttagtagagacggggtttacccatcttggccaggctggtctcaaactcctgacctcaggtgatccatccgcctcggcctcccaaagtgctgggattacaggcatgagccaccggcgcctagcttatttatttttttgagacagagtctcattctgtcgtccaggtggagtgcagtggtgcaatctcagctcactgcaacctccacctcctgggttcaaacaattctgcctcagcctcctgagtagctgggactacaggcacacaccaccacacccagctagttttgtatttttagtagagatggggtttcaccatgttggccaggctggtctcgaactcctgaccacaggtgatccgcccacttcggcctcccaaagtgctgggattacaggtgtgagccaccgctcctggcctaggacttttagttttaatacagggacaatccaggacatggaggggaaaacagacccccctactgcccactccctgacagagctgggagaagggatcaaagggacctgcatggagggactaaatcagagagaggggcttcaaggagacgtgagcataagagcaacacgggccccaaagccagaatggacaggaaaacacccacctgcttccatgggcagcaaatctggacgggaccacaggaccctgccatccctctcctttgcctcaccctccccacctgtccacctccccgcacctgtccactgagagcccttcagacagctgctgctgggcagtggagcggtgtcccccaggacagggcgggaggagggatcttggccatggagggggcatccccctggaccctggggcctggggcctccctgatgcaagcctcccccaggggattccaggccaggcccttggcccaatcctagccactgtgtcccctccacctgcccacagagcagtgtcgggcactccagatccaaggggtgaaagagaatatggaccagaacaaggccacgctggccctcctgcgcagcaacatccgccgcggggcccaggactgggctttggccaagaaggtacacaaacgccgcccctcccctctgcctggcgagcagggcaggagctgagtacacacacactcggagggcgggcacctcctctccacccccaccccaatctttctggatccagggggcatgtgaggaggggctctgctaggacctgtgccctgggctccagtcaccccagcatccggtgggcaggtttcccaccacccaacccgagggcttggcatctgtgagcccacatcctgcagcaggggccccctctggctctccggccagctaggggacacccaggccctcctctgcatacccccctaccacgtcgcctccgaacttggatggccaggatggggtcccgcggctctctgctcctcgtggaagcagggatctcgctactgggcta

SEQ ID NO: 43210 - DNA, 2300 bp, Homo sapien
ctggtctcaaactcctgacctcaggtgatccatccgcctcggcctcccaaagtgctgggattacaggcatgagccaccggcgcctagcttatttatttttttgagacagagtctcattctgtcgtccaggtggagtgcagtggtgcaatctcagctcactgcaacctccacctcctgggttcaaacaattctgcctcagcctcctgagtagctgggactacaggcacacaccaccacacccagctagttttgtatttttagtagagatggggtttcaccatgttggccaggctggtctcgaactcctgaccacaggtgatccgcccacttcggcctcccaaagtgctgggattacaggtgtgagccaccgctcctggcctaggacttttagttttaatacagggacaatccaggacatggaggggaaaacagacccccctactgcccactccctgacagagctgggagaagggatcaaagggacctgcatggagggactaaatcagagagaggggcttcaaggagacgtgagcataagagcaacacgggccccaaagccagaatggacaggaaaacacccacctgcttccatgggcagcaaatctggacgggaccacaggaccctgccatccctctcctttgcctcaccctccccacctgtccacctccccgcacctgtccactgagagcccttcagacagctgctgctgggcagtggagcggtgtcccccaggacagggcgggaggagggatcttggccatggagggggcatccccctggaccctggggcctggggcctccctgatgcaagcctcccccaggggattccaggccaggcccttggcccaatcctagccactgtgtcccctccacctgcccacagagcagtgtcgggcactccagatccaaggggtgaaagagaatatggaccagaacaaggccacgctggccctcctgcgcagcaacatccgccgcggggcccaggactgggctttggccaagaaggtacacaaacgccgcccctcccctctgcctggcgagcagggcaggagctgagtacacacacactcggagggcgggcacctcctctccacccccaccccaatctttctggatccagggggcatgtgaggaggggctctgctaggacctgtgccctgggctccagtcaccccagcatccggtgggcaggtttcccaccacccaacccgagggcttggcatctgtgagcccacatcctgcagcaggggccccctctggctctccggccagctaggggacacccaggccctcctctgcatacccccctaccacgtcgcctccgaacttggatggccaggatggggtcccgcggctctctgctcctcgtggaagcagggatctcgctactgggctagcgtgggatacaagaggccctggggagaatgcctggaggagccagcggctgcgggtgcgcaaagggcccgctctagctcagccgccgccgctccgcagtatgaccagtggaccatctccaaggcctgcgggaaaaacttgcctttgcgactggcgcactgccgcagcaccatggaggtaaccaggcaggaggggcctcgagacccaaccctccccacccctgccagcacccccccactagatgttgcggagccgacgagggacggagcaggtgcccagccccaggttccctgtggggttgccacgagcctccacccgcccgcctgctggcgggctccatggcggccccctacgcaaccacgagtgggcggtgcccttcccgacccaggtggtgcgggagaagctgcgcaagtacgtcttcgaccgcgtgaacatgcacaacctactgatccacctggtgcggcggcgcgggcagaagctggagagcatgcagctggagctggacagcctgcggagccagcccgacgccagcaaggaggagctgcggctgctgcaggtggagaggcggggctgggagggcggggcggagtccactggggcaagactcacgggaggggcggggccaccggggggcgggacttgcgggtcccctggggagggctcacgggaggggcggggctaagagagcacgaccctctccggagaaaacccagccccgacaccctccgggcggccggtccccacgccctctcactgcgccctcggtccgccccagatcatccgccagctggagaacaacatcgagaagacaatgatcaagatcatcaccagccagaacatccacctgctgtatttggacctgctggattatctgaagacagtgagcccagcggcccgggaaggg

SEQ ID NO: 43211 - DNA, 2300 bp, Homo sapien
ccgggacaggcagaccctgtcctcctgaagtgggtggcactcatccagtagtccatgaagaaatgccacacagcccctgagccagctcagcagagacaggtggggtggcagatggctttccaggaagacagtgcttgagctgggctgagggattgaacccgcaaaggtcaggtgtggccagggctagggaggaggaggtacaacttgggaaaaggccctgggctgggaggggtgtgatacatggagcagcgtgtggccagggcagtggaggctgcagaggcacaggccccaggagtccacggaggcggctgggctgggggcccaaggactgacctggagccctgggaggaggtggaggaaagatgtgaccaggtctgtgcttcagaaagggtgtactcaggctgcagggactggaaggtgccagggcagaagcgctgatcacctgggtatacccggggtggagaaggggtggccaggagcaacggagctgagaactcctcaagaggcaaccccactaagcgctggcaacgagagtggcgagggtgagagcagtgtctggggtgcgtgagcaggggttagcagatgacggttttagctgcccaagggcacgctggaagaggccaggttttggggaagaggatgaatctgtcttcaggcaggctgaatgcacttccgtgagttctaggtggacctggccaggaggcagctgggggccagcggctggagggcagcagagcgtctgggctggcacatgctctgaggcatgggcaaggagggccgtgagctgaggggccacgggcacaagtggtttaggaaaagggtgtggccattggccggggatgcagttccaaagtctagtaaggtgagcatggccaaccgcccgctggctttactgccattaggggccttgttgagacagctccccaaccctgtgcccacccgcatgtccccagaggaacatgaggcaaagggaggcgtccttcatcgaggagcgccgggcaagggagaaccggctcaaccagcagaagaagctgatcgacaagatccacacgaaggagaccagcgagaagtaccgccgggtaagccccaggccagggcctggctggctgcccatccccatgacagctgggtggacacaggctcagggccaccactcagggcccactccctgccaaggatgtctcatcccttccccgcccccacctcccatcagggccagatggacttggacttcccctcgaacctgatgagcacggagaccctgaaatgtaagcgctcagctccccacctgcccccagccagggtcccaaggagaggctggcactgattcaggccaacggatcaagtcaccctgaggccaggtgtgacatgtggtcgccagggtgaagggaaggacaggtccctgcctctccctccagaggctgagagcctgtagccaaatgtggcctcagagatgctggccccagcacccaagggccctgcaccaagggcccagtccccagtgactctgcagaggatgagcatcctgacccctaagctgcctctgagaagcaccaccgggcccacagtgctcacagtgctgcgccactcactccgggtccacctctgctctggggctgcctggggcgtccctgcagggctgggctgaggagggagcaggttggggcgggggcaggcatctctgaaggatgcctgtgtcttgggtggccgccccagcagctgggcaggtacagaggtgtctgacagccttacacagagcccctgagccatccctgcatgctgactgcccctcccctctgctctgccagtgaggagaaaagagacctccacagcagaaatggaataccagtcgggcgtgactgctgtggtggagaaggtcaagagtgctgtacggtgctctcacgtctgggtaatgcccctggcgctcccagagaatggcaggagggtggctgagcctctcacgtctgggtaatgctccctggcactcccggagcatggcaggagggtggctgagctgggctggggtctgaggcactctgaaatggacacacaaagtggcaactccctcggccgccccaaatccttttatcttaatcccatctgtgtatctgcgtttattattattaggccttgagctcctaaccactgccctgacacaagcttgtccactgtcagacaagtgactcaagtgacacaacgtccttcagtgatgatctccttatctctacatggggttatctaccctctctgcctgccattagggtcgtgtgcaatgacatccacaaagcgcttcacccctg

SEQ ID NO: 43212 - DNA, 2300 bp, Homo sapien
gtggcgagggtgagagcagtgtctggggtgcgtgagcaggggttagcagatgacggttttagctgcccaagggcacgctggaagaggccaggttttggggaagaggatgaatctgtcttcaggcaggctgaatgcacttccgtgagttctaggtggacctggccaggaggcagctgggggccagcggctggagggcagcagagcgtctgggctggcacatgctctgaggcatgggcaaggagggccgtgagctgaggggccacgggcacaagtggtttaggaaaagggtgtggccattggccggggatgcagttccaaagtctagtaaggtgagcatggccaaccgcccgctggctttactgccattaggggccttgttgagacagctccccaaccctgtgcccacccgcatgtccccagaggaacatgaggcaaagggaggcgtccttcatcgaggagcgccgggcaagggagaaccggctcaaccagcagaagaagctgatcgacaagatccacacgaaggagaccagcgagaagtaccgccgggtaagccccaggccagggcctggctggctgcccatccccatgacagctgggtggacacaggctcagggccaccactcagggcccactccctgccaaggatgtctcatcccttccccgcccccacctcccatcagggccagatggacttggacttcccctcgaacctgatgagcacggagaccctgaaatgtaagcgctcagctccccacctgcccccagccagggtcccaaggagaggctggcactgattcaggccaacggatcaagtcaccctgaggccaggtgtgacatgtggtcgccagggtgaagggaaggacaggtccctgcctctccctccagaggctgagagcctgtagccaaatgtggcctcagagatgctggccccagcacccaagggccctgcaccaagggcccagtccccagtgactctgcagaggatgagcatcctgacccctaagctgcctctgagaagcaccaccgggcccacagtgctcacagtgctgcgccactcactccgggtccacctctgctctggggctgcctggggcgtccctgcagggctgggctgaggagggagcaggttggggcgggggcaggcatctctgaaggatgcctgtgtcttgggtggccgccccagcagctgggcaggtacagaggtgtctgacagccttacacagagcccctgagccatccctgcatgctgactgcccctcccctctgctctgccagtgaggagaaaagagacctccacagcagaaatggaataccagtcgggcgtgactgctgtggtggagaaggtcaagagtgctgtacggtgctctcacgtctgggtaatgcccctggcgctcccagagaatggcaggagggtggctgagcctctcacgtctgggtaatgctccctggcactcccggagcatggcaggagggtggctgagctgggctggggtctgaggcactctgaaatggacacacaaagtggcaactccctcggccgccccaaatccttttatcttaatcccatctgtgtatctgcgtttattattattaggccttgagctcctaaccactgccctgacacaagcttgtccactgtcagacaagtgactcaagtgacacaacgtccttcagtgatgatctccttatctctacatggggttatctaccctctctgcctgccattagggtcgtgtgcaatgacatccacaaagcgcttcacccctgctaagtgtggtggtgcacacctgtggtcccagctactcaggaagctgaggtgggaggatcgcttgagtctgggaggttgaggctgcagtgagctgtgatcacacttgtgaatgagcacagagaaagtgcactagcgtctaggaggggcccagaagaaaccagttctgtgaagccccctctgcccaccatcctggcccacacctgcttctctctcccccggactggccaggacatcactagccgcttcctggcccagaggaacacggaggagaacctggagctgcagatggaggactgtgaggagtggcgggtgcagctgaaggccctggtgaagcagctggagctggaggaggccgtgctcaagttccgccagaagcctagctccatcaggtgccccgggcttccggggctgcgggccacccaccccagtctcacaaaggccccgggctgcagccaggctgggagctgggagtatacccactgccaacaagcctgtgtgtcccacagaggggccaggggactccacttgcaca

SEQ ID NO: 43213 - DNA, 2300 bp, Homo sapien
tgacatccacaaagcgcttcacccctgctaagtgtggtggtgcacacctgtggtcccagctactcaggaagctgaggtgggaggatcgcttgagtctgggaggttgaggctgcagtgagctgtgatcacacttgtgaatgagcacagagaaagtgcactagcgtctaggaggggcccagaagaaaccagttctgtgaagccccctctgcccaccatcctggcccacacctgcttctctctcccccggactggccaggacatcactagccgcttcctggcccagaggaacacggaggagaacctggagctgcagatggaggactgtgaggagtggcgggtgcagctgaaggccctggtgaagcagctggagctggaggaggccgtgctcaagttccgccagaagcctagctccatcaggtgccccgggcttccggggctgcgggccacccaccccagtctcacaaaggccccgggctgcagccaggctgggagctgggagtatacccactgccaacaagcctgtgtgtcccacagaggggccaggggactccacttgcacacacctgagcttctgagtccctgattctggcacagcacccaactcaggactgggctcctgggtggcccaccatggctctcgggcctgtgcccctcactgctgtgtccctattgccttctgcagcttcaagtccgttgagaagaaaatgacagacatgctaaaagaggaagaagagaggctccagctggcgcacagcaacatgaccaagggccaggagctgctgctgaccatccagatgggcatcgacaacctctatgtccggctgatgggcattaacttgcctgcgacccaggtaccgggagtgaggctgagctgccacacaccaggtccctgggcagggccagaggggagatgagaccctcctcccggcctacagagagaagtggtgctctccaacaccctcgatttgaacagcaagctggcgtactgcgaggggaagctcacgtacctggctgacagagtgcagatggtgtccaggaccgaggaggtagccccgggctgggaggaacctgcacagcccacgtcccctcaaagctgacaggctcccgttcagagtgtctgcacggctgaagggggctttgccctgcagggcgacacaaaggtgagggacaccctggagtcctcgactctgatggagaagtacaacaccaggatcagctttgagaaccgggaggaggatatgatcggtacaggccccggaactggggcccgggctgcaggcgggtggctggaacacaggtcggggtggcgccggctcccatcccaccgggacatcctggagggacagcggggctacagggtgcatcagttgtacctgcaggactttaattgatggaggtgacttagtgatgccatggggaggctaaagccactgaaataccttgttaatttctccgaaaggaggaggcatgccatgccagacgggcccggaggagaggcaccagggctggagcagggaggagcgcggtgaaggcctgggccggagcttccactgggggttctgcgggaaaggctaggcagggcagcgtgagccgctgcgaatgggctgggctgagtcctcccggcacgctggggctgtccctggggcaaggcacctggcccgggtcggtggagggcgggggcgagaggcgggtcgggcggctgcgcctagctgggctagccccgtgtgcgagccgccgcctccgcccgcagacaccttccagttccccgacatggaccacagctacgtcccttcgcgcgccgagatcaagaggcaggcgcagcggctaatcgaggggaagctcaaggcggccaagaaaaagaagaagtagccccgccgccccgctccctgctttgctacacaaataaacatttttccaggactgctgcggacgctggggcgaccggggtctcggagaggagcacgggacacgcaggatcgggggaggttctgcgtaaggaggcagcccgggcccggaactgcgcgccagaaccgcgtgcgcatgcgccgaccgcgcgcgccgcgcccccgcggccctcgcggcgccccgtagccgcgcacccctcccgtcccgccgagccggcgccaagatggcggcgctgactcctggagagcggtcgcgccggaggccgcgggggccggagcggagcagccgcggctgaggttcccgagtcgccgctcggggctgcgctccgccgccgggaccccggcctctggccgcgccggctccggcctccgggggggccggggccgccgggacat

SEQ ID NO: 43214 - DNA, 2300 bp, Homo sapien
cccgcagcagttcccagaaactctcacccccaaaaccctcgactctgtcttgatcacattgctggtctgttacgctctgtaaaatatttgagaaaataaataccagaaagccgggcatggtggcttacgcctgtaatcccagcactttgagaggctgaggcgggcagatcacgaggtcaggagattgagaccatcctggctaacacggtgaaatcctgcctctactaaaaatacaaaaaattagccgggcgtggtggccggtgcctatagtcccagctactcgggaggctgaagcaggagaatggtgtgaacccgggaggaggagcttgcagtgagctgagatcacgccactgcactccagcctgggagacacagcaaaacgcaaaactctgtctcaaaaaagaaaagaaaagaaaagaaatactagaaactttctattctaacacagaaactcaaaagttttaaaattgcatgttattcagctataaagataacatctttctaaaatgtaatttaggtacaaattcaaatttctctctgtctcaccacctttcattcagttctaggagatcataacctgttctccaagtactggagactggcttttctcctctggaaggaccccattgccctttttagtcacactcgcccaggaccacacaggggtggtcctggtgcatgaggtggaccttgcccaggaccctcggggagccttttcagaaggtgaacagtttccaggtccaggcctgatttcccagggactaatactgagcttagccaatactgtaagcaataaaattaaataaaggatccaaacgcagagtctaaaaactggcgtaaactcagttattttgactcaatattctcttctccgaatgccagctatgtataaagtttcaattataacacatttaaaatcagcttttatttttattcaaaatgcaccactttattttccttaccagacagccaagcattaagcacgttccagtcacgtgacttcttcagcgagcccccaggcttccactccacgggagtctgggagctcctggacagaggagtcctgagatttcaaatagtcaagccttctccccagccacaagttcctttgatgcttgggttactgaacacaaacgcaatggattgtttgtcttcaacataatccgtttctgttcctaaacgtgttggctgcgctttctttctgatgagcacgctgactctaatttgaacttcatcaaaatcttctttgtcgtcgtatgttctagagtataagaaaagccaatacggcccttggttcggacatcaactttcttttaaatttttttttcgtatttttagtagagacggtgtttcactatgttggccaggctggtctcgaattcctgacctcgtgatctgcccgccttggcctcccaaagtgctgggattacaggcatgagccaccgtgcccggcccggacaccaactttcatacctagatgctcagacttatctttaagaagttgttttatcttgcttactgctaaaggtgtctgggtgagggtggcccgagtggtctgcagcttcctcttgctcacaggccgggggactaaggaaggcgacatcttcactgtcctcctggactagctccagccccaggaactacggcctctctccgtgcacacggcacgcgaattcatgaacttgcttttaaacctgcacaagagtctttctgatcattagttcttaaaattctacattaccatggaaatatcacggaggctctaaggctccccttaaagtgaccaaaaaactggataggcgtagcgtcctaaaacctcatagaaacatacggaaatggctaagagggaagcaatgtcaaaacagggaaccacataaaagctttcaaaaactactgggaaagagcccgcaagatggaaaaactcataagaggtcgaggacaatttacacaatttataacaaaggaatggagcgtcccaggcactcaggagtccgtaaatgactcctccttcctacgagaaatgggatgtctcctacagtcgcaagtcagcccgtgccttctggagcttttctagatacgtctcttacaaacgcttcttttaaaaaaaaaggcgagaatgtgtggcgtagctaatattctgtcttcaaactcagtaggaagtcaacaaagaaaaatcccgctgaaagcgccaaggccggctgggttccccgcacctcctgcaggtgagtggtgcccggggctgggcaccgtggagcgtcgggggcgcggcgccccgggccggcgggccctgcttggcatta

SEQ ID NO: 43215 - DNA, 2300 bp, Homo sapien
ggagaatggcgtgaacccgggaggcggagcttgcagtgagccgagatggtgccactgcactccagcctgggcagcagaacgagactccgtctcaagaaaaaaaaaaaaaaaaaaagaaaaccaccttgtccagctttaatcaaaggcatagaaggctgggggaggggcaagggaaccagagctgtaactaaaaatcataaaataacatggcagcagcagttgtcagtaaacagaactcaccagctcgaaagaatgtgagattcgaggaatttttttttctttaatttggctatgtggtgtataagagacacatccaaaacataatggtgtcgaaaggttgaaagttaggagttggaaacaagacactaggtaaacattaaccataagaaagctgctctagctatagtcctagtgctacagcgacagtgatgccatatgcagaatatacttcaaaatgaaagagagcgggtagaaatgtgaagggttaccgcaggctcagagaaagtctctggacctgaaggctcaaggaacattgattaaagtggaccatcctcactggtgccgtggcttatacctgtaatcccagcactttgggaggccaaggcaggaggattgcttgagcccaggaggtcgagaccagcttgggcaaaaagcaagaccctgtctctaagaaaaaaatagtaaaaaaactaggcatggggtggtggctcacatctgtaatcctagcactttaggaggccaagatgggcggattgcctgagctcaggagtttgagaccagcccgggcaaaatggtgaacccctgtctctactaaaatacagaaaattaggcatggcggcttgcgcctgtagtcccagctacttgggaggctgagatgggagaatcactggaatccagtaggtggaggttgcagttagctgagatcacaccactgcactccagcctgtgcggcagagtgagactccatcttccaaaaaaaaaaaaaaaaaaaaaaaattagctggcagatgtctgtagtctgagctacttgggaggctaaggtgggaggatcacttgagcccaggagattgaggctgcagtgagctaggatggtgccactgtgctggctctagcctgggtgacagtgagaccctgtttgtaaaaataattttgttgttttttttgagacggttctgttctgttgcccaggctggagtgcagtggtgtgatcttggctcactgcaacctccacctcctggggttaagcaattctcctgcctcagcctcctgagtagctgggattacaggtgtccaccaccacacccggctaattttgtatttttagtagatacggggtttctccatgttgtccaggctggtctcgaactcctgagctcaggtgatccgcccgcctcggcctcccaaagtgctgggattagaggcgtgagccaccgtgcccggccaataataatttttaaaaagcaaaaataaaatcaaaggaaggtttagaaaataaagggaaaatctcacagcaaaatgacagctggtaaatgatatgaaaaaaataaacagaggctgagtgtgggtgttgcagtatccgaataatatatattacgaaaagagaaaaatatcaatggaaattcaaggaaaagtgcggccaagacgtccttcagtagatgaatggatcaactccgtgcatccagatggtggaacattatttagtcctgaaaagatgttctcaagccgtggagaggcctgcatgagccttaagtgcgtatcgctgagtgagagaaattattctgtgtgaccccaactctccgacgttctgcagaagccaaactggccagatgcctggaatgagctccccgcgttcatgagggctggtttccggcagtggcattgggaggctttgttaacattggttcttgtgcttgtctgccttgtttaagttccttacaaagagcatgtgccatttttacaaaatgaaggaagtgggttctgtcccgtagggttgaggagccgagatgcggggaccaagggacgtcagcgcgttggttctggccgcgggaaaacgggcggtcgctgtgaccgtctctgcgctctccgcgttgctaacgccccactcccgggaaagacccggagacgggaccaccgcatgtggaaaccaccgggaagcacagcgcgtgggccgcctgagcggtgccggggcggggaggcagggccgccgctcaggccgtggacctcggggccgcgggacggacgtggatggcgccgccgttctctcgcgggcccagcgaggctatgcgtgcgcggcccgggca

SEQ ID NO: 43216 - DNA, 2300 bp, Homo sapien
gggccgccgctcaggccgtggacctcggggccgcgggacggacgtggatggcgccgccgttctctcgcgggcccagcgaggctatgcgtgcgcggcccgggcagtctctgcgagcccgggctgctgctcatctgggggggacggcggccgcccgactgagcccagagctgtgggccgcgcccgggttcctgcctcgggccggaggagggagggcgccgcggcccgtctcgggcctcccgccgcgctggggcctggctccctcctggctgcgctgagcgcctgcggctccgcttggggctgctgtgctctccacaggccgggccgccgggctggagggcgctgcaggcggcctctgttctccaagttctccgcgggagagggaggggaacgagggcccagccttccgcggggtgggctcggccgggagaagcgcggagcctcctggctgcccccagccggtgcggccgccaccgtggccgtgagggcgcctgggtcccctctggaggttttgccgcagcgctggccggcgccgagatatgaccagaggcgttgaaagttggcgcgttgaggtacctaggatgggcgaggaaatgaacaagcttcaggggagaagaaatgactgtgggaacaggtgccttgaggtagagggaggggactgggccaggagagaggagccgggtggggcacagggacagcccagggtccctcagagcttcgaggccgggcgccctctgcgttgggagcttggggtccccctgacagaaaacctggggggggcgttgcgggagtgagaggaggctgcagacctgacacagatgggggagcgggcgggaggcccgagacctggggaagtgggaggagcctgcagacctgctccttggttgcctctgctccccaccaacccggctcccttccctggcttccctggctctcccctcctggaaacgtggaggacggccagggcttctctctcccccgtgcctgtggtgggttcaccaaggcctgtgtgagaagctctcggggtctgcccaggtccgagggcagctgtctcagtgctggctgctgcgtccgcacagcttctcggtcattctcgatcctgttcttccagcacctccgcaggctgggtgttcttagtccagtcgggtgccaggtccatccccatctccacccgttctgagccacctcccgcctttgctaagtccgtgctcccctcccagctgccctccctcccccatcacattttcaaaacaagctgggcagtggcctctccaacccagccccggagcaagcaggcccaggcccggggctacccggcacacacgcgttgtgcgtgagctgggatgcaggccccgcgttctgcagaattgtgcactgaagacgccagggctcgcagtggctcacgtctgtaatcccagcactttgggaggccaaggcgggcggatcacgaggtcaggagatcgagaccaccctggctaacacggtgaaaccccgtctctactaaaaatacaaaaaattagctggacatggtggcgggcgcctgtagtcccagctactcgggaggctgagacaggagaatggcgtgaacccgggaggtggagcttgcagtgagccgagatagcaccactgcagtacggcctgggcaaaaaagcgagactccgtctcaaaaaaaaaaaaaaaaagactccagggctgcagaaaacctggttaggagcaatccgcagaagcctggggtgctgtggagagctcctcaggtggtgggccctgaccctgagggtcaccaggggtcccaggggtgggctctagggcagaaccacgtcctccaagtagaaagcctgacctggctccaagtagaaagctgccccctgggcccggttcgccgttgatgctctgtgtgctgccaggtgtcctcctgatgggagaggttgccatggtacccacccatcgtcttcctcccctgcctgccggtcacctggtctgattctagcaagaaagatgaaacaggtggcagcagaaccggctctccttgtagttgctcttaaagctgcagcttgggttcggttcgtttaatttgccttttctttttctcttcccgtccccagtgaagatagtgatccggggagacaggaacacgggcaagacagcgctgtggcaccgcctgcagggccggccgttcgtggaggagtacatccccacacaggagatccaggtcaccagcatccactggagctacaagagtaagtgtggtgggtgccccagtgggttcgggctccaggcttctcctccctcagccctggttcctg

SEQ ID NO: 43217 - DNA, 2300 bp, Homo sapien
gttcttagtccagtcgggtgccaggtccatccccatctccacccgttctgagccacctcccgcctttgctaagtccgtgctcccctcccagctgccctccctcccccatcacattttcaaaacaagctgggcagtggcctctccaacccagccccggagcaagcaggcccaggcccggggctacccggcacacacgcgttgtgcgtgagctgggatgcaggccccgcgttctgcagaattgtgcactgaagacgccagggctcgcagtggctcacgtctgtaatcccagcactttgggaggccaaggcgggcggatcacgaggtcaggagatcgagaccaccctggctaacacggtgaaaccccgtctctactaaaaatacaaaaaattagctggacatggtggcgggcgcctgtagtcccagctactcgggaggctgagacaggagaatggcgtgaacccgggaggtggagcttgcagtgagccgagatagcaccactgcagtacggcctgggcaaaaaagcgagactccgtctcaaaaaaaaaaaaaaaaagactccagggctgcagaaaacctggttaggagcaatccgcagaagcctggggtgctgtggagagctcctcaggtggtgggccctgaccctgagggtcaccaggggtcccaggggtgggctctagggcagaaccacgtcctccaagtagaaagcctgacctggctccaagtagaaagctgccccctgggcccggttcgccgttgatgctctgtgtgctgccaggtgtcctcctgatgggagaggttgccatggtacccacccatcgtcttcctcccctgcctgccggtcacctggtctgattctagcaagaaagatgaaacaggtggcagcagaaccggctctccttgtagttgctcttaaagctgcagcttgggttcggttcgtttaatttgccttttctttttctcttcccgtccccagtgaagatagtgatccggggagacaggaacacgggcaagacagcgctgtggcaccgcctgcagggccggccgttcgtggaggagtacatccccacacaggagatccaggtcaccagcatccactggagctacaagagtaagtgtggtgggtgccccagtgggttcgggctccaggcttctcctccctcagccctggttcctgggagatgcattccccagagggggtctccccgaagagttcttgtctgtgagggaccctgctgacgtgggggccctggcgtgaactctggggctcttttggggtggatcaccctgctgcctgagtgagcttcatgaagccccactgacctgggaggctcagcttggggcagcgttggccgcaggtgagtgggcacgcgggcgcctcgggggctgaaaagaggtacattccgaggagcattcccttgcctgcaccctcttggtgcacatggtattttttcttgggccccagcccgacatcttctccaccaccagaaacagtaataagacctttgtttgagccttgcccttgtggaaagttcgtgtcactaaaaggttcagtgaggtgggcttgatggtgggatagacccctcccccaggtctcaattgggtgtgggtgggctgggcctgggtagatgcgggaaggtgggggaggtgacagctgtggcgaggctcctgctgtgggaggcagagcagctgccctgtgtgttcagaatcgtgacagcaaaaagccttggggctggtttttttgtttgtttgttcgtttgttttttggtttggttgggttttttttttttttttttttttttgagacagagtctcactgtcgcccagactggaatgcagtggtgagatctcggctcactggaacctccgcctcccgggttcaagcaattctctgcctcagcctcctgagtagctgggattacaggcgcccgccaccacacccagctaattatttgtatttttagtagagacggggtttcaccatcttggccaggctggccttgaactcctgaccacgtgattcacccacgttgggctcccaaagtgctgggattataggcgtgagccaccactcccacccagggctgttttaaacacctttccttttcactgcaaaaaaaaaaaaactagtgggttactagtgggaggcaaagatgagtttgagctgccacgtggtgacagctgacacttggactgctgtgcaggaacagccgtggagttgctgggcatctgctgctctctagggcctgggagggtggtgctgggctgacaggacacagagcccacagggccggcgcacagaa

SEQ ID NO: 43218 - DNA, 2300 bp, Homo sapien
gtgcatgtgtggtgtgtgcagggctggccacgtgcacgccccggcctcacaggcctggctgtggcctcgttacgaggctctgctggaaaggcggccgccgcctctgtgtgatggtgtctgttcggatggcgcatgctcccctccctccacctgtgctttgttggggtgggtttggccatggggggttagaggcaggtgctcatgcagttcccgcaggggtgctgggcccctgcggctcccaccacattgcgctggactcttgtggcccgtgctgacctggtgttccagatgctgtctctgcagagctctgcgtggtctctggtgttagagaggtggccacccaccgccctatcattgtcctcatccccactgtgaggagaagctatcagatctgcctgtggcccccaggtggctcaggaagggccgtcctgacccccatcctggcccctttcggagctgcagagatttcctgtgcctccagctctggcttcctgggtctgtccttggcgtggagcgggcacaggcttcccgtagacacggttgcccagagtggggttcataactgggcactgtaaagggtgtggtctccacggcttaggatgggcccccccttcctggtggcctgctgtgcccggggctggtgtggaggcctgtgggtgcagaggccgcctggccctgggcttcctctggggttacatgtgtacccttgcacccacctgttagcacccaccgggagagtctcactcagcctaaaccagggcccctcaggaggaaaaggtccccagcttcatgatggggcccagtgtgccttccatccccgccctgactcagtgcccactgtgcgaggtgtgagcactgtccacagcagccagggcggccggtggggagtgcattggagggggttgaggtctcttgggcacctggtgagttctcaagggtgagaggaagccgaggccatcaggcttagctgacgctgcatggggcaggctgccaagagggaggctgaatggagcagcctcaggtgagccgacaatcctcacctccgcctggtcagccaggacccggctcccctccagtcccgcctgctttccccaaagcagatccagccagtctcaatggctcgcccggggggtgctggttaggctgtgagcatccttcctgggtgcaggcccccgacagccagcagtgctgtgctgtgtgtgtgttggggactctgctgagccctttgtggccagactggggaggctcctccgggctggctctgtcccctgtaccttgtgagggaggggctgaccccctgactgggttacatcgtggtgagcagttcagaaacaagctgtggaatgaagtggacgtggcgttttaaacacatgagccccatctgttcttaggggttttgtttgttgtcccagtccgtgactccaagactgggacccccagagttcccaggatggtctggagcctttatcctcaggtcagcattgtggagttaaagggaggggaccacggcccctcattctcaggagagccatggtgaccttgatggcggaggctcagggggacctggaccgtggacaccacacagctgccctcctccctcccgaggccatttcagggctggaatccctgcccccctctcctttcctcccgggctggttgttgccttgagagtccgtgcgctcatctccccacttttaccccagggggaggcccctcaccttcccaccatatcccttgtacttcctcccaccctggacttgggggagctggggggagggggcccttccttcagcagcaaaccctcctggtgtagggctgtaggccatcccaccgcagcctgtccaggagctgctgagcctgtcagccccaactagcacctcctgtccaggcccggcccagccctgcctccagagcctacagaggggcctcgcccaggtcctgctgctccagagcttgtgggtgcccacgctgcaggctgtttggggtggtggagtagagcacccgctggagctgggggctgagtggccatggggggaccatgctcctcctatggcccaaggcccaggggttccacctcgtaatttttgtttgtttttaaataaggaaaatgcaaaaagcgaggcgacggcttaaagatggagaacgacccccaggaggtgagtgccaggtacacagtgggtagcagtggctcagggccccggggtgcgtgagccggtgcccagcgcttcacacgcttttgaccccaaccaccccagttatgctgtggccacgggggccgctggccttcccaactgctctga

SEQ ID NO: 43219 - DNA, 2300 bp, Homo sapien
cctcctcgccctgggctgccccgcctgggtctggggacctgaacctcctcgccctgggctgccccgcctgggtctggggacctgaacctcctcgccctgggctgccccacctgggtctggggacctgaacctcctcgccctgggctgccccagctgggtctgggggacctgaacctcctcgccctgggctgccccagctgggtctgggggacctgaacctcctcgccctgggctgccccagctggatctgggggacctgaacctcctcgccctgggctgccccgcctgggtctgggggacctgaacctccttgcctgggctgccccgcctgggtctgggggacctgaacctcctcgccctgggctgccccagctgggtctgggggacctgtacctcctcgccctgggctgccccgcctgggtctgggggacctgaacctcctcgccctgggctgccccgactgggtctgggggacctgaatctcctcaccctgggctgccccagctgggtctggggacctgaacctcctcgccctgggctgccccagctgggtctgggggacctgaacctcctcgccctgggctgccccgactgggtctgggggacctggggcccagctgcagctgcagcagccttggtctttctccagaaggatgtcaggcttgcccaggaaaggggctgtgctgtcgtcctggtgtcagaagaagtgaggatgcctgcaggctgggactgctgctggggacgtttgggttggaaggaaggcggcagtcagacttgtcctgtgccggcactgctggggaggcccctccttcctgcagagccgtcccctcatcactgggttgattactccttagagagctccccactgctcagctgctccattccctaatggtttgccctccaaacccttccaaagcctcccagggagagaacgggaccctggacagagtcttgagctggaagcgtagggctgagctgtgtgtgactatccttttgctatggatgtgttcaagcagatctgatgtcctcgcctgtctcagcagcgggacccctgtttcctctttgtcttgcccctggattgcctggaagcaaatttcaggccttctttatgtcacctaaaaatatttcaaacacatctctaaaaaaatcagttgtttttttaacctgaccgtagtacctaatgtaataccgcatgttaaactcacagaaggtttttcttggagaaataagccacaataacaaattgaaaaaataaaattcccaaagagttcttccagtcgtcagatatttggtcagtattcagagtaggatccagagttcacacattacatttggttgacaagtctgtagatttctctttgtaaatcacatttttttgttgttgttatagcctggggaccttaatgactttaatacactcttttttttggagacggagtctcactctgtccaggctggagtacggtggtgcaatcttgcctcactgtaacctctgcctcctgggttcaagcgattctcctgcctaagcctcccaagtagctgggattacaggcgcctgccaccacgcctggctaatttttgtatttttagtagggacggggttttgccatattggccaggacggtctcgatctcttgacctcgtgatctgcccgccttggcccccccaaagtgctgggattacaggtgtgagccaccacgcccagcctcacatttttattttaaaaacctctccaggctgggcgcagtggctcacgcctataatcccagctgttagggaggcagaggtgggaggacagctcgagcccaggagttccagatcttctgcctgggcaatataatatagcatgaccctgttctaaaaaaaaaaaaaaaaaaaaaatctctgaaaaagatgattcaaaaaaaaaaaaaggagaggccaggcaagtagctcaggcctgtaatttcagcagaggccaagctgggaggatcacttgagtccaggaattagagaccagtctgggcaacatagcgagaccccatctctatttaaaaaaagagaaggggccgggcacggtggctcccgactgtcatcctcgcactttggatgctgaggcagctggatcacctgaggtcaggagttcgtgaggctccggcgtttgtatttcatttgaatctaaagtgagcagccacagggacccgcagctcatcagaccagcctggggttccaggccaggagggcagtggtttgctccagagccagctgcttgtgggtgtgggacggtggcgacgcgtgcaccggggatgtgtcctgccacc

SEQ ID NO: 43220 - DNA, 2300 bp, Homo sapien
gtgtgggggctgcgggcgtggccgtggtgcagggccatgggctgcaccaaggagacagcagaggggagtgtcccctgtttggggtaaattagtcacctttgggcacgggtggaggaggactcaggtttgcactgcccccagcagcccccccacagtcacccctggcgtggactcctcatacaggtcatgctgtgcctgccactctgagtaccgctgaccgtggccaggtgctggtgctcatggagtgctgctggggctgcctgcccatcaggggcttggcctcccagattgatgccagcatggggtgtgctttctggggagctgcttgactttgggaagctccctgtgttgaagaggcatacaggccaggacatggaggtctctggtcctcgatagcagagggcggctcagagcatcctcctgagtgggcctgggcagtgcatagccccggggttgcggccagtgggacagctggcccgttctctgcctcaggctcctgtacagctaggggcttggtgcctcccctgggacccaggcagggaccacggaatcagtggccctcctgaggccccccaggaggtctctgtttccagaaggagagccctgtgggtcaccttggatctggctgttggctcagacacagcaagagaccgagagggaaggcagtttgatgcctggagagggacccgtggcttccagctgccaggccagccccagaatggagccccccgcatgggcgcttctctgttgaaccaatcctggcatttcctgggcctgagagttgggtcagctggatgctgcgatggccgcacgtgctccaccaagccccagccccctcctcttcccagaaacccccgctcacgggaaggtccagttgctgccatctggccacctctgcatggagcccccaacagctgtgcctcagaacagatccgaagtgactttcaggggagctggacacatgtacgctggtgcctgctgtccccaccctttggcactgctgctctttctttttctgagatggagtctcgctctgtcgcccaggctggagcgcagtggtgtgatctcggctcaccgcaagctccgcctcccgggttcacgccattctcctgcctcagcctcccaagtagctggggctacaggcacccgccaccacacccggctaattttttttgtatttttagtagagacggggtttcactgcgttagccaggacggtctccacctcctgacctcgtgatctgcctgccttggcctcctacagtgctgggattacaggcatgagccaccgtgcctggctggcactgctgcccttggaagtggatggggatgatggcctctgtggggcgggtggcccagaacacagtggctcttcccagccccagcagcagcagcagagagccccctgtcacctgagggcctcagggagaggcaggggagccaggcttctcacccgccttctgcctttcagcttcctggagatgatggaggctcgcagccgtggccatgcgtccccactggcggccaacgggcagagcccatccccgggctcccagtcaccagtggtgcctgcaggcgctgtgtccacggggagctccagccccggcacaccccagcccgccccacagctgcccctcaatgccgccccaccatcctctgtgccccctgtaccaccctcagaggccctgcccccacctgcgtgcccctcagcccccgccccacggcgcagcatcatctctaggctgtttgggacgtcacctgccaccgaggcagcccctccacctccaggtaggccctggagctgcccctcccaaactggtcccagacccccaggccctcacaggtggggtcctggatttcggagcgctccacgcttcttcctgcttgtcccagtcccgtgggcacatcccgggtgggcctggcttggggttgggtgcagtgagggttctggtgccgagtgaagaggacccggcatcactgttcacagagccagtcccggccgcagagggcccagcaacggtccagagtgtggaggactttgttcctgacgaccgcctggaccgcagcttcctggaagacacaacccccgccagggacgagaagaaggtgggggccaaggctgcccagcaggacagcgacaggtgaggggtgggcctgggcctcctctcccattgccccccagcctccagggtgcccgagcagcaggtggggctggctttctaggggcgcagaaggggccccccgccggctggtcactgttggctgaggacagagcagctctgtggctggagcagacgagg

SEQ ID NO: 43221 - DNA, 2300 bp, Homo sapien
tggggggtgcgtcagagagtggccacaggcctggcctctgcacacccaacacctggtctggggggtctaccccagagtgagctggggaaagcgggtacctggccaggccccttgcagggcagaacctcaggtggatgggcctctcggggtctggccgggtcccccctctgtgtcccaggtgtgcaggggcttcctgctggcagggctgtttttctgggtcagggccacgagtcccaggccttgtgcccatcccagcctcccccgcccacccccccatctcccccctccaccccacccgtggcaggactgtctaccctcctgctccctctttcatgctaagctcaaggccaggccggaatccggccggatgacagggtgtgaggctccaccccagggaggtgacagtcggccttgctggctgcagctgtcggtgacaccccctcccgtggggatgggggtggggtcggccctctcccgggcccaaggccttctggagcccacggagatggctggcggccttccccacctcccagccctgccttgccttgccttgccctggctgggagcggcccttcaagggatacagccggtgttgcctgggggcggggactccccatcctttcggctgccctaaggcagcttcccccgcccatgacggtgacacactcagcaactcggcccctagccccttacctgggtgctgctctggctgtgccccggtgggctgtgccacccccaggtcggctcctctgtgtccccggcactgctgcgtccccggcacgggcagaagcttccaggcagcagcgcggatcctggcctggctgctcagtgctgcccctgatggcagctgaaggggctgtacttaaaggggccgcacccagtgggggctgcaccgtggagctggggatcatgagctgcactggctccaatttggggctgtgcagagcacagggtccctgcagcacccccaagacacagacctcagtgtctaagcaggagtcttgtggcccggagcagcctgccagtcccgccagtgtcaccccaacacacttgcctgagaggaggggcccgaaccctggcctgggctgcagagattggtcaggggcatcttggaattcgcatctcctgtcgggcgaggcaggagcagatgggctactctgtgccccactggcctctccccaggccctatctgcttcaaggctgccaatgccaaaatcttggcgggtacctggggccagatggcccctgcagcctcttgtgtccccaggatgccatcctctctgggtgaggccactcctgcatccggtccctgccagcctgggaaggcctgcacgtgacctgccatacctgcctggtaatgtcctcgtcccactctgccagcccctccccaaggcattgggcctgggaacgttctagcttggcagaggggtggggagctgatgcccttggctctgaagggcaggacctaccccattctgcactgttcaaagcagggcccactgaaaccccaacatagccgtccatggtgtgatcctgtcaagttcacgtactgtcgacccatccccacaccaggcgaacccctgaacccggccctgacctcatgggctgtgggctaaggggccaggctaagcttgctgtgggccacagcacctgctcagggactgcagtgactgcccaacaccctggggccacaaggctcccaggcagaggagcctccagcttggccacctcctccccttcactggcacactcttcctgcctgccctgcagggttctcatggcaacagtagctgtgggggtggaggctgggcgctgctgacagctggagggggcaggagcctgaaggcggggggcagggctgcaggcggctgcctgggagccttgcagagtggacttccacctcctggggctgaggtcgccaagcgtgctgcgtgcagctgctgagccctggcacaggtgggctggaatgtacccagggtgtggccagacttggtgggacgtcctcacaccactgctgggcagcctcctgccaacccacggcagcctgggcccggggcagcgggagcagaggtacaggcagaagaacagacacacgcagagtgaaacaggagtgctttatggtctgagtggagtgtttgggaggagtgcctcccggctcctgccttcgggctcacctgagcgggggcgcagctgaggccactgtgggaaacacaacccccactcccaggagaggcctcacatgctgccttcggtctcgccagccttctagcgtggggcctgggccgccctttagggtgagt

SEQ ID NO: 43222 - DNA, 2300 bp, Homo sapien
ccgcccgtcgtcgtgaacctgtccacctctcccagacgctacgccgcactgtccctgtccgagacgtcgctgacggagaagggccgcgcgggcgagggcctgggccgcaactggtacgtgacgcccgagatcaccatcactgacaatgacctgcgcgccaccgagcgcccgagcgccagggcctgggagttgcccgggggccgcacgcggccacctccccacgcggcccccgacggccccacctctggccgccagcggagcctagagcagctggacgagctcatcacggacctggtcatcgactcgcgacccaccgccggccaggcctcagagcccgcggccgactgcctgggcccccaactgcgccgactgctggactcgcggcccgcgggctccggggcccccgcgctggcgccgccacgctcgccccccgcctcggccggcagcgccgaggagcccgcggccccgggagaggcggccgacgcgtcccccgaacccagcgccgacgaggacgacctgatgacctgctccaatgcgcgctgccggcgcaccgagaccatgttcaacgcctgcctctacttcaagtcctgccacagctgctacacctactactgctcgcgcctgtgccgccgcgaggactgggacgcccacaaggcgcgctgcgtgtacggccgcgtgggcagcgtgtgccgccacgtactgcagttttgccgcgacagcggcccggtgcaccgcgctttctcgcgcatcgcgcgtgtcggcttcctgtcgcgcggccgcggcgtgctcttcctgggcttcccaagtccaggctcggccgacaacttcctgcgctttggcctggaggggctgctgctatcccccacctacctatcgctgcgtgagctggccacacacgcggcgcccctgggcagctacgcgcgcgagctggcggccgctgggcgcctctacgaaccggcagagtgcttcctgctcagcgtgtccgtggccgtgggacccggcaccgcgccaccggggacaccggccctgcccgcgcccgcgccacgcagccacgggccaacagtgcgcaagttcgccaaggtagcgctggcggccggcagccccgcgcggccgcccccggcgcggagccgcgagcccgacatggagacgctgatcctgacgccaccgccgggcacggcgggcctggatcaggacggcgaggcgggccggcgcgcgcgcgaggtggccttcatccacatccagcgcgagctgcggctgcgcggcgtcttcctgcgccacgagttcccgcgcgtctacgagcagctttgcgagttcgtcgaggccaacaggcgcttcacgcccaccaccatctaccccacggaccggcgcaccggccgccccttcatgtgcatgatcatggccgcctccgagccgcgcgcgctcgactgggtggccagcgccaacctgctggacgacatcatgtgaggcgccgggcccaccaggcctagcccaggcgctggcccgaaccctgccctgcccactcaggccccgcccggcccacccagggccgcccccgagccccgccagggccccaccccgacttcttctaggccccgcctctaattccccagccttccaagctccgctcagttcggcctccagctccgcccaggcccccaccccccggcccttcgtccccgtagtgttcctcacaggcccttcgccttcccacccccagcaacccctctccctcctccgggcctcctccctctcccagctcgccctcgaggatccccagaagaagtcggtcctcgccctcggtgctccccgctgggaggcggggtgggcctgaggaccgccgagctctgccttcactcggaggggtcactactgcacagaccccacccgtagagatccggtccccgtcggtccgcggggctctcgctggagcctccccgactccggtttcccctcgtccagaagcccgacgtaaccaaagcccagtctgtcactttaaacacgccccgccccgcctcccgcggctgtgttgcctcctcgctggagaacaccctggtcgacctctgtgcgtccgtgtgcgcgagcgcgtcccgccgaggcggtgggcagggcggacggtgcgcagtgcgttcccgctggtcggagccagcacactaaccacgccacgcgccctgccgtcccttcgcctccagccgctgcagtctgggccctgcaggagctgggaaaaaccgcagggaggtcttcaggccgatatgcaagtctcccagccgaaggggcaggggacctgaacaggggaagcagag

SEQ ID NO: 43223 - DNA, 2300 bp, Homo sapien
gcccccggcgcggagccgcgagcccgacatggagacgctgatcctgacgccaccgccgggcacggcgggcctggatcaggacggcgaggcgggccggcgcgcgcgcgaggtggccttcatccacatccagcgcgagctgcggctgcgcggcgtcttcctgcgccacgagttcccgcgcgtctacgagcagctttgcgagttcgtcgaggccaacaggcgcttcacgcccaccaccatctaccccacggaccggcgcaccggccgccccttcatgtgcatgatcatggccgcctccgagccgcgcgcgctcgactgggtggccagcgccaacctgctggacgacatcatgtgaggcgccgggcccaccaggcctagcccaggcgctggcccgaaccctgccctgcccactcaggccccgcccggcccacccagggccgcccccgagccccgccagggccccaccccgacttcttctaggccccgcctctaattccccagccttccaagctccgctcagttcggcctccagctccgcccaggcccccaccccccggcccttcgtccccgtagtgttcctcacaggcccttcgccttcccacccccagcaacccctctccctcctccgggcctcctccctctcccagctcgccctcgaggatccccagaagaagtcggtcctcgccctcggtgctccccgctgggaggcggggtgggcctgaggaccgccgagctctgccttcactcggaggggtcactactgcacagaccccacccgtagagatccggtccccgtcggtccgcggggctctcgctggagcctccccgactccggtttcccctcgtccagaagcccgacgtaaccaaagcccagtctgtcactttaaacacgccccgccccgcctcccgcggctgtgttgcctcctcgctggagaacaccctggtcgacctctgtgcgtccgtgtgcgcgagcgcgtcccgccgaggcggtgggcagggcggacggtgcgcagtgcgttcccgctggtcggagccagcacactaaccacgccacgcgccctgccgtcccttcgcctccagccgctgcagtctgggccctgcaggagctgggaaaaaccgcagggaggtcttcaggccgatatgcaagtctcccagccgaaggggcaggggacctgaacaggggaagcagagcacctgggcctggccagagctgacacctggctaggagaggaaggaccaagggacggggcgttcccaggtgggagcctggagggcaaagcgtggtgcgagcaggtgagggagagagctagttggtaagcgtggaagcccacccgagggggcttgacctgtcccgagaggtccccgcacacccgctctggccgcacgccgtactgcgggcgtggaggcgcaagcccggcggcccggcctccacctgtcccccaagtgcaccctggtccgcgcccagagctctctggagggtggggtatgcgggagaggggtggaggccaaacgcaagggccctcctggagtccccagccctacttcggagccaggggagggggcaccaagtgagagaaattgggcacccccgcctccgctcctgctttcgcacccggcacgcccatctcgtccccgcgcgtctgcaccggccaggcgtcccgcttgcccacccgccgccgcgccccgcgccccctaccccagggcctctgcattcggccccacccctgagggccggccgggaacgcccctggaccggaataatttccagggggcaagagctttcgaaccaagtaaaatagaacttgaatgtagcggctgccgttgcctccttgtaccggtagcggggttggggacggaagccttcggtcggtggagaggagaaagggagaggccttcgggcggtggacggggaagagagggagtccttcgggcggtggagggggtggagagcgaggccttcgggcggtggagagcggggaggggggaggccttcgggcggtgggagggggagagagggaggcctttgggcggtgggggccacggggagggtggtcttcggactacgtgcgggacaggaggtcagggctggcaagtccctcaggcctccctcgttgccccagcctcgcgggccgcctaactgccccgttccaagggtgccaccggaccccgctggagaggaacttctccgttggctggatttcatcaccacccattcccgattccacgtttcctttaagcggggctggcggagccgcaaggcggcaaggaactggattgcgattggtcagcacgtgcctcggtcg

SEQ ID NO: 43224 - DNA, 2300 bp, Homo sapien
gcagagccctccctccagggcccattgtgttcctgcattcccccatggagcacacgccagacctgaggggtgggacggacacccccagacatggccggctgtctcctctccctgccttgggaggccttgctgggctctagctgtcctccagcactttgggccctgggcccccagaggcagtcagtacctgggtggagctcagagtccccacctgtgctcttcacaaaaaccaccagcagatgagacccacgtgcgtccctctgggcgcctcaggccccaggatccaccatcaaggtttgcttgcctgtggaggtcgcctctccccaggggagcccccaagggcggtcgggatggtgggtttggcatccccaggcactgcctatccctttcccacactcgcttctggtgtggctggtggctggatgcccagagccgggtatcgggttgaagggtccaggtagtgccagcaggcgtcttctcttctccaggcctatggtcctgcccagcacgccatttcaactgagaaaatcaaagccaagtaccccgactacgaggtcacctgggctaacgacggctactgagcactcccagcccggggcctgctgcctccagcagccacttcagagcccccgcctttgcctgcactcctcttgcagggctggccctgcctgctcctgcggcagcctctggtgacgtgctgtccaccaggccttggagacaggctagcctggccacagaattaaacgtgttgccacacctgccggcttctgaactctgtccttggcttcctgcaccctgcgtcaccacctccgggggcccccagaccctaactaaagcaggtgggtgggggaacacaggagtggccccagggagtggcggtgcacactcagccctttggggtctgataaaggggcccgctgatggcctgactgctcttcccacggccatcgtcctccagggcatcttggaggaggtctggcaagcccttgcgagaggagtcagggcctggtccctcgggctggccaagacctggggcgcccaccagtgctccctcctatgagcccatcccagggctccccagtgtcctgtctgccctgaggctccttccgtgacctgcaggctccttccatgaccagccccatggggcctaccagtatccagggtcaggtcgcacagctgcatctaccccacaggctcacgttgactctggaggcccctcccaggtccctcttgcacccggcagggctgtgggcaggacacgggttcaggccttgccctgggaagccccatacacagtgggactccatggggtggtgcaggggcaccctgggggccagggctggttgtacacagggcacccccacctttgtcagctcactggtcctccggccagcctctccagacgggcactgtcataaccacattttacagaccgggacactgaggctcagtgacacaagctccgaggtcacaccatgggaaatcacaaacagggcctggccccaaatgccacactccttccccagccccaaagaccctgccccaagcatgagtctgctccatgagaaaccgaagtttctgggctcctagggaccctgtatctggcaccggacagcacctggctgctcaggacgaatgaatgacggcgtgatcctccacagcctgacttaaaggcaggttccccacggctgagaacgcagggaccagctctggtgcacgtgctggactcctgcagctgctggactggttgagtcctgaccttggccagcaccacgctattgccagaggcacagtgagaggccacggcggcctctgcccgccccacactgccgagcagagtcctggtggggtgcctgggtccctccccattccagtgggagcctccccttcaccaggcagggcagggcagggtggaagagcctgaccttgtgtctgagggagccgggcaggtgggagctgaccctgggtcagaggccccctcctggggccactttcacggcccatgcttggcaccgtcagcactgggtggggccgggccgaggggccctccacttaacagcagagtcagcgtgcggggccagcgcaggctgataaccgcacggaacttcccaggcaccctgtgtggccgcactgctccctctggcccaaccatgcctctgtccagccacctgctgcccgccttggtcctgttcctgggtaagtagtctggtcccactcctgaggcaggaccaggggccctggcttctgagcctaccatctgtgtggcagtgacggacaccagggctgatgcctgagcccca

SEQ ID NO: 43225 - DNA, 2300 bp, Homo sapien
gtcgactcactgcaacctccgcctcccggttcaagcaattctcctgcctcagcctcctgagtagctgggactacaggcacgcaccaccatgcccagctgatttttgtatttttaatagagacagggtttcaccgtgttggccaggatgatctcgatctctcaacctcgtgatccatccgcctcggccttccaaagtgctgggattacagaagtgagccactgcgcccggccacaagagattattttcattcagtggaagcacatccttgctggccggctgaggctgttgagtccttagccgaacggagcttggtgctggaagtcggcgggaaacagagaagcaaggtttgtatggacggagccatcagtgtgtccccaaggttcttccaatcatccggtgtgaaaaacggtaagcagaagactcaacttcccactgcctggttagaattacagttgtctcctccgcggagtgcatttgctaatgcagcatttccaatttaatacagcatttatgtatgttttctttttggatggagactgcatttatcaggttccttgtttgtggagcatctattcaaagcccggaagtcaatactatgattagggcctgcggtggctcaagcctgtaatcccaggctttgggaggccgaggcgggaggatcacgcgagctcaggagttccagaccgacgagccagggcggcacggagaccccatctctaccccacaaaatacaaaaattagccaggcgtgggggccgcgcctatagtcccatcgcttgagcgcaggacgtcgaggctgcagtgagctgagatctcaatgttgtgctccagcgtgggccacagagtgagaccctgtctataaaaataaaaatcctaaaaaagttgttcaatgataatgtataatgacctttctcattatacaaaacggctggaaaatagggtattacagaattattgtcatataacatatacactttatacattacagaaaataaacatcatgcaaaaccattcatttttgcaaccgatgttttcacagttttccattctttttctttttttttgaaacgcagtttcattcttgttgcccaggctggagtgcaatagcgcgatctcggctcaccgcaacctccgcctcccgggttcaactgattcttctgcctcagcctccccgagtagctgagattacaggtgcccgccaccacgtccggctaattttgtatttttagtagagacggggtttctccatgttggtcaggctggtctcgaactcccgacctcaggtgatacgcccgcctcggcctcccaaagttctgggactacaggcgtgaaccaccgtgcccggcttgcgttctttttcttaaagagtcccacctgcggatcacgagatcaggagatcgagaccatcctggcccgtctctactaaaaataaaataaaataaaataaataaattagccgggcgtggtggctggcgcctgtagtcccaggtactcgggaggctgaggcaggagaatggcatgaacccgggagacggagtgagccgagatcgcgccacggcacccagcctgggcgatagagcaagactccatctcaaaaaataaaagttaaaaaaaaaaaagtgtcccaccccacgctgcgtttcgggccccacggccctggtcctcgagcgcaggtcccagccgcgcaggcggcaaaacaaaggggggcggccgcacggctagagcggagaccccgcgccccctccgcccgcgtggcccggccggggtgcggggcccggggaggcacgggggctgcgcgtcggggcgcagccgccgcccgcgtgtgctcggaggccgcggggcccgggctccggggtcctcccgacctgcagccccagcggctaccgcgcctcgccaggccaggccaggccccgacgtcgccttccctacgtcgccggcgcccggccacgacgtccctcagacgagccgaacgccgaatggccccgagcacgggaagtgcccgccccccgcgtgcagccagccaatgggacgccgaaagcggggaggtgccgaggggacgtagcgtcgccgcgccaggtctctagcagctgccgctgagccgccggacggacgctcgtcttcgcccgccatggccgagagcgactgggacacggtgacggtgctgcgcaagaagggccctacggccgcccaggccaaatccaagcaggtgctttgctgactgaggagcggccgggccgggcggggcggacgctgggccggggccacggaccgtggggcagggggctcggggaagggcaggc

SEQ ID NO: 43226 - DNA, 2300 bp, Homo sapien
aaaatacaaaaaaaattagccgggcgtagcggtgtgcgccggtagtcccagctactccggaggcttaggcaggagaatttcttgaacccgggaggcagaggttgcagtgagccgagatcgcaccactgcactccagcctgggtgacagagcaagacaccgtctcaaaaaagaaaaaaaagagacagggtctcactctatagcgcagcctggagtgcagtggtgcaaccacagctcactgcaacctccacctcctgagcttcagtcatcttcctgcctcagccttccaagcagttgggactacaggtgtgcagcaccacacccagctaaattttttttcctttttttggtagagatggggttcccccatgctgcccatgctggtttcgaactcatgggctcaagcggtcctcctgcctcagcctcccaaagtgctgggattataggcatgaactgccacgtgaaccctttctcatcccgagctggctgctgcagactcaggacagctttgagcctcccaggtgcagccaggaggagacgccttcttacgtttgagagctcagttagttcctgggcttgagcaacctcactgagcctgcaggtgcggacttgggacgtttccatggctgcttgcagcaaactcaggggtgatgacgttgatggaatccgatggcttcctgagttccatctcaaggccttgctgtcccaggaatgtgggtttggggcggaggggaattccaactgcaaaccaagtaacatatatgaaatgtggcattggcgcctggggacagcgtggcctgtgtaaattatgcaacttcaaagcctgccctgttttgcagtgtattccatccttgaggagtcccgtggtctcagggtctgaatgcttggaggagacttacctccgtgaacgtttccttctctgcaaagcggggtgaaaggtctccatttcaccaaaggctggatggagagggggtggtgtgtccagtgctagcccgtgcaccgccagagagaacctgctgcagctcccgttctcctgggcagatgacagtgccgcctcccccatgcagcccacaggactcctagggcagcccctgttttggccgccaaggccactgttttcatttgagtgtctggaggccataggttgtgttttcacttgaggtcgggagttcaagaccagcctggccaacatggtgaaacctcgtctctatcaaaaatacaaacattagccgggcgtgatggcgggcgcctgtagtcccagctactcgggaggctgaggcaggagaatcgcttgaacccgggaggcggaggttgcagtgagtcgagatcgcgccactgaactccagcctgggcgacagagtgagcctccgtctcaaaaaaaaaaataaataaagtgcacaacccagtagattagcacaccggccatgtcgggcggccgtcaccactgtccggttgcagagcattacctcaccccaaaaggagaccccatagccttaataccttacttaagtgtgcagtattcttttagtcctgtttctcataaatgttacccaaattgaggcgccgctctgcgcccggcaccgggggaggcggagggacccgcaggtgtcgggtaggtgcggccgccccgccagggccccgcgtcccgcgcgcgacgcgcgcctcgtgggaaccggtgtcgcccggcttgggctcccggctcacctctcgggtgtgcggcaggggtctccgccccggggccacgggaggggaagcaagggcctcgctgtctcgccgcacctggggaagggacccaattagcgcggaccccacagcgcagcacctcaccagctccccgcaccaacgccccggcgcgctctttgaggaaaaagcagagggcgacttaggtacccacgccgtctcagcgccgaccaatcggcgcacgctgcggctcctgcgggctcgctggttggctccggcgtcagtccgtcaggcgcgctcggagcggggcgtatctggccaatggctctcgctacagcttcctgagggctggctggttggctcccatgtccgtccgtcaggcgcacgcggcggagcggcggcggcggcggcggcgttgggggcggtagctgggcgggcccttagttccgggcgcgctgcgaccgttgggtgaggcgagcgcggggtcgggtgcggggtcgggcgcgggcgcggggtcgggtgcggggtcgggcgcggggtcgggcgcaggcgcgggcacctctcagggagactccgggccggagcgggagcgggggcgggagaggccgcggggcgggggcgg

SEQ ID NO: 43227 - DNA, 2300 bp, Homo sapien
taaggttggggggaaccgagtgcctgtctctccccgcttttttttttgagtggagtctcgctctgtcacccaggctggagcacagtggcgcgatcttggctcactgcaacctcagcctcctgagtagctgggactacaggcgcccgccgccacgcccggctaattttttgtatttttaatagagacggggtttcaccgtgttagccaggatggtcccgaactcctgatctcatgatctgcccacctcggcctcccaaagtgctgagattacaggcgtgagagttgtagttcgttgagagggagacagacctcgaggaaatgcttggtgtgcctgccgggtgactgctcgctctccttgtctgctcactctgcccagtgaatgggtctaggcatcctcattgttcccttcctctgtcctcaacatcagcccaaccctgaccaggccccttcctgaggttcccacacaacaggggctccatgttcagaaggggagagagaaacccacctggggatgctctgtaaggagagcagagcccagtggagtctctgcccgggacgctgagggaggaagagctgcggttaattcaaaaggaagggtgaggtgcaggtattggctggatgatgctcagagaagcaggaagagtgggcatggcactgagtggctgaggccatcactggtggccttggtgcttaggcagaaggagagggcatggtgcagggcgctgaggccgtctgtggctgccttggtggggcttactgagttctagtggacagcaaggtgccagggcagggctggcacatggagggctctgaaggccatgtgtatcgtctgaagtgagggaaacccgtggtagctaaagggaatgcactagccagccccaggtgcgccacattcctgctctaggggctggagggaaacccgtggtagctaaagggaatgcactagccagccccaggtgtgctacgttccgctctcggggctggaggggaacccgtggtagctaaagggagtgcactaggcagccccaggtgtgctacgttcccgctctcggggctggagggaaacccgtggtagctaaagggaatgcactaggcagccccaggtgtgctacgttcccgctctcagggctggaggggaacccgtggtagctaaagggagtgcactagccagctccaggtgtgctacgttccgctctcggggctggaggggaacccgtggtagctatagggagtgcactagccagcctcaggtgtgctacgttcccgctctcggggctggaggggaacccgtggtagctaaagggagtgcactagccagcctcaggtgtgctacgttcccgctctcggggctggaggggaatccgtggtagctatagggagtgcactagccagcctcagatgtgctacgttcccgctctcagggctggaggggaacccgtggtagctaaagggagtgcactagccagctccaggtgtgctacattcccgctctcggggctggaggggaacccgtggtagctaaagggagtgcactagccagccccaggtgtgctacattcccgctctaggggctggtctggcggcatggctctctcctgagtgccttcagagcctgagtgccagcaggcaggcgtctcctgcccagtgggtttggtaagatatatttcagaaggcatccaccactctaaaacatgcttattgcaggaaccatgggggagaccaaagggcctagagccttgagaacctctgaccattagtgttaacaggaaggcagcctgttcccctagctggggagggggttgtgcgtggcaggaagcccgtgcgtctgtgtctctttggagctgtgggttggttgtgtggatgccagctgtgtggtccccagcctcactgagcctgagtttccatactagcggcgggagatgggactagagggtctccaaggctccctgaagctctgcgattctgcttctctgagtcttgaccgcaggtcagtggggacccggcccctcaccatcgcctgctactgatcaccattggtttggttttgtctcgaggactgttctggaattgaggtgtaacgtgctgtgtgttcttccttagggctttgttcgcgggggtcacagctctcatggctgcagctagcgtgaccccccctggctccctggagttgctacagcccggcttctccaagaccctcctggggaccaagctggaagccaagtacctgtgctccgcctgcagaaacgtcctccgcaggcccttccaggcgcagtgtggccaccggtactgctccttctgcc

SEQ ID NO: 43228 - DNA, 2300 bp, Homo sapien
gttcctcagctgctgggtccagagtcggcaggctgcgtcgctcccagtgccagggcagcccccacagtcagtcccatccttaagggagttcctcggctgctgggtccagagttggcaggctgcgtcactcccagtgccagggcggccccccacagtcccgtccttgagggagtccctcggctgctgggtccagagtcggcaggccgtgtcgctcccagtgccagggcggtctccacagtcagttcaggccggcgaggatgggaccaggggcccagaagtgggagcagaggtggagctccagctggaccccacaggctttgttggaactgcaccgggagctcgggggcccggggcgatggtggtgacaaggaagatggcaggagtagagcctggcactcgggtcagctgcccattataggaagcacacagagcttgtggctccaaacatggcagcaagcaaccccgtacagagaaaggacgcagaggagacgagtgagtgtcgaggtgatggttcccctgagccacgtgggccgcaggtagagaccctggggctgagctcgagcaccgacgggatcagggacagcaccaccgagagaggctgcgccacccagagggacggagcctctgccctgccaactcctggtctccagctgggaagccctggggaccactgcagttcataataaaacccccaacgtgggcgagaacaaggaaaggaaggaagacacaccaaagacccccagacaagataagctgccctgagactaacaccctcagaagggagctgacagattctgtaaatgcaagcacaccacgggcaggctccaaagaattgagcaatttcctgaaaaggacttacctacgttcacattcaaggagactaacaaaaacattcctatgcaccataaaacaaaagtggggacagaaatcaagaggacttggacatttcaaaataaaaagggagccaattagacactggaaaatgacagggcgagtgactgcatcaaaagcttgatacgtaggccgggcgcggtggctcacgcctgtaatcccagtactttgggaggccgaggtgggcagatcacgaggtcagatcgaggccatcctggctaacaaggtgaaaccctgtctctactaaaaatacaaaaaattagccgggcgcggtggcggacgcctgtagtctcagctactcgagagactgaggtaggagaatggcgtgaacctgggaggcggagcttgcagtgagccgagattgcaccactgcactccagcctgggcgacagaacaagactctgtctcaaaaaaggaaaagaaaaaaaaaaaaatcttgatatgtggaaagtgctggaccagacagactcgacgagaggaccaggcagcagaagatggcacagaggagacgaaagaaacacagccctgggaggggaatggagcggcatgcatgcccccaccccatctacggggcaggggtggagacccagtgtttaaagagaaagtgactgaattagcaaaagaacagaagtcctcagaaaacatatgctgaggtcaggccgggcgtggtggttcatgcctgtaatcctagcactttgggaggccgaggcggatcacttgaggtcaggagatcaagaccagcctggccaacacggtgaaaccccttttgtacttaaaaaaaaaaaaaaaaaaaattagccgagcgtggtggcacacacctctaatcccagctactcaggggactgaggcaggagaattcattgaacccgggaatgagctgagattgcgccactgcactccagcctgggcgacagagtgaactctgtgaaactgcagctatgaaacttgtgcacggggcctggagcagctgccagagagctgggtcagggagcagcagcaagatcccaagtttcgcagaactggtgcttgacctaacatccatgacctgaactccacgcagccgcaacaccggacgtgagtgctggggccaggcagaaagcccagagcagccctaagggccagggaaaggaacccacgccgatgcgcagggtcagtgaggcaatgccctgggtttaccctcttctccattcttttgtgaccctgatggcagtgggagtggtggctacaggaacccatcagagccaaacttggggccagaaagtccctcacagctcagtgcggctgtattgagggtgggaccacccccattagctttcctcccctgtcctcctgccacatagactccaacgcggcccagtcaagggcatgtcactgtctgaactgacagtgagtgagcccagcaaccaaac

SEQ ID NO: 43229 - DNA, 2300 bp, Homo sapien
tctctgtgagctacagggttgaatcccccagccgaggcctatgccatgactagtgggttccaggggcaccacggggcctgccaggactgctggggccacactcggctcatggccgtgactgcgaggaaggcccgggcccaggactgacaactgcccacccgcagcggccatgtcctggtacgaggagttccagcggctgtatgacacggtgccctgcgtggaggtgcagacgctgcgggaacacacagaccaggtcctgcacctcagcttctcccattccgggtaccagttcgcgtcctgctccaaggactgcactgtgaaggtgaggacggccaggtgtcctgcacaccccacccagctctgccgcagcacggaggtcccaggacccaggcgttccaaccaggtggtggtgggggggggggtgggtcaggccagaggtgacagcagcctccctgcatccagcggagggaccacagaggatcaggagcggtgcagggtggccctgagtgctgaggagagggtcccacacacagccgcctgcttcaggggcaggctcctccgctctataccaatgccccccgagtggatgacagtggctggaaggggtccctgctccctggtggcctctgagtagggctggcagagctggggcctcatggctgtgtagtagcaggcccccgccccgcgacctggccaggcgatcactacagccgcccctgccgaacagatctggagcaacgacctgaccatctcgctgctgcacagcgcggacatgcggccctacaactggagctacacccagttctcccagttcaacaaggacgactcgctactgctggcctcgggggtgttcctggggccgcacaactcctcatccggcgagattgctgtcatcagcctaggtgagcacgggcggcgggttgaccctgcccccgccccacgccgacagcctgtccagccccggcctccccacagactccttcgcgctgctgtcccgcgtgcggaacaagccctatgacgtgtttggctgttggctcaccgagaccagcctcatctcggggaacctgcaccgcatcggagatatcacctcctgctcggtgctgtggctcaacaatgccttccaggtgcgtgcggggctaggggcggggctgccctcctggggcctggcgcccggcgcccacctggcacgtgcccccgcccccaggatgtggagtcagagaacgtcaacgtggtgaagcggctgttcaagatccagaacctcaatgccagcaccgtccgcacggtgatggtggccgactgcagccgcttcgacagccctgacctgctgctggaagccggtgacccggccacgtccccctgccgcatctttgacctgggcagcgacaacgaggaggtggtggctggcccggcccccgcccacgccaaggagggcttgcggcactttctggaccgcgtgctggaggggcgggcgcagccacagctgtcggagcgcatgctagagaccaaggtggccgagctgctggcccagggccacaccaagccacccgagcgcagtgccacaggcgccaagagcaagtacctcatcttcaccactggctgcctcacctactccccacaccagatcggtacacccctgccgccatgctgcccgcctcggtcctaggagcttgggggaggccgggcaggggtcctgaggggcagacagcaagcaagtccacaggcaaagctgggatcgttcactcgcccctggggtcacaagcccagacctggggcctgtgggatgagcagtgaaaacaaacgcaggcagggccgctggccagcaagcaaccgacgggcctgattcaggtctggggcccccggagcaggcagtgcccacggacctctgtggtgctcacagccccagagacaccactgaggtaggaagctgccctggagtgatgtccttggggcattggacagggaccctcaccgtagccctccctgcaggcatcaagcagatcctgccacaccagatgaccacggcagggcccgtgctgggtgagggccggggctccgatgccttcttcgacgcgctggaccacgtcatagacatacacggacacatcatcggcatgggcctgtcgcccgacaacaggtgggcctcttgccagtgtcccaggcggggtgcccgcaggcggcccacacctagcacagtgcccctcgcccaggtacctgtacgtgaacagccgcgcctggcccaacggtgcggtggtggccgaccccatgcagccgccaccaatcgcggaggagattgacctgct

SEQ ID NO: 43230 - DNA, 2300 bp, Homo sapien
gtcacggggttcatgaagccacttgctcagggcccggcaacagggagcgccggaggcgggtcccgaaccagcgttcgttgagcctcgcctgcaaccccgcccacgaccgccgcccgctggccacaaggggcgctgttcccaatgcgcccgagtgcgcgcaggcgcacaaagaaaagccggccaggccgccggagcccaaggcgcaggcgcacgaggggcggatgcgggctacccgcgcgctctgccttcctcggccatcgatgcctcggggctcgtggcgtcgggcctggcgggctccccgttgggcgggggcggcggtccgagcggctgcggcagcggaagcgggtccgggtcgcgcagggcgggggcggcgcagcgggcggaggcggccgtggtgagtgcgcctgcggccctcgggggtcccgccttgtcgtccccgcccgccttgggcgagtgcaggagccccgaggccgcccgtgcgctcgtccccgccgtccgccccgagcccgccgggcagagctgctccagggccgcagggcggaggccactgcctggccgccccgagcttcctctcggcggaagcccgtccccggacggcgcctggtgtccccgtgcctcgcgtgcggcggtccgggccctggcgggctgaggggcgcccgctgccggccgcaggaggccgggggatgacgcggcggagaggggccggcccggcccgcccggagctgccgggtccttggttgggcggcggtacccgggcgtcccctgcagacacgcagccccgtggaactcccggcgggacggttggggctggaggaacaggacgcccgctctcggcctcccttcccgggcctgggctgagggcagccgttggtgggtttcagggccgcctgggcagaatgtcacgatggacgagggcggcacgcccctgctccccgacagcctggtctaccagatcttcctgagcctgggcccggccgacgtgctggccgccgggctggtgtgccgccaatggcaggccgtgtcgcgggacgagttcctgtggagggagcagttctaccgctactaccaggtggcccgcgacgtgccccgacacccaggtcagtggcgtgtggggcccctacccacgttctgcagccagggccccgggcccctgcgcttgggggtcagcctggctgggggcccgccccgcggccccgcgtgtccatgctcacccccccacaccctgatagaggcctgtcaggacacagcgcaggcgcccctcagagcttggaggccagagggttcattgggtcacttggggggtggggggtacaggggtctctgtgagctacagggttgaatcccccagccgaggcctatgccatgactagtgggttccaggggcaccacggggcctgccaggactgctggggccacactcggctcatggccgtgactgcgaggaaggcccgggcccaggactgacaactgcccacccgcagcggccatgtcctggtacgaggagttccagcggctgtatgacacggtgccctgcgtggaggtgcagacgctgcgggaacacacagaccaggtcctgcacctcagcttctcccattccgggtaccagttcgcgtcctgctccaaggactgcactgtgaaggtgaggacggccaggtgtcctgcacaccccacccagctctgccgcagcacggaggtcccaggacccaggcgttccaaccaggtggtggtgggggggggggtgggtcaggccagaggtgacagcagcctccctgcatccagcggagggaccacagaggatcaggagcggtgcagggtggccctgagtgctgaggagagggtcccacacacagccgcctgcttcaggggcaggctcctccgctctataccaatgccccccgagtggatgacagtggctggaaggggtccctgctccctggtggcctctgagtagggctggcagagctggggcctcatggctgtgtagtagcaggcccccgccccgcgacctggccaggcgatcactacagccgcccctgccgaacagatctggagcaacgacctgaccatctcgctgctgcacagcgcggacatgcggccctacaactggagctacacccagttctcccagttcaacaaggacgactcgctactgctggcctcgggggtgttcctggggccgcacaactcctcatccggcgagattgctgtcatcagcctaggtgagcacgggcggcgggttgaccctgcccccgccccacgccgacagcctgtccagccccggcctccccacagactccttc

SEQ ID NO: 43231 - DNA, 2300 bp, Homo sapien
gcactcagggccaccctgcaccgctcctgatcctctgtggtccctccgctggatgcagggaggctgctgtcacctctggcctgacccacccccccccccaccaccacctggttggaacgcctgggtcctgggacctccgtgctgcggcagagctgggtggggtgtgcaggacacctggccgtcctcaccttcacagtgcagtccttggagcaggacgcgaactggtacccggaatgggagaagctgaggtgcaggacctggtctgtgtgttcccgcagcgtctgcacctccacgcagggcaccgtgtcatacagccgctggaactcctcgtaccaggacatggccgctgcgggtgggcagttgtcagtcctgggcccgggccttcctcgcagtcacggccatgagccgagtgtggccccagcagtcctggcaggccccgtggtgcccctggaacccactagtcatggcataggcctcggctgggggattcaaccctgtagctcacagagacccctgtaccccccaccccccaagtgacccaatgaaccctctggcctccaagctctgaggggcgcctgcgctgtgtcctgacaggcctctatcagggtgtgggggggtgagcatggacacgcggggccgcggggcgggcccccagccaggctgacccccaagcgcaggggcccggggccctggctgcagaacgtgggtaggggccccacacgccactgacctgggtgtcggggcacgtcgcgggccacctggtagtagcggtagaactgctccctccacaggaactcgtcccgcgacacggcctgccattggcggcacaccagcccggcggccagcacgtcggccgggcccaggctcaggaagatctggtagaccaggctgtcggggagcaggggcgtgccgccctcgtccatcgtgacattctgcccaggcggccctgaaacccaccaacggctgccctcagcccaggcccgggaagggaggccgagagcgggcgtcctgttcctccagccccaaccgtcccgccgggagttccacggggctgcgtgtctgcaggggacgcccgggtaccgccgcccaaccaaggacccggcagctccgggcgggccgggccggcccctctccgccgcgtcatcccccggcctcctgcggccggcagcgggcgcccctcagcccgccagggcccggaccgccgcacgcgaggcacggggacaccaggcgccgtccggggacgggcttccgccgagaggaagctcggggcggccaggcagtggcctccgccctgcggccctggagcagctctgcccggcgggctcggggcggacggcggggacgagcgcacgggcggcctcggggctcctgcactcgcccaaggcgggcggggacgacaaggcgggacccccgagggccgcaggcgcactcaccacggccgcctccgcccgctgcgccgcccccgccctgcgcgacccggacccgcttccgctgccgcagccgctcggaccgccgcccccgcccaacggggagcccgccaggcccgacgccacgagccccgaggcatcgatggccgaggaaggcagagcgcgcgggtagcccgcatccgcccctcgtgcgcctgcgccttgggctccggcggcctggccggcttttctttgtgcgcctgcgcgcactcgggcgcattgggaacagcgccccttgtggccagcgggcggcggtcgtgggcggggttgcaggcgaggctcaacgaacgctggttcgggacccgcctccggcgctccctgttgccgggccctgagcaagtggcttcatgaaccccgtgacgttggccatggagataagaccactgggtgatggtttaaggaagataacgtgtaaagggctaaggactgtcggtggaaatcaggggtgcaggagaaatggataaacagccagaggtcaactcggactttgtacataggacatggtgccagggccctgccaggaagtgcagatcgaagctaggctcacgaggaggctggaggtggggggtggggaggcaacggatggacatggacttcctgggctgggctctgtgacagcagagtagactctgtcctgggacttggtggtgctacccttggcctcccacagtcctgccaccctgctgccgccaccatgctgccccctgggactgcgaccctcttgactctgctcctggcagctggctcgctgggccagaagcctcagaggccacgccggcccgcatcccccatcagcaccatccagcccaaggccaattttgatgctcagcaggt

SEQ ID NO: 43232 - DNA, 2300 bp, Homo sapien
cggggcactgacttctcagcactggagctgtgtgccggcctcacctcctcacttctgcagcagagacgagactcagccggtggcagtggcccccctcaccacgccgccatgcttgccccgctgtgcactcaccgtccaggacgtggaactggtctgcagcctcgcagaagcctgggggcccaaggcaggggtcaggctggacatcagcccagagagtgggggtggctgagctggggacctgctggggacactcaccgtacttggggaagtagaagatctggtcctcagtcaggtgggcctcctggacccgctgctcaaacccactcaggaccgagtcgctcacagggagcgagcgggctgcagggcagacagggttcctggggtcctggcaccaggcggcgtggagggctctggaaacggggtctgtgtgtcccctgccccctcggggccctctccctgctcccacaccaggcctgtctgtcactactccctgggcccctgcttagcaggaggatcaggatgggagaaaggaagtgtgtccccatgggctcacccagcccctcggggtggcccagtgagtgtgcagagcttgagcgcctgcctggtcacagaggctggcccccacataccgtagagcttcactgacagctgccccgcccgctccaggtacaggacagcgaaactctggtagtcggtctcagcgacaaccacgtgcacagcccctcgggcgtctcgggctggggcagagccacagtagccatgtcagagagccacagtggctgcgtcatcccccacccacatgccctgcagcccctgcctcaccttgaagcaggaagcggccgaggacccctgtgtctccatagagctggcgcacctgccagcagatcccatccctgggggggcggggaggaggcaccacaggctgggagaccccaaccaggaatcctagtccaggccacagccggggtggggtcaggggccagagcagggctgaagtccgggggctgagaggagggttggggttagggtgcagggctgctctgggactcacagctttcggaaggtactgacagccatggctgtgccctggggagccacatgcagtgtggtggcctcggcccggtggccctgctcctgcaggaaacggcaagcggagcccacagccacaaggagccaggtccctgcaaactgggggcagaccatgggagaactcgagggcactgtgggagggcccctcacctgcttccctctacaccccccacaacttcacctgcttccctctcccccgcaacaacttctacctgtctccctctacccctcccacaacttctacctgcctccctctaccccccccaacttctacctgctgagcatcaaaattggccttgggctggatggtgctgatgggggatgcgggccggcgtggcctctgaggcttctggcccagcgagccagctgccaggagcagagtcaagagggtcgcagtcccagggggcagcatggtggcggcagcagggtggcaggactgtgggaggccaagggtagcaccaccaagtcccaggacagagtctactctgctgtcacagagcccagcccaggaagtccatgtccatccgttgcctccccaccccccacctccagcctcctcgtgagcctagcttcgatctgcacttcctggcagggccctggcaccatgtcctatgtacaaagtccgagttgacctctggctgtttatccatttctcctgcacccctgatttccaccgacagtccttagccctttacacgttatcttccttaaaccatcacccagtggtcttatctccatggccaacgtcacggggttcatgaagccacttgctcagggcccggcaacagggagcgccggaggcgggtcccgaaccagcgttcgttgagcctcgcctgcaaccccgcccacgaccgccgcccgctggccacaaggggcgctgttcccaatgcgcccgagtgcgcgcaggcgcacaaagaaaagccggccaggccgccggagcccaaggcgcaggcgcacgaggggcggatgcgggctacccgcgcgctctgccttcctcggccatcgatgcctcggggctcgtggcgtcgggcctggcgggctccccgttgggcgggggcggcggtccgagcggctgcggcagcggaagcgggtccgggtcgcgcagggcgggggcggcgcagcgggcggaggcggccgtggtgagtgcgcctgcggccctcgggggtcccgccttgtcgtccccgcccgccttgggcgagtgcaggagcccc

SEQ ID NO: 43233 - DNA, 2300 bp, Homo sapien
ctcttccgagccgagctggcaccagctggcccgtgttggtggcagcagttggtgctgtccacccacagccactgcactctctgcacacctcatccactcccacgtcccccgtgaaaccaggaagcagaagagaatgtgggggtgggccagctctgccctcggggcagcccctgggctagggccggagaatcaggaacccggcatggcttgaccatgctgggcctggacctggccgctaagctgctcctctcaggccctgcctgcggccactggcatttgtttgataagcatttctgaaggcccactgtgtgctgggccctgggaccaccaggtgggctggtccctccccctaggaacttacaagtccagggatcagccaccaatcggccacagtgggcagggatgggaggagaaggcaccttggagttggtcccaaagcacacggcctgggtgggggcagggaggagccagcagctgcttcaggggggtccccatcccacgggcggggctccccctgccgtgcccacctgttcactaagctgctagaccccaggagggcaggcaagtcaggtggtgggaaggggaggcaggggccctgactgccgggacctgggaaggagaagggcccaggaggtcgtacccttgcatcgccttcccccactccagctccatgtcccagagacccatgagatagcagggcgcagcagaagggctcagggttcagagctggcaacgccgggaagactctaggcctgagccccaggaaagcctcctccatgcctggccccacatcccccaaacagaaagtgagggtctcatctgggggcaggaggagtcgggtagctggccacggtcacaagcttcagggagggctgaatgtccgaggggtggcgccagagacccacccgatgaccttgggtgctgtggttggtggcagagtggcccagcctgaccctccacgcctctgactgcagggctgggtgggttcccgcactgagtgaagtgcgtggccacttggctgtgtgctctgggaccagaggatgtgcagcgcaaggattacaaggcatttcattttcacagaagcattgaatgagctctagttaaatttcaaacactacataaaatcacgatagctctgtgtgaatcattgttctttaaaatagtttgcataatttggctgggcgtggtggcttacgcctataatcccagcactttgggaggctgaggcgggtggatcacttgaggccaggagttcaagaccagcctgtccaacatggtgaaaccttgtctctactaaaaatacaaaaattagctggtcatggtggcaggcgcctgtaatcccagctactccagaggctgaggcaggagaattgcttgaacccaggaggcagaggttgtggtgacccgggatcatgccactgcctccagtctgggcgacagtgagactctgtctcaaaaaaaaaaaaaaaaaaaaaatctatggaaatggctgggcgctgtggctcacgcctgtaattctagcactttgggaggctgaggcgggcagatcacttgaggtcaggagtttgaaaccagcctggccaacatggtgaaaccccgtctctactaaaaatacaaaaaaaattagccaggcgtggtggtgggcgcctgtaatcctagctacccaggaggctcaggcaggagaatcgcttgaatccaggggacagaggttgccgtgagccgagatcgcgccattgcactccagcccgggtgacagagcgagactctgtctcaatttatttaaaaaacaacaacaaacaacaacaaaactatgcaaactggctgggcacagtggctcacacctttaatctcagcactttgagaggctgaggcaggaggatcgcttgaggccaggagttcaagatctgactgggtgggcaacatagtgagacctcatctctatttaaaaaaaaagttttttcatctatagaaactaacatttaattgttagcagtcttgcccaagacctgcggggtcaggagtccaggactgtcctgggtgcccccgccttgcctggacgtgagagtgctgtgtggggccccgggagcccctggtcccacaggcagggccgacaggcaggtgccgtgcccgtcctccctgcccacgcaggtgctcagagggacaggtgggccaggactcctccatgtggggacgaggcaccctcctccccagccacgccccaaccacccctggccccccaccccacccccaaggggcctcccagcgcccaggaccgtgtctgggaaaaggtctttgcccgg

SEQ ID NO: 43234 - DNA, 2300 bp, Homo sapien
gcgcgccgaacccattgtcgtgtccgggaggctcctgcaggggacgtggggggcacagaggttaacggcagcagccagtggctacctggaggcacacacagaccccccagggcggcaggagtgggtctgggggagggagcatggggcctgaggcgctgcttggagccgagggaccctcctctgtgtcgaggactcggcccacccgacctctgctgctcagtctctgtgggtctcgggctggccagggaaggcccggttttcctcccgcagggccctgcatgggcggggtccgtagcggggactgtcctgtacatgggctgtgtgctgtgatcccaaatctccccagtgccctgcgataagacgggctccgggaggggtgcctgctgcgctgagagcgggaccctggggctgcggacaggcgctcctaggctggctggggccagggggatggtggagagtcgaaggcgccttggggagttcaggggaatgaacagattatttccaacttttccttccctgggccagcctcctgaaacgctagcgttgtgctggtgagacaaggcacagcaagctgcccttctacgtgggcagtgaggcctgggacagagcccagccctggagccctgaagtcctgggggctgggctcttcgagtggccaggctggggctgccacccagggcaggctgccgaggcccagggcacctcctgggatgagcctaagtcccttgtaagcagggctggatgaggggaggaggtggccaggacagggaatctggggtgggagggggcagccaggacagggacctggggggcctggacagaggctcacaggccaggcacacggtgagtgggaggcacctggctcacccttggtgacccctaacatggagtccagcacccagaggcttcagctacctgtgaggatgggaggagaggtcaggaaggggactccactccctagccccatcgtccaaggggtgccagggcagctagaagccccaagcctgccattgccctccctgccagccctctgtttacattttatttttatatttttagagatgagatctcagtcttgcccaggctggagtccagtggcacaatcatagcttactgcaggctcaaactcctgggctaaagcaatcctcccacctcagcctctcaagtagctgggaccacaggtgtgcaccaccacccccagctaacttttaaatttttttgtagagatggagtctcgctatgttgtccagggtgatgtcaaactcctgggcttgagagatcctcccaccttggccccccaaagtgctgggattataggcatgagcctctgtgcctggcctactaatcctttcttttaggcaggaccagcatggggtgcccactcccattagtggggcttcccagccctgcccctccctctgggcagagactgcgtttaaaatgccccagctgtcctcaccaggttgcctgggtgctctgcaggccccagcctccctcctcgcctgctcgggccacctccaccccggcctcatggccacagggcccctccctggtcctgttcttgctccagggccacggcccacgctgcggttcaggcatgtgtggagccaggcagggtgggggtaggggggcggctggcaggcccaggccctgcagggggaatgcccgggtttggccacagctgggccctgtcccttatggctgcggcaggtcacgctgtctgcctgggacgcaacattctgtgacagggaggaaggctggggcaggctgcgtggggcctctgaacccccagcatggggcacttggaagggggctgaagggggcagggcctcagaaatgagaagaagaggtggaaggtggacctgggggcccctcctaccccacctggctggaacccaagagaccgcaggtgggtgggtgggacctgaggagagcccacaccaagcctgccctgggcaccacctctcctgccagtcctgaggagggaggcagaggggcacacccccttgggaggggcacctgctgggtatgtgcatgaagaggtgggtctctgggtcacctgcccatggccacttccttctctctgtccctgtgggcccagcagctgccaggatgaggctgctgtgtggcctgtggctgtggctctccttgctgaaagtcctgcaggcccagaccccaacccccctgccactcccgcccccgatgcagagcttccaaggaaaccaggtacaggggttttgacggaaggagaagcagccggctgggtctgagtgcagggagaggctggtggctgagcaggc

SEQ ID NO: 43235 - DNA, 2300 bp, Homo sapien
catctaacccccagtggctgcctccctcccagctgggtgctctcctggcccgtcccacgctctctggtgaacagagccagattcatcctcaaacataggccaccctccatggcgcccagcagaaactgccctaggctggagggctgggaccgtggggtgacagaggctgcggaggcctgtgaccaagggtccctgcccagctccacagcacctggcagcccttgcccctgctaggagcgccctttcctcaccgctggctcttctcagatctgtggccccatccccctgggttgcctcaaaggaaccccagagtgagaggcaggagcccccatctcaggggcgtgggcccaggctccctgtgtgccaccccacgttcccccgatgggaggcaggagtccctgaagatccaggcccagccctgaccgggggtgggcacagaggtggggagcagcctctgggatcgggtctccacctgtgccctgccggagccagcccctgcgctgaatggtacttccggcttctggtctctgtggggagcggtgcccagcctggtgctacagtgacccaggggtccttaggcgaggccctcccaggcttggcccctgcccagaccctgccctcctggggagctcccgcccagcccctaaatgggtgaggtggggacactttagccctgaccttccatggccgagctgggcgcttcctgaagccagactgggcctcagaggtccactgcaccgggatcctggagctgagcttctcgaggccaggggtgtgggtgtggtgtcgggtgtgggtgcgggtgtggtgttgggggttgggccgccccctcctcccggccctgctacctttgggatgcggcagcctctgaccagcctgctggaccccacattggacagatcgttcagcacccccaaattgccatctgtcccccacagacagccagcctagccctggctccaaagctgcagaattggctgaggcttggccataaccgtctttggaccccatggccagcaatgcacatatgagcctcaagtcccagggacatatctgctcccctatcctctggcttgtcccgggctgccctgtcctctgcgccgtccccggctgctgggcgggcctgacctccagggtggtgctgggagaggtggccagaggcagccagaaagggtgagcggagaggtggccgtcccccatgtcagtgaacacccaaacagacaggcacagagaggagggctgggtgaagagtgggtcccatgtgctttgagcagctcagagatgccctgaggaggggctgtcccacgtggcccgtccactcaggcctccttcaatcacagagcagctcccttgacgcagggaggccttggggagaatttcttgcccctagaggagccctgagctgcccccaccgcacccggccctggtctccccggctacaatctcaggggtgctcctgctctgcccctgacttgtccagaacactccacagcgtctcagtgatcccgggcactgcccttccctatggaagatcctcagcggggcagctctggcaggagtgagcctctggggccgtgaggcttgggtacctctgaaaggtggggtgtagaggctgcccctccccagtcccaggctgggggagttgatcccaggctgcaggtgggtggggctcacgaggtccccatgagtttatttgaggctggtggacactcagtcgagctcagctcccaccagtcactgggacagcctcggccctcaagggcaaaccattggtggggatgctggacagggtcatcactgcccccggaggatgctggccggggccccagggtggagacagcttccctccaggaaaaggttggggtcagttctgggagcttaggcccaggccaccaggcttgtccatgacctgcctgggccgcaggcagggggatggccttggtgacctcttagggtggaggccaagtctttgcattttgtgactcaaagagactggttcccagagagcagggtggggcggccagccttcttcctgcccagccctccgccaggctccactaaggtcctgcctggcagccaagctcagagcaaagggaagggcacagagagtgtgcagggtggtccttgtccctgcccaagctgcaagaggctctgcgaaggtccctcctgcccctgtccaccttgcacagtcctagccgggggaggaggggagaaatctggcgtgccaggagctggcaactgcccagcccttcctggatgtggtgagagatgaatctccagccctcgggtgggcccaggtg

SEQ ID NO: 43236 - DNA, 2300 bp, Homo sapien
agtccgtcctgaaccgaagcatgatcctgttagctcttccagctctccaggcgccaacgaccatatggtctcggtaacgactggtcagggaggagaagggacatgggacctgctgggctttctgcagcccactagaaaatggggaagaggaggggcttggtccctgttccaggcactgggtttgagggctggacacccgagatccctgggaacccctctggctatgggaggacccggccccatcagacttcagagtccctccctggcaggtgacccaggcctgcccagacggaagccattcagacccagagccacgtgtcctgggtctccctgccccgggccacccgccaccacaccccagagcttgctcaccaccgggaggcgctcttgtcctggaccagcctagcctgggttgggacctccagccaggccagtcagcgagccaccagccccaccagagtggaatgacagccaggactcagctggcagcgggcaggaggccagtcttgtggtgatatcccagccgcaactctcttcctgcccctcccctgtcctgacggcagcccccagctctgtagctgagccaggcttgcgggccacgcggggtcccgggtttaggcaccccacccctatctgttccaacagactctccctctcagcccatggcacagatggcatctgagctagcagcacgctgctgcttcaggcaggggttgataggaggtccaggtggaggagtgggttctcaggactgccttggcccccctgcaccgctgccctccttctccctgcctctcaggtgcctcccggctccctgggactcactccctcaccttggcctctgcctgggatgctacccggccacccccaccagccctgacaccagtgctgcccactagcccctgctgctacataggcatgcgcctcccccagtctgggctccttgacccccgggcactggggaaggggaacaaggaagcagtccacaccagcccactcccagggctcgtgcgcccccagcaagggatgggccacagaatccaggaagaagacgggctccggcccccagtggtcgccagcagccccgtagaagctcaccaccccaccccatccgactcactcctgctctcatgtacatttcccagctccccacccgggctcaccttcagaccagcggcagcgctcacccaccacgcctgccagggaagctcagtcccaacagaatccagagagggcccaccacatgtgcctgcctgtgacggcctgtgacagggccccagccagggccaacgagctggaggggcccaaggagctgggtgcagcgctggggtaacaggacagccccacggggtgctcccgagtctggaccagactcggggtggggaggcccagactcggcggggggcagacttggggtggggggattgctgggggaagttggggcctctggcaagggatagggcctgtgctcaagcccaaaggtgccccaggctgaaatgggcacccaggggtcactatcagagccccaacagctggccatgggggaagccatgcccagcaaacctggccctcgggaccctgcgggccagatcaagtttctctaccttggcctgagcttctcatcaacacttcacttgctgggcgtttcaggaccaaactctcagggtggaagtggggcttgtgtccccttctggggtggcagggctcggaaagggaatgatggtaggggctgtgagatgtgggtcctggcccccagtgggaagtcaccagaggcctcggaggcgggcatggctgaggaacacagcccctgccctatcagggccgctgggttggtgggccctgccagcaggaggagggtgggcaaggtccctgccagctctgtctctgggaccagtgggcaggggcctctgcctcacccccacgctgcctcagctggggcagcaggcccaggcctcttgcataagcgccctgtgggggacgaggctgcagctgtgcctggccaccccatcccccagcatcacgagtgttcagtgggctgtccccgggccctgggtggaggccaagcctggcccataaataggggtctcctcagtgccctccgctcctcctgcacacctccctcgctctcccacaccactggcaccaggccccggacacccgctctgctgcaggagaatggctactcatcacacactgtggatgggactggccctgctgggggtgctgggcgacctgcaggcagcaccggaggcccaggtctccgtgcagcccaacttccagcaggacaaggtgaggggctt

SEQ ID NO: 43237 - DNA, 2300 bp, Homo sapien
tggagagcagccgggtgggggagcatcccgggccagccgaggggctgagtgcccccaaagcccacaggtgcaccccttccctgaagcagaggtgaggtttggggggctgagtccccgacagggttgtctcttgggttcccagactggggcagcacctactccgtgtcagtggtggagaccgactacgaccagtacgcgctgctgtacagccagggcagcaagggccctggcgaggacttccgcatggccaccctctacagtacgtgccccgtggacgccgcccacacgcaggcctgaccagagggggctccccaagacccagggcagggcacacagcatcccccccgctgaggccagctccgtctccaccctgtcccaggccgaacccagacccccagggctgagttaaaggagaaattcaccgccttctgcaaggcccagggcttcacagaggataccattgtcttcctgccccaaaccggtgaggggtcctaatctgatggggagaggatcaaggtcagattagaggcaggcaggcagtctcctgactgggggaggcagaggggaggaggtggccccgccctgctcgaggcctgggccagggacagagggggtgagtgttcaagtcagaacctccctcccgcagccccttcatgaggagccccctccatgggggacatggagaccaggcgcccactctgtgccaggccccagcagctcccaggatgtggggcttcagcctggtggggggcatagggtagagggtgcccatgggggatacaggggaaccaaccatactgggctcaggcacagcctcctaggggtggacagcctgctcttggcagaggtggagaaagaccctctctttgtttccagtgcccagggagaggtgggaggtgatgggggatctgtgcagtttgggggctcagtcaagacgagctctgcgttacgggaggaacaggaagcccagtgggaaaattggcctaagtctggggttctgacgacagcccctggcttctttcttggcagataagtgcatgacggaacaataggtgagccactccattcattcattcattcattcattcattcattcattcaacacacatccacccaacccactctgcgatgggatggatcagggccccaggacagcctggtgctgcagacccatccttcccgatggctgcagtccagggccgggcgggagacactggggctgcccacattgatgggtgcacaggtgtgaggctcagaaggaaaacctgtcccagtggctggaacagggctgactcctgaaggctcatggttggggggtgcaggtgcgaggccccaggcagacaaggccaaggggctataccacagggaccacctggcagcaagggtgtctggctcctgggctaggaggaaaccagggtgggggagacaggatgggagggaacaggggatggaaggggagggccaaggacgctacatggatgccgtgggacagctcggagagcaggctcagggcggattcacccaccacccccaggagggaggcctaggctggagctggagtctgtggaccctggggctgggaagggtggagtctgtagaccctggggcagcggggatccaagccccagggatggatcttgctctctcagcggggctcagtggggctgggggcagagaaaagtccccgtagcccgcacctgctccatcgactggagtggaggtgggctggggtagactgcagtcctccatcctagcctttcggtcacacccctcaggactccccagggctgaagctgggatcccggccagccaggtgacccccacgctctggatgtctctgctctgttccttccccgagcccctgccccggctccccgccaaagcaaccctgcccactcaggcttcatcctgcacaataaactccggaagcaagtcagtagagctggctcctggctgtctgcgctgtcatcacccgtcctgggcctggccctggccacccggacctccccctctaaaatctcagcctgacgtcaacaaaggaacaggccctctagtgtttgctcccagtggggtcttgagtcaggacagctaggagggggtgtccctcactgtctcccacccaccccacacagtcgtgtgcccctgccccacagccccacacgtcgagccataccccctcagctgccactgccaccaggccggtgctgagctgggggtcagtgactcagctaatcccttaggcaggtgccctgcacccccaacgccaccctgtcaccccctcagcagtaaaggcctgaggc

SEQ ID NO: 43238 - DNA, 2300 bp, Homo sapien
ttcattcattcaacacacatccacccaacccactctgcgatgggatggatcagggccccaggacagcctggtgctgcagacccatccttcccgatggctgcagtccagggccgggcgggagacactggggctgcccacattgatgggtgcacaggtgtgaggctcagaaggaaaacctgtcccagtggctggaacagggctgactcctgaaggctcatggttggggggtgcaggtgcgaggccccaggcagacaaggccaaggggctataccacagggaccacctggcagcaagggtgtctggctcctgggctaggaggaaaccagggtgggggagacaggatgggagggaacaggggatggaaggggagggccaaggacgctacatggatgccgtgggacagctcggagagcaggctcagggcggattcacccaccacccccaggagggaggcctaggctggagctggagtctgtggaccctggggctgggaagggtggagtctgtagaccctggggcagcggggatccaagccccagggatggatcttgctctctcagcggggctcagtggggctgggggcagagaaaagtccccgtagcccgcacctgctccatcgactggagtggaggtgggctggggtagactgcagtcctccatcctagcctttcggtcacacccctcaggactccccagggctgaagctgggatcccggccagccaggtgacccccacgctctggatgtctctgctctgttccttccccgagcccctgccccggctccccgccaaagcaaccctgcccactcaggcttcatcctgcacaataaactccggaagcaagtcagtagagctggctcctggctgtctgcgctgtcatcacccgtcctgggcctggccctggccacccggacctccccctctaaaatctcagcctgacgtcaacaaaggaacaggccctctagtgtttgctcccagtggggtcttgagtcaggacagctaggagggggtgtccctcactgtctcccacccaccccacacagtcgtgtgcccctgccccacagccccacacgtcgagccataccccctcagctgccactgccaccaggccggtgctgagctgggggtcagtgactcagctaatcccttaggcaggtgccctgcacccccaacgccaccctgtcaccccctcagcagtaaaggcctgaggctcgaggccccagaggagctttggacctgttgggtatcttgaggtgtgggattaacgcactgagattgggcagagataagggtttcaggggacaaaaagaaacatttgtttgaaacatgccagagtgtctccaccccgcatcaggacagactgacagagtgggctggggacaggctaccccatatcccttctggctccctgtgcgccccctgccctctgacctgggcctccagatcacagccttgtccactcaccagagccctggcaccacggccacaccatgcccggccagtgccctgcccaaccctgctcccttccagattcccacccaggcagccattctcaggtacacaatgtgcaggactcactgtgacctgcccaccaggcccccccgaggcagaccctgcagaggcaccaagcattttgaggctcggaggtgagggtgagcttctgggtggccttcccggagaagggggcttagggctgtgcctgagctcaaggtaggggggattccaacatcccagaggggctgcagaaggccgaagaggcaggatgggtgagctgcaggccccctagcccagaggcccgtcagaactaccctcagctgccaggcatccggccccaccccggaggaaaggcaacggatggctggggttgggtggagggagccaggccagagcgctgcagggtgcaacttgatcagaagcctgtcacagtgggtgcagtcccaggccagccgccccagggcacctcaggggcgtaaagcctacagaggagccacctcagctctgccctgctcccgtgtccggaggagatgccatcttgctgcatgatgcttcgggctctgctgatcagttccctccttgccctgctctgggcatccccaggccaggcccaggtccccatccaggccaactttgatgccagccaggtgtgcccagccctgtttcctcctcatctccaatgagtcctcccggctttggtgctgcaccccgggtccctgtccacaccctctttgatccaggctcagcagggctaggggcaggggaaacccccacctcacccgctccgtctgactggagtaggggtt

SEQ ID NO: 43239 - DNA, 2300 bp, Homo sapien
gtgtccctcactgtctcccacccaccccacacagtcgtgtgcccctgccccacagccccacacgtcgagccataccccctcagctgccactgccaccaggccggtgctgagctgggggtcagtgactcagctaatcccttaggcaggtgccctgcacccccaacgccaccctgtcaccccctcagcagtaaaggcctgaggctcgaggccccagaggagctttggacctgttgggtatcttgaggtgtgggattaacgcactgagattgggcagagataagggtttcaggggacaaaaagaaacatttgtttgaaacatgccagagtgtctccaccccgcatcaggacagactgacagagtgggctggggacaggctaccccatatcccttctggctccctgtgcgccccctgccctctgacctgggcctccagatcacagccttgtccactcaccagagccctggcaccacggccacaccatgcccggccagtgccctgcccaaccctgctcccttccagattcccacccaggcagccattctcaggtacacaatgtgcaggactcactgtgacctgcccaccaggcccccccgaggcagaccctgcagaggcaccaagcattttgaggctcggaggtgagggtgagcttctgggtggccttcccggagaagggggcttagggctgtgcctgagctcaaggtaggggggattccaacatcccagaggggctgcagaaggccgaagaggcaggatgggtgagctgcaggccccctagcccagaggcccgtcagaactaccctcagctgccaggcatccggccccaccccggaggaaaggcaacggatggctggggttgggtggagggagccaggccagagcgctgcagggtgcaacttgatcagaagcctgtcacagtgggtgcagtcccaggccagccgccccagggcacctcaggggcgtaaagcctacagaggagccacctcagctctgccctgctcccgtgtccggaggagatgccatcttgctgcatgatgcttcgggctctgctgatcagttccctccttgccctgctctgggcatccccaggccaggcccaggtccccatccaggccaactttgatgccagccaggtgtgcccagccctgtttcctcctcatctccaatgagtcctcccggctttggtgctgcaccccgggtccctgtccacaccctctttgatccaggctcagcagggctaggggcaggggaaacccccacctcacccgctccgtctgactggagtaggggttggctggggaagactgcagcctccatcctaccttttcagttgcatcccccaacaatccccagggcccaaaatagggacaagttggttgcctgtgcctcactgtcccccacccaccccacaaagacctgtgaccttgccacagccccacccatccagccgtaccccctgggtgccagctgcagacaggccggtgctgggctggtgggggccagttgctcatgtactgaggcccccctccctcagttctgcatcggggtcgagatgtgtacagcagcccctgccgtggccaggaagcagctgtgtcggggcagaatgtggtgggctcaggcccagggcacaggggcggcctcccagccttccctgcacttgccctgcagttccagggcacctggtacatggtcggggtggtgtcagatgaccaggacttcctggactccaaggacaccatgaagatggctgtggtcttagtgacccccttggggaatggtgacctggccctcaagtttggataccccacgtaagtgaccacacgagcccatcagactcagcctcagaggatggccagcatgaggccacatgaaggtccagagggaccatggtgtccccagcacattgaggtcagaccacgggtcctcgacggctctgtgcggcagagccccagatggcagccacacggagtccagagggacccaggccctggaggaagcactgcctgaggcctggtgttgagaaaagtgtctgcatgtctgtgtctgtgtgtgtatcactgtatgtggctgtgtctctgtgtatgtgtgtctatttctgcatgtgtgtgtgtctgtgtgtgcgtgtgtatgcatgtgtgtctttgtagatgtgtacctctgagtgtgtatgtgtgtatcactgtatgcgtctgtgtgtctgtgtgtctgtgtatctgtgtctggctgtgtgtgtctatctctgtgtgtgtcttgtgtgcgtgtctatgtgtgtgtctgtcagtgtgtctgtgtctgtgtcta

SEQ ID NO: 43240 - DNA, 2300 bp, Homo sapien
acacataagtcagacgtgccacttcccatccacccctgcttaaacctccaacagccaccaccccccattcattcattcacaatgtttattcagtgtctgtatgtgccagccattgtgtaagcgctgaagagacggatacactggcaggtaaaacagacagaaatccctgccctcatggacctcctggggtgatggacaataagcagggtaaataagtgtattggtggtcacttactgcagagtgacaggttaccccaaatgcagctgcttaaccagcaggcatgcattatctcccagtgtcagccaggcaggactctgggcctttgacacaaagtttcaggaggctgtggtcaagctgccggccgatgatgtggtctcatgggaaggctcagctggggcgtcagcttcccggttcccttgctggccatggtcatccccttagggctgcctcatgtcacacccagcaattcaagagcaattttgtcctattctagttgccagaagcaagtcattaataaagtccagcccaaggggaggggagtgcagaaaagtctaaacccaggagggtataacagggagctagctgccagaataaagcaagccaaagtgtactttctacagtgagaagtgtgaaaaatagggaaatgacaggagagagggatgtgagagctgggcagcatgctgcaatgtcagaacaacaccagggaaggtctcactaaagtgacttttgagtaaagacctgaaggaagcatgtgagtctggggaaaggatgtgccaggcagaaacagcagcatgtgcagaggcccagggggcaggagccaggactgggagtgaactgggaagcaggaggaggtgaggcaggcttgctgtgggagcactccgatatggaagcgtagcttacagacccactggccctccccacagcaccatgctgccaacctggccttcttgccgagccttgaacagaaccattatttatgtggccaggcctccgcctgggatctccctgtccctggtgggagccatcctcttcctcctgccctcatagcacccgctgcagtttctcctggcgcttggccctgcctgagagtgtggtgtctctcctattggatcctagaagctccagggagtcagagaccttgtctgttgatcgatatccaggcctaggacaacaggcacgtaggaggagctggaggaataccatgcgcgggacagagagcgcagaagccttcttccctggagatcgctctgtactgtgacttctttttttgtttgtttgagacagagtctcgctctgttgcccaggctggaatgcagtggcgcgatctcggctcactgcaacctccacctccctggttcaagcaattcccctgcctcacaggcgtgcgccaccacacctggctaatttttttgtatttttagtagagacggggtttcaccatgttggccagactggtctcgaactcctgacctcaggcaatctgcccgcctcggcctcccaaagtgctgggattacaggcgtgagtcaccttgccggaccaaccgtaacttcttacgattagagttaggaagcttccggtttgtgtgtgaagacgatggaagggcggggctccaggatgtatccgcagagccacggagggaacctggactcggctggacttggagccggggcgggggcgggagggggcgaggttcgagtggggctgctcgcgggcgcgagggccagagcccgggatcgcgccgtggagcccacgaccggcgaggccagcgctgggggcagggcctctggatccctgacccaggacgccctgctccggcccgccccgcgcactaaactcggcctctagtcgcctgaagcccgcgcgggtaccgggtccgcgcggcccggcctgtgcctttagccccgccccgaatccccccaccctcataaccccgcccctaaccccgcctccacacacagaccccgcccccaaccagactccgccccgcgcaagctccctaagcccgcgactggcctgcacccggctccggaagtcgttcttccgcgcaggagccctgagcccgcacagccccgcccctcccggcgcccaagccccgccccgccgggttcccgctcgcccggcgccatggatccgctgtcgccgccgctctgcacgctgccgccgggccccgagccgccccgcttcgtgtgctactgcgaaggggaggaaagcggggagggggaccgcggcggcttcaacctctagtgagtgggggtccgcggggaggtaggggtgcagggagctccgcgggcggccccg

SEQ ID NO: 43241 - DNA, 2300 bp, Homo sapien
gggttaggactccagcctaagaatttaaatttaaggggacacaagccacgccatttacctaatctcaggccctccctgcagtgggcatgcatggagtcaccttttccgtccttctccctggacacaactggagtctcccatagacagggtggtggccgtgccacggagccacgccacgccacgccacgccacgcagtggggcagccagcactcacttgcccttcacagggaaaccggccgggtgtggcagctcgcgcctgtagttccagcactgtgggagaccaaggcaggtgggtcacttgagcccatgaggtggagaccagcctgggcaacatggcaggaccctgtttctagtaaataaatgaattgattaaaccataaaaaaaaaaggaagccaccgggctgattcccaggtggcgagggcacaggggggtgttggatggccactgccgctccacagtccacagcccacgcccacagaacgcagtggggccgctgcagcggtgaaccgagtcttgttggtttgtttcttgagacgggcgtgaggtgaatggtcttcctgtgtcttgttttctttttccttctgagccaccggttcacggcctctgtccgtgccgtcatttttcctgtgggtttgtgagggtgcgtctgtcggtgttaaagacacaggatgccggggcagcagagggggctgggggcctggggcttctctgtggttggccatttgcctgccagggatgtgggaaaccagcaagcggagctataaccacagtgtccagaaagagctgaaatactagggcttggaatcgaggtggaggccggatggagggaaattgaggttcaggacaccaaaggatggggcagccacatggtatttccaaggctctgtgtccaggagccccgactggcgtggtatccagagaagcatcaggctgggctgactggggcagcactggagtgtgttccaccggggacggatgaggggcccgtaccaaggccctggggagaaggtgagcaggagagcagtgccacctcagctgccctgtccaggctggtgaggcaccacaccgcctgggggaggtgtggccaggccaatcctgtgggcaccccaggtctctgggtggaatctcccctcggtgtacctccctggggctgcaccctaaagcgtcagggccaggtgggaggaaggcacagttggcgaccccaaagggccagactgaactgtgggttccaatcacgccaggaggctcagcgcaggctcacacctgtggaccaccaccctcccctggcctctttcttccagccacgcaggctgtggcttctaacccctctcctgctgcttctttttaaaggttaaggggttgggggtaagaaacctgcgctgagcgccagtgggagggatgggaggtggggtggagacctgcactgccggccaaacaccaaagccaggctggcctccccgccctgttgcgggcaggtctggaatttgagccctgccctgagcggggagggccctgcctgactgctccgtagctgggaaggggcggctcccccaggtgggcttatcaccctcccgatgccctggtgctgcagatggggaactgaagccaggctgggcaggccatttctcctgctcacccacacccactggctttctgggctgggagccctgacaaggggtatttgcggaagggagagccatagggcagggtctgagctgggttcacggtggaggtggtcctgacccagagccgcccccttcccaggtgacaccccctgcacccttctggcctgtaggctctccctatgccctgccccctggtctccacccaccacgctggctcccagcacactcagtaccgggtgggcggatctccgtgcacaccagactcaagtccagggcagccccccacaccattccgccaccctgaggtcacaccctcaggctcagacaccccggggccgggctggcgttgctcaggcagctggttctgcgcgctgggcagcttcatctgcccgcctaggtggctccacggggcgggcccctcggccagggagggcggggcgcacagggagacttaaagagctccccaggtccccacccgcgcctgaccgcggcagctcccaccatggcggagaccaagctccagctgtttgtcaaggtgcagggcggactcagctgcggggagggtgtctgggaggaagcgcttttctgggctttgctttctgtggcaggctgtggggtgggcctcccagtaatgtctgagccccttcctgtgggtggctagggggactcaggc

SEQ ID NO: 43242 - DNA, 2300 bp, Homo sapien
atcttggagaggctgggtcctcagcgtcaccccctgggcccaggatacctgctggggcctggttcttcctctccaatgcccatatcttgacccagttgggttcccattgggggtccctcctcccagcccctgagtgaattccttcctgctcccacgtcccccacagagccagggctggcatccagccccccaggtcgggccccgctgagcagctgctccgagctccaggtgtcccagttcatccgcaagcatgtggcctcctgcctgctggtctcagacacaagcacggagctctcctacatcctgcccagcgaggccgccaagaagggggctttcgagcgcctcttccaggtgtgagggcgcacgggtcggggggcagttgcaggtggtggaggtgggcgcactcctgcctgggcgtccctgccgcagcctccccctccaccgcccctgcagcacctggagcgcagcctggatgcactgcacctcagcagcttcgggctgatggacacgaccctggaggaagtgttcctcaaggtgtcggaggaggatcagtcgctggagaacagtgaggccggtgaggggcctggaccacttgctcagcccaccccacccacaaggccccagctcgggcctgcgctgtcactcctgcctggtgtctgggggcgccaccctggtcctgggtggaagccaggggacgccccggggttagcctgcggtcctaggtgggtggtcctggtggccagaggtcccggacaggtgtatgagcctgggaactggggtcaagaccggggatgggggtcctgggcaggcctaggggccagtagccctgagtgtcccctcggcccttccactgcggcagatgtgaaggagtccaggaaggatgtgctccctggggcggagggcccggcgtctggggagggtcacgctggcaatctggcccggtgctcggagctgacccagtcgcaggcatcgctgcagtcggcgtcatctgtgggctctgcccgtggcgacgagggagctggctacaccgacgtctatggcgactaccgccccctctttgataacccacaggacccagacaatgtcagcctgcaaggtgggggtggcagggtgaggctgggacagcaagggagggggagcagggttgcgggggagcggcatgagggcagccagtagggagagggtagcgtgcaaccacctgctcagcctctacctctctgcacagaggtggaggcagaggccctgtcgagggtcggccagggcagccgcaagctggacggcgggtggctgaaggtgcgccagttccacgggctgctggtcaaacgcttccactgcgcccgccgcaactccaaggcactcttctcccagatcttgctgccagccttcttcgtctgcgtggccatgaccgtggccctgtccgtcccggagattggtaggccaccggctggacaggggtgctgggcttgcctccccccaccgcccgctgggagccctgatgatgcccactcctgagcttcctgactctgggcctcaccccacacctgaggctgggcacgcaccggggttcatccgggagtcctgtctcctcgggtcccagaccccaggcgtggatcccttggggttgggggaaggggaccgaggcttgggggccgctggccagagggcagaacctgctcaggcctccctgctcgccctgccaggtgatctgcccccgctggtcctgtcaccttcccagtaccacaactacacccagccccgtggcaatttcatcccctacgccaacgaggagcgccgcgagtaccggtgaggcctccagcgggggcagccttggtgggtggggcgagtgaaggggcggggacagccttggtgggccaggcgggcgagggggcggggctggcgaggggcggagactggcagccccacctcacactgtcggtgcccgcaggctgcggctatcgcccgacgccagcccccagcagctcgtgagcacgttccggctgccgtcgggggtgggtgccacctgcgtgctcaagtctcccgccaacggctcgctggggcccacgttgaacctgagcagcggggagtcgcgcctgctggcggctcggttcttcgacagcatgtgtctggagtccttcacacaggggctgccactgtccaatttcgtgccacccccaccctcgcccgccccatctgactcgccagcgtccccggatgaggacctgcaggcctggaacgtctccctgccgcccaccgctgggccaggtagtggttcagggggcctgctgggggggcaggggcag

SEQ ID NO: 43243 - DNA, 2300 bp, Homo sapien
agaggggccctgccctccctagcccgagggcgagcacccagctcggaggcatcctttgtcctcatccccatcccaaaacccttcagagcccccagtgtgctgtgtggcccgggccgagtccccggtccctggggtgggggcggctgctgtgtttactgtgcttggacaatagggctttgtggccaggaacatcatgctgtgggtgtcccatgcccgccccagcccgtgccagcctccacccgctccctgagccaggacggagcccagggttcgccaaggcactgtgggcaccaacaggcaccagggcgagggtggctgcaggagtgaggcaatgtcagaggcaggggtcacagcacggggcgccagccccgcccacacccggcctgctatgggcactgtaactgcagcaacaggcccggctgcctcccccattgctatagcaacggcctcgcacgagctactgggaggaggaggagagtcctggctggcaggcggcgggcgccacagcagcatctggttacaggcggcagcacaggtctagcacgccctgggtgccccacacaggtgcctccaggtggcccaacctccgtccctcgagaccagcccagtgccttcacatcgcctggaggcctagatgccttctctgggcatgacccctccctgtagctcccgcctactgtgtcggggggagaacaggtgagacccgagggtggcgctgccatctgccatcccagtgacttcatgacagtgaccctgtccctgcaccaagagcagcctgtagcccaagggtagacccaagtccagctaactaagaggagataggccacactcacagacagggaaactgaggcaaagagcttggaggagcctgctagcagcacagaggtccttggcacccaccctccagaccctgagctctgcccagggtggagctctgcccagggtgcacccctgccccagcagggcgcatggcacacagggcaaacctctgtcatccaagcttggccccaagagtccagctctgatgtccaagatccttcccaggaaagtggggacccagcaggagtgtgcccagtgtccagccagccccagccccacatcacaagcctggcaaggactcagcctccctgggggaaacagttccccacctgctccagccatgggctaaggacctccactgtggcccagtgggcctctgggagccctgtagggtggggacccaaaaaggtcctggggggcagcccaaaccagcagctgggagtcactcttgcggtcaggacagtgcacacctcccacctgcttgccagctgccctcataggccacactcccttccctgagcattgtccccactggaacaggggccaccattccagcctctgctcccaagcccagtggggaccttcctgacaaccacccccggggactaatactaatgcatgccacatgccacatccctgttcccttggccctgctctgctgtccccagtgactcaatgccaggggctgcaggcctgatccatgggaccccactcagccagctccaggtgcctggccagggcatgtacctaacccaggctccccgccaaggccaggtgcccaggggaattctgccagccatggtgatgatggccaccccagctgactgcagcctgggtttcctgcagtgcatgttgaaagataaacaggcacggactggtgcagcccaaggggtcccgcccgggccctggctgggcaagaggatgtctgccttaggcccccacctgctctgagccctggcctggacaatcccaagggccttcagaaacctaagctggtccaggcctgtggcctgggaggtgtcccttcccttcccaggctggagccaagctggccagctgggggtatggcaggacacccatatccccaagcccctcgctccacgaaggacttctgtccctgacagccatgtgtcctgcaccctcaggtccactggctgcccaggcagtgctgggaaagccggggttcacagctccaaacagtagacccagcccccagagcaggtggggggaccaggaggcaacagagtggatcaggctcggggagaactgaccccaaaggacaaatgggtgcagagattcaggctggccaaggctggcacaaggacattcccagtggcgagagcatgagcaagggtcacggatgtgccaggaggggaggcggagagatgcctgggaccaacctctatggcaggccgcggcccaagggcaggggaggggtggacggagggaagggacagggtctcctccgggaccccagggag

SEQ ID NO: 43244 - DNA, 2300 bp, Homo sapien
gcctgaagtttgtgggggccaaacctgggaccccgagcttcctcggtagcagaggccctgtggtccccgagacacaggcacgggtccctgccacgtccatagttctgaggtccctgtgtgtaggctggggcggggcccaggagaccacggggagcaaaccagcttgttctgggctcagggagggagggcggtggacaataaacatctgagcagtgcctcgtgggtctggccagtgtctcatgggtcacctccgtgcagggccacagagcctgcatctgccctcccctgacatgtcgcccccacggccatggggctgcttgttccccacggggggtcctgtcgcctgacttctgggcctttgctcaccctccgcctgagagccctccctgtgccgggctgcccactggctaccccagttcctacagcctccgccagacggccccttatcagagagccttctgtgtcccccaaaaggccaaggcgatgagcccaggagttcgagaccagcctgggcagtgtagtgaaatctcatctctaccaaaaatacaagaattagcagggcgtggtggctcacgcttgtggtctcagctacttgggatactgaggtgagaggatggcttgagcccaggaggttgaagcttcagtgagccgtgatcacaccacagcactccagcctgggcaacagaatgagaccctgtctcaaaacaaaaaccaaaacaggccaaggttggggaagagtagggaacggacgtcagaggcctggccaggctgaaatcgcccatctcccaggcccgcaggctggagggtgtctggggtgacagggtctgacctgtgccttgtagctccctctggtggccagtgctggggaggcactggggatgcggctgcagccagggagcccctgtagtggacggtggagagtggggcgaggaggagagaggccaacccacgggtggtgctgaccagggccccaacaggctaagcccccggggctggggcacagggcttgtccctaccccaggtaggggtgggcaggttgagggcaggaagcccccctcacccatggctgtggcttgtgggaaagacctgctggtagcttcctgccctgacccagccctgtggactgagcagagaaaagcaagtgccttgaggctgcgggctggggtgggaagctgatccctcactcactagcccagggtcaccttcctgctgcaaaggagctgggaggagtggggagctgtggcctcggaggtcttcattcacttgaggatgcgccttctatgtgcgccctgacactggacaccacacagcgctactccaccccattcacaggggggaaactgagtctgggaagcgccgtcagagccacccatggggtcagcctgtcctctgtcgctctctacaggccacgcggaggaactgccccacctcccggggcgccccagcaggtgccaagccacagccgcagaaccgcctgatcccgaactccctgtgcagagaccagactcgcccgaatatggggagaaaaacgagccgcgtgcagcaggggccgcctcggtcccctgcctgctccgctcacggcgagcgttcctggggcctcgagtttccccccttccgctggctgctcggaatcgcgggacggacccacctggccgccctgcctcccttccaggtgggcaccacctggactccaagtgctggtttacaaagcacacaggagacccttacgggggtgagctggcccctcgccagcgtccgctcggcgcgccccggggacagtgaaggcttggggcgcctctgcagagtcgccagcgcggtgggcgcagccggatgcctctgggagaagagcgcagcgcccgagggtcccccggcctacgaaggctaagccggggtctcggattcgatgtgggcgcgtcgcgtgacgcccggcgaggggcggcccggaggcttcccggcggcggcgcgcgcagggtctcgggcccgggtcggtcccgggcgcggcgcgggcggcgggcgcctcctggcgggcgcggacggagcgcggcgcctttaagcgggggcgggcggggcgcgggcagagtcgctgtcgccgcggccgccggggcggagccagcgcggatcgggtcccggacgcccgagcgccccgcccccgcgcgggcgatgcccagcggcgcggcgggctgcggggcccggcggggcgcgcagaggagcgggccgcggcgctgaggcggcggagcgtggccccgccatgggcttcctgcaccagctgcagctgctgctctggaagaacgtgacgctca

SEQ ID NO: 43245 - DNA, 2300 bp, Homo sapien
gaaattctggcgcaacgcactggtggctggcactgtgccagtggtgctggggcccccacgggccacctatgaggccttcgtgccggctgacgccttcgtgcatgtggatgactttggctcagcccgagagctggcggctttcctcactggcatgaatgagagccgataccaacgcttctttgcctggcgtgacaggctccgcgtgcgactgttcaccgactggcgggaacgtttctgtgccatctgtgaccgctacccacacctaccccgcagccaagtctatgaggaccttgagggttggtttcaggcctgagatccgctggccgggggaggtgggtgtgggtggaagggctgggtgtcgaaatcaaaccaccaggcatccggcccttaccggcaagcagcgggctaacgggaggctgggcacagaggtcaggaagcaggggtggggggtgcaggtgggcactggagcatgcagaggaggtgagagtgggagggaggtaacgggtgcctgctgcggcagacgggaggggaaaggctgccgaggaccctccccaccctgaacaaatcttgggtgggtgaaggcctggctggaagagggtgaaaggcagggcccttggggctggggggcaccccagcctgaagtttgtgggggccaaacctgggaccccgagcttcctcggtagcagaggccctgtggtccccgagacacaggcacgggtccctgccacgtccatagttctgaggtccctgtgtgtaggctggggcggggcccaggagaccacggggagcaaaccagcttgttctgggctcagggagggagggcggtggacaataaacatctgagcagtgcctcgtgggtctggccagtgtctcatgggtcacctccgtgcagggccacagagcctgcatctgccctcccctgacatgtcgcccccacggccatggggctgcttgttccccacggggggtcctgtcgcctgacttctgggcctttgctcaccctccgcctgagagccctccctgtgccgggctgcccactggctaccccagttcctacagcctccgccagacggccccttatcagagagccttctgtgtcccccaaaaggccaaggcgatgagcccaggagttcgagaccagcctgggcagtgtagtgaaatctcatctctaccaaaaatacaagaattagcagggcgtggtggctcacgcttgtggtctcagctacttgggatactgaggtgagaggatggcttgagcccaggaggttgaagcttcagtgagccgtgatcacaccacagcactccagcctgggcaacagaatgagaccctgtctcaaaacaaaaaccaaaacaggccaaggttggggaagagtagggaacggacgtcagaggcctggccaggctgaaatcgcccatctcccaggcccgcaggctggagggtgtctggggtgacagggtctgacctgtgccttgtagctccctctggtggccagtgctggggaggcactggggatgcggctgcagccagggagcccctgtagtggacggtggagagtggggcgaggaggagagaggccaacccacgggtggtgctgaccagggccccaacaggctaagcccccggggctggggcacagggcttgtccctaccccaggtaggggtgggcaggttgagggcaggaagcccccctcacccatggctgtggcttgtgggaaagacctgctggtagcttcctgccctgacccagccctgtggactgagcagagaaaagcaagtgccttgaggctgcgggctggggtgggaagctgatccctcactcactagcccagggtcaccttcctgctgcaaaggagctgggaggagtggggagctgtggcctcggaggtcttcattcacttgaggatgcgccttctatgtgcgccctgacactggacaccacacagcgctactccaccccattcacaggggggaaactgagtctgggaagcgccgtcagagccacccatggggtcagcctgtcctctgtcgctctctacaggccacgcggaggaactgccccacctcccggggcgccccagcaggtgccaagccacagccgcagaaccgcctgatcccgaactccctgtgcagagaccagactcgcccgaatatggggagaaaaacgagccgcgtgcagcaggggccgcctcggtcccctgcctgctccgctcacggcgagcgttcctggggcctcgagtttccccccttccgctggctgctcggaatcgcgggacggacccacctggccgccctgcctccc

SEQ ID NO: 43246 - DNA, 2300 bp, Homo sapien
ccacggtgggcaccaggcagctggcgcacagtggccgtccattggcacggccaaagacatccacccgcagatgaggcgccagctgccggtacagcctggcacgcagctgccgctcctggaagttgctgaccacccaggcggccaccctgctcttggctggcagcggtggcgagggcccccagtggggctccaggcggccatagggcacaaagatgtccgagtcgcgccggtagctcagcacccagttgaagatgcctcggaggtggctgaggccgtgggtgtggctaggagactccatggaggcccacacccagggctgccctcgcggccgctgggccaggggcaggtgggaccgccgggtctgcagctcgcggtggtggaagaccacggcgtcggcgctggccagcaggcttcggttggcactcaggtggcagcgggcgatgccgtagcgggtgcaggtgtcgctgggcagctctgggggctggtcagtgaagggccagtgccagacaaggatggtgatcgtgggctggggtgccggggtaccccgaggggctgaccccagcagccacaggagccagagggcagcgagcagagccaccccggccaggacccccaagcctcgcagcctccgggtggggccgtgccctgcagcagcacgagggaggggaggctctgtcacttgggctcagggacatccacacgccccactcagcgccaaccccgtcctcccctcccatgggctcagggacacccacatgccccactcagcgccacccccgtcctcccctcccatgggctcagggacaccgacatgccccactcagcgccacccccgtcctcccctcccaggttgcctagctgtccccagcttgggcctccccgagggccagacactcaccagcattattcatccacagtctcccaggatcagtcagccaagagacccgagattctcaaatcacggcagccgccagaggtgcccctgaaatcacagctacgccctagctcagccccgcctggaactgtgctccttttatctctgcccaaggtgagggaactcaggggaccttcctgctcctgccccgcccctgcccccacaacctttggcatcaaccactgtccccacccccatctcggggacttgctagtcctggggctgctgggaggggtacagccacaagagggatgccaagccagggcaatatgacgcccccacagcccaccccactggtctccagagaggcccagagatgtccagctgggcaggcagaggacagagaggctcgggcaggcttggcccagggcagagaaggcccaggtgcaggcaccctgagcacagatggccccccagcccccacccagctacccaggcctgggcgctgcagacagcgagtgcacttccccagagggccaggtggctcctcccacggcagtatcacccacttcccccagctcaccaccagctgggccctggtctcccaggagaatcttacacattgaagatgtactgtgctcagctctttgccggaagctaaagctcccaattgggccatcccaccccactctgccacctctgccatctaggaacccagatgcccggagaggaggtctgtcctggggcccttagtgtcttcccacaggagcccagcgcgtgcctgcaagggcctggtcccggaatgaactgtggatggaggctgctttgtccttttccccgtccagatccatgcccatagacaccgctgactataggctgggcccagggtcccttcctccagcctgcagcagaggggctttccaggctggaaagggaaggagtccttttgtccctgacgcaagcgggttgggggccagcacccgctccaggaagaggaagggatccagcctgaagtccagactccccgctccctctaagccagggcctggagcctggaggccaggttccttcttctacaccagcccacgttgggtgccagccaggctgggatggccctgcggggtcaccctgagccccagccaaccaacaccccactctcagccacagtgggaggccccatcagcctcttcacccaaccacgttgccactctgctgcacgggaccttgtgtggtcccaggcgtggccagacccagacgtcctggagatctcaatgcaggtcaggcttggtttgtttgtttgtttgtttgtttgttttttgagagggagtcttgcactatcgcccaggctgtaatcccagcattttgggaggccaaggcttgtggatcacctgaagtcaggatcaagtggtgcgatcttggctcactg

SEQ ID NO: 43247 - DNA, 2300 bp, Homo sapien
aggcagccttgtcctcactgtggggccggggagaggccagcagcccctggggcccaaaagtagaacaggacagggacaggggtggtgggaggcaggccccctctgagggtgctggggcaaaggtctggacaacagttcatggttgccattcctcccaggacacacgatctgagcccccaaaagacctgacaggacagacgcgtcctcattcccagcatcccagcattttgggaggccgaggtgggaggactgcttgagccaggagtttgaaactagcctggacaacataacaagactctgcctctacaaaaaattttaaaaaattaaccaggcatggtagtgcacacccatagacccagctccttgggaggctgaggtgggagcattgcttgagcccaggaggttgaggctgcagcaaaccgtgactgcgccactgcactccagcctgggcaacagagcaagaccctgtctcaaaaaacaaaaaacaaaaacccacacacaaaaaagcaaacttggctgggcgcggtggctcatgcctgtaatcccaacactttgggaggctgaaacttgtggatcacctgaagtcaggagtttgagaccagcctggccaacatgggaaaaccccatctctactaaaaatacaaaaattagctgggcgtggtggcaggcacccataatcccagctacttgggaggctgagacaggagaatcacttgaacccggaaggtggaggttgcagtgagccaagatcgcaccacttgatcctgacttcaggtgatccacaagccttggcctcccaaaatgctgggattacagcctgggcgatagtgcaagactccctctcaaaaaacaaacaaacaaacaaacaaacaaaccaagcctgacctgcattgagatctccaggacgtctgggtctggccacgcctgggaccacacaaggtcccgtgcagcagagtggcaacgtggttgggtgaagaggctgatggggcctcccactgtggctgagagtggggtgttggttggctggggctcagggtgaccccgcagggccatcccagcctggctggcacccaacgtgggctggtgtagaagaaggaacctggcctccaggctccaggccctggcttagagggagcggggagtctggacttcaggctggatcccttcctcttcctggagcgggtgctggcccccaacccgcttgcgtcagggacaaaaggactccttccctttccagcctggaaagcccctctgctgcaggctggaggaagggaccctgggcccagcctatagtcagcggtgtctatgggcatggatctggacggggaaaaggacaaagcagcctccatccacagttcattccgggaccaggcccttgcaggcacgcgctgggctcctgtgggaagacactaagggccccaggacagacctcctctccgggcatctgggttcctagatggcagaggtggcagagtggggtgggatggcccaattgggagctttagcttccggcaaagagctgagcacagtacatcttcaatgtgtaagattctcctgggagaccagggcccagctggtggtgagctgggggaagtgggtgatactgccgtgggaggagccacctggccctctggggaagtgcactcgctgtctgcagcgcccaggcctgggtagctgggtgggggctggggggccatctgtgctcagggtgcctgcacctgggccttctctgccctgggccaagcctgcccgagcctctctgtcctctgcctgcccagctggacatctctgggcctctctggagaccagtggggtgggctgtgggggcgtcatattgccctggcttggcatccctcttgtggctgtacccctcccagcagccccaggactagcaagtccccgagatgggggtggggacagtggttgatgccaaaggttgtgggggcaggggcggggcaggagcaggaaggtcccctgagttccctcaccttgggcagagataaaaggagcacagttccaggcggggctgagctagggcgtagctgtgatttcaggggcacctctggcggctgccgtgatttgagaatctcgggtctcttggctgactgatcctgggagactgtggatgaataatgctggtgagtgtctggccctcggggaggcccaagctggggacagctaggcaacctgggaggggaggacgggggtggcgctgagtggggcatgtcggtgtccctgagcccatgggaggggaggacgggggtggcgctgagtggggcatgtgggtgtccctgagccca

SEQ ID NO: 43248 - DNA, 2300 bp, Homo sapien
cacacaccacggagctggggttggctgcctgcctgggtccgcacaaacccagggagtcaggaggcctgggtggggtgagatgagggggagcccctgccccccgactttctctttgactcatgcccttttctttcctctgagaggctttcgttctgacccatttctgggcaaaacccccgagccccgtttgccagctcgcaggttcccacgcacgattgggccccatggcagccaccctgcccagggtcctcaaggagcaagctaggggcggagggtgggggaggctccttcaaatccacccagggagggagcaggctgtggctgcggctgaggtcggtggcaagggaccctgccagcctggcagcacaaacaggaaggatggcaggctctggcaccagaggccgggtcacccgcaggcgtggcaggacagcctccttcctgcaggaactgccgccgggtgtctgtttcaaggagaagagatggggtggtgtgaggctgaagccaaggtgtggctccccgggggccccctgccagaggaggaacgctggggtgggattaaaggcccaggtgccactgtggtcatcaccgaaaacatgggaggctggaaaggcggggctggaggcagctgcccactctggtgccagcccctaagccaagcagctcaggcactgacagtttcccgtggcgcccacaggcacccctccctccaaacccccctccctccaagctcccctccaagctcccctccctccagccccctccctccaaacccccctctctccagcccccctcccaagccccctccctccaagtccccctccctccagcccccctccctccagccgttgcacaagttccgcagcaaagctcagctcagaggctacactgcgccacaggggtgggggcctctgactaccaccctgtcccagtcttgcctctgtccccacagtgggatcctcccacttcagtctccagctgcctggttcccctcccaaggcagccttgtcctcactgtggggccggggagaggccagcagcccctggggcccaaaagtagaacaggacagggacaggggtggtgggaggcaggccccctctgagggtgctggggcaaaggtctggacaacagttcatggttgccattcctcccaggacacacgatctgagcccccaaaagacctgacaggacagacgcgtcctcattcccagcatcccagcattttgggaggccgaggtgggaggactgcttgagccaggagtttgaaactagcctggacaacataacaagactctgcctctacaaaaaattttaaaaaattaaccaggcatggtagtgcacacccatagacccagctccttgggaggctgaggtgggagcattgcttgagcccaggaggttgaggctgcagcaaaccgtgactgcgccactgcactccagcctgggcaacagagcaagaccctgtctcaaaaaacaaaaaacaaaaacccacacacaaaaaagcaaacttggctgggcgcggtggctcatgcctgtaatcccaacactttgggaggctgaaacttgtggatcacctgaagtcaggagtttgagaccagcctggccaacatgggaaaaccccatctctactaaaaatacaaaaattagctgggcgtggtggcaggcacccataatcccagctacttgggaggctgagacaggagaatcacttgaacccggaaggtggaggttgcagtgagccaagatcgcaccacttgatcctgacttcaggtgatccacaagccttggcctcccaaaatgctgggattacagcctgggcgatagtgcaagactccctctcaaaaaacaaacaaacaaacaaacaaacaaaccaagcctgacctgcattgagatctccaggacgtctgggtctggccacgcctgggaccacacaaggtcccgtgcagcagagtggcaacgtggttgggtgaagaggctgatggggcctcccactgtggctgagagtggggtgttggttggctggggctcagggtgaccccgcagggccatcccagcctggctggcacccaacgtgggctggtgtagaagaaggaacctggcctccaggctccaggccctggcttagagggagcggggagtctggacttcaggctggatcccttcctcttcctggagcgggtgctggcccccaacccgcttgcgtcagggacaaaaggactccttccctttccagcctggaaagcccctctgctgcaggctggaggaagggaccctgggcccagcctatagtcagcggtgtcta

SEQ ID NO: 43249 - DNA, 2300 bp, Homo sapien
cggcgcctccatcccggatccttgctgcagcgtcagcgccgccgcccgtgcctttcctcttcctcctcctcctccttggcatccgcctcttcttcctcctgcgtcctcccccgctgcctccgctgctcccgacgcggagcccggagcccgcgccgagcccctggcctcgcggtgccatgctgccccggcggcggcgctgaaggatggcgacgccgctgcctccgccctccccgcggcacctgcggctgctgcggctgctgctctccggcctcgtcctcggcgccgccctgcgtggagccgccgccggccacccgggtgagcgagcgcgctgggcgcaggccgcggggcgccccggggccgggatcgccgggcggggaccgggttgccgggcgccgccgccctcgtcctgcccaggcccgcaggccctgcaggcctggtccgctggtggcgggggccccgcctcgcccacgatggaataaacaggcctggccggagggcgcagcgcggagcctccaaaaggccgcgccggatggggcttctgccggttcccagaggcgtaccttacattcatggcttcttccgccgggagcgcgtctggctcaggcctccgcgccgcggccatctggctctgggcgggcccgccgggagtctgcctgtgtgcgtctctgtgtctccgtgttcggggctcctgcgggtgtggggctggccctgagtgcccgccggcttcgctgccggtgcgcgtcccggggtcggggcctcagtgctgctctgcctgtcctcacgccttgggtggcgctgggcaccggccttgtgcgccatggtgggcgctgaagttctgggggcacttatggcgcaggctcggggtgctgttctagcttcaataggagggagactgttgcagcctcagagcctccgcctgcatcccctgccctcgagggcactggcattctgtctttgggactgagggctgcaggtggactccggaggagggtgataagcccagggtcctgggacaccctctcacctgcacagatgggtcctgagggtccagagagcagagctccctgcaggaacccaggatgcaaagctgacgtttttctggggggactgaactgggagactttgcgactgcattcgtacagtactcctggcagccctgcagaagaggtgctgtgagcccgttttacaggcaaggaatccgaggcatggagaagttaagtggattgtggcacagctgaggcgctgtcctgggcagcctggttctgtgtgtgtggcctcaaggggccagagtgaggccggcttcctcctgggctcagtgcccctggatgggaggtgggcatgaacaggagaggcttccgagaatcagagtgtgctcagccaggaaaggcggaggccacctattcaggaaacggggctgcagctgctgtgctgagcccgggtgggtggcaggtgccagtcctcagttcaccggcctctgcagcttcgtgtctgcctcaccgggagacctggcagggccctccctaggcaactcctcccattcccagtgcccagtgcttggaagggagggccctcaggcagcccagacgttggcgggtggaggggggtgtgccagccaccgtccagctgctcttgttcctgcgacctcttttcaggaggaggaagtgggggatggaggctcctgggctggggaaaagggctaggaggggcctggaacccagaccctagagccagctttgtacctcaggcccctgcctttggcgtggtggacggtggggtatcagcacaggagcggggactgcctcactccccaggtgccaagttggcgggtgggcccaggtggacctgctggcacaggtttaatgtttaacgtgcccaagtcccggcccactgatactggaggctgctgccccaggttgtggagggtgtgcggtgcctggcgttggctcctgtgcccacctgccactgcggctgctggaactgccttgaaggaaggcggacagcctgagggccctgagtgtcaggttaccaaggaaaccaaaccagccaaccaaggtctggagaaggatgatgccccgtgtggcccccgtggccctgcctgcagtgtgcagtgtggggctgggcagagaggaagagtcctggttagccagaggtgccaccgcagactccccaggcagggttgatggccctgctggggttcccctggctccactggcttgctgtgactggggacattccttagctttgaggcaactcagctatatcccagaggggaaactgaggcagagggccattgccccctc

SEQ ID NO: 43250 - DNA, 2300 bp, Homo sapien
tcactgcaggccccgtgctcctcctcctcctcctcagggctgggtctccagagagtggggccttggtcctgagaatcagcccttagaggctccttctgtgtagtctgggtctgtactggggagggtcacagcccacgggctggcagccagcccagcacctacttgtaaaaattttgtaataaaaagtttttcctagagacgtgaaaggagagtgtctgtggggtggggcatccttgctgtggcctgtgcccccaccttcccgctgttctagccgcacgggcctgcccttggtcctgagggtggacaccatccctccctactgccttctgctctggagccaggcctggggcactggctgctgccctggtgtgccgtggcagcctagagtagctgcaggatggctggcccgagggaatgttcctgggcccttgagtcttctctggccagcagagttccccaaaaccatcacatccagatctgcgttggtgaccaaggccagactgaaggttgggtcctggtacagtgagcctgggggtgagggtagaggtcagggaggtggcggagagtgggtggcagccagccaggcggcttcctagggggcagtcagtgctggtagagactggcgggagggcaggcccacatcaggaggtggcacaggggtgggagatgagatcaggaccaggacccataggcaggaatcttgcacagaacctggctgtggagctgagccatgcaatggcacagggcaccttgcccttctcacctgggactgagtgtcctgcacctccaaaaggcatcctgcagccccagccaggccctgcagcccctccccaagccagttttctccaggatgggaaggcctggtcttgcccactcgcctcctcaccttcctgggaagtgagcttagacactgtctctatgctcagtgccctggcgaggagggtggtggttcttattctgctcttccctcccctcttcaccatttttttttaaagtcatttgataaacctgagggcagccagccccagctttggagttctgagactggaaggaccaaggggacaccccgggttggaggtctcactcttgttctctgaatgactagtcaaaggaggtttctagtgggatggggtgggcgtgctcttgggaggcaacaggtgaggtgcaaggggggcatcagagatgcccgttgtcagctgggcacagtggctcacgcctgtaatcccagcactttgggaggctgaggctggcgtatcacctgaggtcaggagttcaagaccagctgaggcaacatggtgaaaccccgtctgtactaagaatacaaaaattagcccagcatggtggcacgcgcctgtaatcccagctactcaggaggcagaggcacgagaatcacttgaacccgagaggtggaggttgcagtgggccgaaatggcaccactgcactccaggctaggcgacagagacgctgtctcaaagaaaaaaaaaaaaaaagatgcccattgtcctgagggagctaaagggctgtcacctggggaccctgaacaccttggacagctcccagctccggtcctcagtggctccggatcactcttgccccctggtggcctcactgagcgcggccgccgcggctccagccaaagctgcagtcggggccggggccgttctgtgttcctgtatttgcttttcccgcgagtgggggtgcccctgcctctgtgggcacacctgtgccttcctgtgcacctgcccagctcgtgagcacctgtctgcgtgcgcccggcgctcctgtgtctctgtgcgctcgcgaggctaggcccacacaggtcctctgccccatcgcgggtgcgggtgaggggctcggagtcctaccgggaagaggccagaagggagcgcatcctggagaagcccacccgcggcccaaacccagccggacttctgggaaccgcaccggccccagagaccgcaggtgccgagacaccctgaggccgagagaggtccagcgaggcccggagaggggaccagaactggagcagggggagggggcgcagtctggagccgccctcccgccccctcaggtggagcgcgcaggcgcagtctccgcgtgcgcgcctcgccggcgcctccatcccggatccttgctgcagcgtcagcgccgccgcccgtgcctttcctcttcctcctcctcctccttggcatccgcctcttcttcctcctgcgtcctcccccgctgcctccgctgctcccgacgcggagcccggagcccgcgccgagcccctggcctcgcggtgccatgctgccccggc

SEQ ID NO: 43251 - DNA, 2300 bp, Homo sapien
cccacctaggggctgcccgtgaggcataggctcatctctctgcctccctctaggtgggggcatctccagctatgcagacaacccttctggggccagccagagtcttgttggatgcctcgaacaggcgcttcaggatgtgcccaaagagagacacgcgggcacacccctctacctgggagccacagcgggtatgcgcctgctcaagtgagtgtgcctgtgccctggccctgtccccatgatggcctttggctgtgaccccttgcagggcggactccgagcacccctacagcaggctcacagccacctggggagaaggcctcttggagttctctgtgttttgcagcctgaccaatccagaggcctcgaccagtgtgctcatggcagtgactcacacactgacccagtacccctttgacttccggggtgcacgcatcctctcgggccaggaagagggggtgtttggctgggtgactgccaactacctgctggagaacttcatcaaggtgggcccagcagccagccaaagagccagggggcgtgggcgccctcggcccctggttgaccccacactcccctctccacagtacggctgggtgggccggtggttccggccacggaaggggacactgggggccatggacctggggggtgcctctacccagatcacttttgagacaaccagtccagctgaggacagagccagcgaggtccagctgcatctctacggccagcactaccgagtctacacccacagcttcctctgctatggccgtgaccaggtcctccagaggctgctggccagcgccctccaggtgcccctccaccctggctcacctgcactgcactgttccctcctggagcagagcctggacagccactgtgctgtggaaggcttctccaggctgggctttaattggctggaaagacaggtgggagggtcagagcatgagcaaaggcccagtggctgggctgggcctggagaagggagggccagggacggctctcagagggagcctggtcaggggcgttgggatctgtcaagcaggcagtggggagccatggattgcccctgagcacaaaagtgaagttgccagagtgagacctgtgggaggtttgtcaggctggtcctctggagcggtggtggtgccaccctgtcacgctggtgattcccccagacccacggcttccacccctgctggccgaggggcttttccacccaagtgctgctcggggatgtgtaccagtcaccatgcaccatggcccagcggccccagaacttcaacagcagtgccagggtcagcctgtcagggagcagtgacccccacctctgccgagatctggtttctgggctcttcagcttctcctcctgccccttctcccgatgctctttcaatggggtcttccagcccccagtggctgggaactttgtggtgagtaggggcaggcgggtggctgggaactttgtcgtgggtagggacaggcgggtggctgggaactttgtcgtgggtagggacaggcgggtggctgggaactttgtcgtgggtagggacaggcgggtggctgggaactttgtcgtgagtagggataggcgggtggctgggaactttgtcgtgggtaagggcaggcgggtggctgggaactttgtcgtgagtagggacaggcgggtggcagcaggtgctctgagccgctggggttcggtcacagtgtgactgcgccccctacaggccttctctgccttcttctacactgtggactttttgcggacttcgatggggctgcccgtggccaccctgcagcagctggaggcagccgcagtgaatgtctgcaaccagacctgggctcaggtgagccccgctcccactccttcagggctgtgcggaagggctcagcctccgcctccgcatgcctccccagccctgcatggacaggcctctcggagcacccgctgcagtgggggcgatggcaggcattaggctgactccagaggtggcgtggctgtggccggtaggctgtgaacaagtcgggcgggttggagaagcttcgccaggcccgaccctcatcccagatctggagggcagggggaggccggtgcccaggtttctggcttctgccactggttccctccatggtaccacacaagggaagatggaagtgggtctgggcaccgggagtgtgcccaccggagactccaagagaaacgtacgagtcgtcccaggaccggggtggtgagcgaggccccattttgtcctcccagggcctagtctcagacagactggggtgagggaggtggggacaggcgg

SEQ ID NO: 43252 - DNA, 2300 bp, Homo sapien
ggaggctccgagttccctcccccaggggttctcccctaacctctctgcatccgcatgttcccagctcagccggggtcatgtgcagcacatctggaggccccatccccgagagggtcctggaagccgagagctgccccacccagaggcccctccaccccttcagctcctgccagcttccctctgacgctctcccaagtctgccttccagggtccctgagtccatgccaggaaggggcgttcccccgccctcactccgtctcaaagagagctcagcctcagcctttgtcctggccgctctgggctccctgcctctccctccgcaggcgaagctgggcactcggccatgagcctgtctccccggggcagagtccagctcccctctccctccccatcctctcaggcctggcagacctcccactccctggcttgagctttttgtccatgaaaagagtccagaacaccaggaagccccgctgggcctggagggaagcggggtaccgcaggccagtgggggtcgcagcaccctgcctctgggcggcctttgttccttccttttcaggcatgatgtgcactgtgcgtgcctctccctcctctgggcggtcaggggtggaagaaaggcctggggtgtgtggggggaaactggggcctggggcctggagcttagcaccggcaacacccagagattgcctgctggagccccgccaggctgggctgtgaggctgaggcagcagagaggcttcccagggttcccacccctccctttggggtcctgagctggaagaaagatgcctttactgggcctgtggcgccagaccctcagcccaggcagcaatcccagcacaattgtcactgcccgttccagaaggccgggcatggtctggaccctgccccatggggctgccctttgggccccagcagcctgcactccctggtggccttgcctcgtggctccctgacgctgtgtggctggaattattgggacaagaattcccactttgcagcaggcgcaaagggggtggcccctggccgggctgggatgcggggcctgtgaggctgcagagccgaaaggccagccatgtcgtgggacggaggagcagggcttgcgtctggggccagctgcgcttcgcctgccccagccgtccccagaagcctgttgctgacccgcaccccaagcttggcctggggaccctcttccttgcctttcaggccacgtagaggccccacctgtttccgtcctggggaagcctcctctggcctccgcagcccaagcctctgttcccctcaggccgagggggcagcaggcgcggctgaggccctgggctgggaggtatggacctttggcccggtctgtgctgcttctcctgtttctcggctcggtgtgacctgggccgtccctccccttccccgttcctgcgtcctcaccttcacctcagtacagggcccaggtgaggtggatctgactgggcctcaagggtagttctggcctgggtcagctgcgtgtctctggagctgacctgcgctggctcagcgccgcaggctggcggatccttgctggccgggagggcatcccgcaggccagcctggtcctcaccagccctgggagttggcgctcagggccctgctccacaaacaggtgctgaccctcggcttcctcctgagtccccagcccgggccccgcgtggctccgcagccgacagtgcctcattcctgcaagcgagtctggcctcctttcccgggcccgggaaaagcgcggctctccagcacaggaccctccgagccagcctcgcccgcccacccccacgccaggtctcctgcctccacggccgggggatccccttgctgagtgggcgggaaggggaaggtgggccatagccgcggggcgcccgggctcagacccgggagccggggggcggtgctggtgactcagccgcgcccgcgtctctcacctgcgcgggccggacggcggaagcttgggagcggaggcgaaacctgtccgcccgtgggcgtggccggtgatgggcgggcccgcccggcctcccgcccctcgtcccgccccggggcccctaccccgcggtcccgcggccccgcccgcctccgcctccggctccccgcactctccgggtccacgcatcgtcctcccgcgcgcccgcccgcccatggccgggaaggtgcggtcactgctgccgccgctgctgctggccgccgcgggcctcgccggcctcctactgctgtgcgtccccacccgcgacgtccgggagccgcccgccctcaaggtgcgcgcccgggcacccagcgcacgt

SEQ ID NO: 43253 - DNA, 2300 bp, Homo sapien
ggtatgaaaagcccttgtttcatctgcacggtgggttcagttccatgcggggccatggctggcctggcctggacactgctggccacgctgtcctgagctgcagcagccttgctcactgctggccaccgactccacatccacactggcctcccctgccataccactgagctgttcccagcccttccccatcccttaggcctcagcctggcttggtgcccactcaaggatggtgtttcccatatgatttcactggatacggctccccagtgccattcacagagcacccactgtgggccaggccaatgccaggcctagaaggagccctgtcctgcttgcaaatagccagggccccctgggccaggagaaagctgtcccctgtgttttatctaactaggcttcagggggaaggggactggggccagagcagagttctgaaggatgtagtgcggtcagcctggagcagaggggaagggccttcctggtagaagagccaccaggcacaggggcctggaagtgagggagtgcagggaccccaggcctggcactggcggtgaggggtgtgctggaagcagggtaggtgtggggatgggggggcgggggcttgcgtgttgtgctggtttgttttgttttgttttgtttttgagacaagatctcgctctgtcacccaggatggagagcagtggctcaatcacagctcactgcagcctcaacctcttgggttcaagggatcctcccacctcagcctcccaaatacctgggaccacaggcatgcaccaccacgcctggctaattttttaaactttttgtagaaatagggttgccttatgttgcccaggctggtcttgaactccccagctcaagtgatcctcccgcctcggcctcgtgctgggtttttgagcagaccagccattaaaggggaagctggcttacaggaccaagctctgatgggctgctccaggctcagagcttcttatgtccttccagcattccctacgatgaaggagtcccacttagagtgagtgacccagaagagaagtggacccaggatactccctggcctgggaagatgcctctacagcttgagacacaggcaccagtggctcaggcctgaggacagagacccaggtaggtatgccagctgaggcctgcccaggagggagggtgggagacccgcagagggccaaggcaagtctcggattgggggcctgtctggggagggtgtttgcaccctgaacacctccctggaacctagagggtactactggccagccctgagatgggctcccagggctagaacccaggctaaggcctggtctcacctcccatgtggacagaccaaatgaagacagagtgaccagatcccagctggaaacacagcagaggcagggggacagggctgcgggagccaggagagcagctggaggaggtgtccagccaggggaaggaggagaggagagcaagaggcagagggagctggtcactagatggggatctggggacacaggagaaagtggctttgttctgcagcaggcaggccaggccagactgtcccgagggaccagaggaggagccagcagcagtggggacagaaaggcctctgtgagtgggaagcgcccagctggctggagcctacgatcctcttggggccctcctggtggaagagaagggggccgcagggtcacctgtgcttgcggccagggaactagaggggaaaagtgggatctttggagggggtgcccccccccattcttaccccacgaggctacctggagacaggtttttttgtagggtgccaggccccgccccttggagaggtggccggggcagccagccacagctggatccgagaaagcgcctggccgcggcaggaggtttggtggggctggggcggggcagaaaggaaggtctgcgaggccagagtggagcaggagctgggggatccggttccgcctgcccagggcctccgcgcgcctcccagggccactcggcaagaaaaaaaaaaaaaaaatcaaacctcctctcagcctatcagagagcagatgggacgggctcggccaatggccgcggcgcatgttaatgagggctgacgccgcgaggagggccccattcaaaagtagtcgctattgtcgccgtgggctgagctcgccgggccggcccctccgtggggccgcgctgggacgcacgcgggtggacgaggggaccgatcccgggcgcccatggccggggccgccatggccgagcggggccgcgtgcctccccccgcacccgcgcccagcacggaggggctgccgcgcgccttc

SEQ ID NO: 43254 - DNA, 2300 bp, Homo sapien
cagcatgatttgtttttctttttcggtttgtttgtttgttttttgagacagagcttcgcccttgttgcccaggctggagtgcaatggcgcgatcttggctcatggcaacctccgcctcccaggttcaagcgattctcctgcctcagcctctggagtagctgggattataagcatgcaacaccatgcttatatatttatatttatatttaatatttgtatctatttttagtagagacagggtttctccatgttagtcaggctggtctcaaaccccagacctcaggtgatccgcccgccttggcctcccaaagtgctgggattacagaagtgagccactgcgcccggttttttttttttttttttttttgagacagagtttcgctctgtcacccaggctggagtgcagtggtgcgatcttggctcactgtaacctccgcctcccgggttcaagtgattctcgtgcctcatcctcccaagtagctgggactacaggtacacgccaccacacctggctgatttttgtatttttagtggagacggggtttcaccatgttgcccaagctggtcttgaactcctgggctcaagcgatcatcctgtctcggtatcccaaggtgttaggattacaggcatgagccactgcacctggccaccatttgaattcttttatgcagtcacatatattacttttagacttactatatagtttctaggagaaagttttgtgcccaactggcagaagctaccctttcatatttttcacaagcaaactattttatttttatttttattgagaagtctcactctgtctcccaggctggagtgcagcagcaggatctcggctcactgaaacctccgcctcctgagttcaaggcctcctgcctcagcctcccgagtagctgggactacaggcgcctgccaccacacccggctaatttttctatttttattagagacggggtttcaccatgttggccaggctggtctcgaattcctgaccccacttaggactcccaaagtgctgggattacaggcttgagccaccgcgccgaccacaagcaagatattttaaaacctgatagtaaaataacaatgtgggcgaggggctgcagagcgctctggtcaccaggcaatgggaagcaggaagggtgtgcgggagggagccccaagccgcgggatggcatcccggaacctggtctggttccagcctcccaacagctcagccgtagcccaggcctcttcaatgcactctggccggttgtctctgcaccaggaggtctccgtccaagtcttggttagcgcaaaggtggccatgccactctcaggttcaaagcccgtgctgggacagaacctagctttcccctgcggggcgtccctggggcctcttcctcccttagctcaatggtcgattcctctgcccacgccagctggcgcgacccagagggtcctgggatctctcggggcggggcgcggagtggacagggcgggcatgggcccggggcctggagaagagcaggaacggggacgggagctcgagggagcaggccagggccagacaccggagcgggtccaggggacggagagggacgggggacaggctggagagatggggctgggccctgtctcgagtctcggaccggacgcgggggggctggggggatgtagacagggcggggtcagagagaacccggacagagtctggggtgcgcagcgggggtgggcgggctccagggcagggcgcgggaccgggcgggatggggcggggcggggcggggcggggcggggcgcccggggcccgccccactggggggtctacaccgcccgcccggtctcgtgacgctggtcagtggcgcgggtcacgagtgccgacttgacagacggcagcggcgacatggcttcggagcaggacgtgcgcgcccggctgcagcgcgctggccaggagcacctcctgcgcttctgggccgagctggcgccggagccacgagccgcgctgctggcggagctggcgctgctggagcccgaggcgctgcgcgagcactgccggcgggcggcggaggcctgcgcgcgcccccacggcccgccgcccgacttggccgcgcgcctgcggcccctgcccccagagcgcgtgggcagggccagccgcagcgaccccgagacacggcggcgctgggaggaggaaggtaagcggggtgggaggccctgggggccggcagggggtcgtgcccacggagcgggtgggaaccgaggccgcgctcggggaactgtagttctcctcgctactttgagacgtgtctcgcctcac

SEQ ID NO: 43255 - DNA, 2300 bp, Homo sapien
gcctcctgagttcaaggcctcctgcctcagcctcccgagtagctgggactacaggcgcctgccaccacacccggctaatttttctatttttattagagacggggtttcaccatgttggccaggctggtctcgaattcctgaccccacttaggactcccaaagtgctgggattacaggcttgagccaccgcgccgaccacaagcaagatattttaaaacctgatagtaaaataacaatgtgggcgaggggctgcagagcgctctggtcaccaggcaatgggaagcaggaagggtgtgcgggagggagccccaagccgcgggatggcatcccggaacctggtctggttccagcctcccaacagctcagccgtagcccaggcctcttcaatgcactctggccggttgtctctgcaccaggaggtctccgtccaagtcttggttagcgcaaaggtggccatgccactctcaggttcaaagcccgtgctgggacagaacctagctttcccctgcggggcgtccctggggcctcttcctcccttagctcaatggtcgattcctctgcccacgccagctggcgcgacccagagggtcctgggatctctcggggcggggcgcggagtggacagggcgggcatgggcccggggcctggagaagagcaggaacggggacgggagctcgagggagcaggccagggccagacaccggagcgggtccaggggacggagagggacgggggacaggctggagagatggggctgggccctgtctcgagtctcggaccggacgcgggggggctggggggatgtagacagggcggggtcagagagaacccggacagagtctggggtgcgcagcgggggtgggcgggctccagggcagggcgcgggaccgggcgggatggggcggggcggggcggggcggggcggggcgcccggggcccgccccactggggggtctacaccgcccgcccggtctcgtgacgctggtcagtggcgcgggtcacgagtgccgacttgacagacggcagcggcgacatggcttcggagcaggacgtgcgcgcccggctgcagcgcgctggccaggagcacctcctgcgcttctgggccgagctggcgccggagccacgagccgcgctgctggcggagctggcgctgctggagcccgaggcgctgcgcgagcactgccggcgggcggcggaggcctgcgcgcgcccccacggcccgccgcccgacttggccgcgcgcctgcggcccctgcccccagagcgcgtgggcagggccagccgcagcgaccccgagacacggcggcgctgggaggaggaaggtaagcggggtgggaggccctgggggccggcagggggtcgtgcccacggagcgggtgggaaccgaggccgcgctcggggaactgtagttctcctcgctactttgagacgtgtctcgcctcacgcgttccggcccccgagtcctggcgccccagccccagagttggtttcccctaaagcggaagggtgggcgggtcccgggcgtcccttcacggcgcccgtacccccaggtttccgtcagatttctctgaacaaggtggccgtcctgctgctggctggggggcagggcactcgcctgggcgtgacctaccccaagggtatgtaccgtgtggggctgcccagccggaagaccctgtaccagctgcaggcggagcggattcggcgggtggagcagctggccggtgagcgccacgggacccgctgcaccgtcccctggtgtgtcctgcctgccctacctcggcccggaggtacccttccccacgcccccccacatccccgctccagacgcgagccccaaccccggcacagaccgggacattgcccagaaccggcccaaaatggggcctggccccagccccaactggacactggaccccgaaccccgatgccggctctggtccgagccccgtctgcctgcagggccaggcgtactcgcggccggctcaccgcgcctcccttgcaggtacgtcatgaccagcgagttcactctggggcccacggccgagttcttcagggagcacaacttcttccacctggaccccgccaacgtggtcatgtttgagcagcgcctgctgcctgctgtgacctttgatggcaaggttatcctggagcggaaagacaaagttgccatggccccaggtgtggcccgttcctgagacggggagggaccgcccagactagaactgggagcgtagttgggggtccacgcgcccgggttcgcggctgccccgaggctgtgtggtcctgggttaggcgcctc

SEQ ID NO: 43256 - DNA, 2300 bp, Homo sapien
tccggcccccgagtcctggcgccccagccccagagttggtttcccctaaagcggaagggtgggcgggtcccgggcgtcccttcacggcgcccgtacccccaggtttccgtcagatttctctgaacaaggtggccgtcctgctgctggctggggggcagggcactcgcctgggcgtgacctaccccaagggtatgtaccgtgtggggctgcccagccggaagaccctgtaccagctgcaggcggagcggattcggcgggtggagcagctggccggtgagcgccacgggacccgctgcaccgtcccctggtgtgtcctgcctgccctacctcggcccggaggtacccttccccacgcccccccacatccccgctccagacgcgagccccaaccccggcacagaccgggacattgcccagaaccggcccaaaatggggcctggccccagccccaactggacactggaccccgaaccccgatgccggctctggtccgagccccgtctgcctgcagggccaggcgtactcgcggccggctcaccgcgcctcccttgcaggtacgtcatgaccagcgagttcactctggggcccacggccgagttcttcagggagcacaacttcttccacctggaccccgccaacgtggtcatgtttgagcagcgcctgctgcctgctgtgacctttgatggcaaggttatcctggagcggaaagacaaagttgccatggccccaggtgtggcccgttcctgagacggggagggaccgcccagactagaactgggagcgtagttgggggtccacgcgcccgggttcgcggctgccccgaggctgtgtggtcctgggttaggcgcctctttttctgggccttgatcgtcatttgtcacatggtacaccaactgggctgtctggttagtgaccagggctgccttaggcacaaggccggggcttcccccgcctccagcacgtcctagactcccagagcgatccctggcgggagccctcgcgatgcccattcccttctccgtctgcagacggcaacgggggcctctactgcgcgctggaggaccacaagatcctggaggacatggagcgccggggagtggagtttgtgcacgtgtactgtgtggacaacatcctggtgcggctggcggaccctgtcttcatcggcttctgtgtgttgcagggcgcagactgtggcgccaaggttagcgcccgactgcgcggcgccccgcacccgaggctggccccgcccctcacggagccccgcccctccgcccagccctcggaacccatccctggtcttggctgcaggtggtggaaaaggcataccccgaggagcccgtgggcgtggtgtgccaggtggacggtgtcccccaggtggtggagtacagcgagatcagtcctgagaccgcacagctacgtgcctccgacgggagcctgctgtacaatgcaggcaacatctgcaaccacttcttcacccgaggcttccttaaggcggtcaccaggtgtgcggcagcaggtggctgcggattgccggccagagccgcctgcgttgaccagggacccgcggggtcccagtgagctgagtgccctgggccacagcggctgtggtcaggagtggctgtggtcaggcacggctgatgggtcggggtggagaatggatcctgagcttgcaaaggcagaggtgctggagatcaggcacaagccgtgctcagcaggcagctgctgtaaggctctgtgatcaagtctgccatctcctccttctggggacctgccctggtgcccagggtgctacctctgctctggggcttgccagtttgtttgcctgggcagggatgtggctgatggtgcctggcacttggcacagggatgcagggaggaggcctgtgcctgcttctccctggagatctggccctactctgccgcttctgtgccctgtagtgtccttctgccatcctgtcccacccagctgggtgtgctcagaagtggggacagagcccccagcggtgccatatctgatctgtttctttcctcccctctgctctcccgtgccccagggagtttgagcctttgctgaagccacacgtggctgtgaagaaggtcccgtatgtggatgaggaggggaatctggtaaagccgctaaaaccgaacgggataaagatggagaagtttgtgtttgatgtgttccggtttgctaagttagtagtagaactcatttattttccccttcttccttctctcagttttggtggtgggaactgaggcgcagctggtagggaagtagaggcttgagggagccaagg

SEQ ID NO: 43257 - DNA, 2300 bp, Homo sapien
ctcctgcacctgcatccttgagatgccaaggtttccctgctaaccacgtgaggatgcttggggtactccagggactgacaagagtgagtggtgtcaacctaaagagaaactcaggctctccagaataaatgaatttaatcaagaataacacataattgcaatgcagagtatgcaagcctcagtgggtcacaggcatgtggtgggggggtggggtggggattgaggaaagggggaattttttttttttgagactggatctcactctgttgcccaggctggagtgcagtggtgcaatcatggctcactgcagcctcgacctcctggggcttaggtggtcttcccacctcagcctccagagtagctgggaccacaggtgcacaccaccacactggactcatttttttattttttgtagagacaggggtttcaccatgttgcccaggttggactcctgagctcaggggatctgcccaccttggcctccaaaagtgctgggattactacaggcatgagtcactgtgccccgcccacgggaaatttcttttttttttttttttttttttttgagacagagtcttgctctgttgcccaggctggagtgcagtggtgccatctcggctcactgcaacctccacctcctgggttcaaggaattctcctgcctaagcctcccgtgtagctgggactacaggtgcctgccaccaaccatgccctgctaatttttttgtgttttttgtagagacgggtgtctcaccatgttggccaggctagtcttgaactcctgacctcaagtgatccacctgcctcggcctcccaaagtcctgggattacagaagccaccgcgcctggccccaaggggaatcttttaaaaaagagaagttcccataaactgctttgaaaccataaagaccaaaggttagaagggtttgccgcaggcgctccgttgctaatgtttttgtgagggcttcttcagggcctcttgttagagtgtgacataaacgacttcatttgggtaccagcaagtgtcacagggggcagagaccagcagaaacctaaagatgacccctagaagagcaggaggccaggggaacagagttagacgagccacgtgctaagcaggacgtcgctgccgggggagctctccagacacgcagaaatgccacagtcaggaccgtgggacgcagcggattcgcccaagggcaggagcagcctggccaggagagaatgaaggaggggccgggcgtgaggttcggctggggagaacccaggcagggagggcctcgggcggccacggacgccgctttgccattttgggcgtttctggggaggacaacgcgtgcaggaagcgcagtcatctcaagctgacctccaaggttaccgagttcgagggctgggagccgggtctgaaagccccgacccgcctatggcgcggggactgtgggtccagccggccgattggccgcctcgctcggcgccggtccaggcgcagcgctcgggccccggggaccgtgagatgcggcgcagccagcttagctcggggtagcagccaccccagcccgggtgccgcccggcctggtccgcgacttcgggagggtccggtccttcccccggcccccacgcctgggtgaggccctgggcttcttgccggtgaccacgcggccagggtgggcaccagcccaggacggcgcccaagggcagcccagctccatccccgcgccgcgggttccggaaccgaggcgcgggacgctgggactctctgccaacatggcggccccgcccgggcgcctccccgggtccctagtgtctgcgtctcccgtgagggcgtgggcaaagtcggtgcagccagacgacaggaggcgagagaagcccagctccaggcccatgaggcgaaccacgtgggagccccagacagcgaccacgccccaggcgaaccaaggcccgccccgttgctacagctacgctcgtagcacacctgggcaggcgctgccggacgcatgcgcaatgaacctgagggcagggcggagtcgcagcagttgtctgacgcagtcgccgtaggacgcagccccgtacgctggagcgcagcggagacaggcgcgggcgcactggccgcatagagacgcagcgcacgcgcagtcgcgtatccgtgtgatgggcgggctgttgacggcgctgcgatggctgcctgcgagggcaggagaagcggagctctcggttcctctcagtcggacttcctgacgccgccagtgggcggggccccttgggccgtcgccaccactgtagtcatgtacccaccgccgccgc

SEQ ID NO: 43258 - DNA, 2300 bp, Homo sapien
gcaatttctggcctcatcttctgctcttcctctagcctgaaagccagagctgaataacagaagctattttatttcaaatatgccacaaggcctacaagagatttaaactgctttataaaaacacttggcaggcactatccattacaaatcaacattatgatacctgatagtcactgaaatgaattcaacaatgtcccaagggaatgaaatctttttcaaaacacttggcagtttgtgtccttgtccataacacagaaccccacatcttttgccttcctattttccattcagggacgttcagcatgtggcaggtgggcaggagccctttagctttgctccaaagagaagcatcttagaccaagtgagaagagattctccacatcctcaccagaactctgcctggtcttttccaaacacacgctaatgagtgctacgaaatttgtgtggttatttaggctgagtgttcaagcccaccagctgacttactctataagggaggctggacatatcagtacttacaccagagacctagaaagtagtcagacagcatcaaattaacatctgtgttctagccaggtggttacatacagctctacctttctctttatcttgatttcttgccaattcgttgccatatatgcctcctggagctgtttaaggtagaatgcaagattgcttctgcccaatcaaccctcaacacagatatcgttttcaagtacacgtgtttctgatacctttccaatggtcagccaagttgatgtagaagaggagtccacagaaaagcagaaaggcaaggaggaagagaatcatattccgctgcaatctcgacagttgcttccatttctaagggaggtacagagaatgacatttcttactgaatatatcacacggaacgtctcaactgtcacaaactgtgaggacaataaggaattcttctggaagatccagtgttcagctctatttctttttttttttggaaacagggtctcattctgttacacctaggctggagtgtagtgggtggaacgcgggatgagccaccgtgcccggccagctctatttattttgaatggggagaagttccctctcagcagggagtaggaacattgctgggacaatactacagatgtcgttaatacagtggtgcagatgagacgaggataagaaaaaagcagaaacatttctgtcacatttcatcaacagtggagaaagactcctgcgactcccacagatgtagcccaggcaccgcccaggcgatgcacagtccgcatgtggttatcaatgcccttcggcctgagaccaccacgaacagaccaggagccaatcaagaggggctcatttctcactgtaccgaggggagcatacaccacggggaacctccggtttccgctccaagaggggcaggcgcctgggccaggaccttgcagaaaagcgaacgaagcccagaaaacctgctggggctctgagccctcttcccaccaccgccccgcagaatttgggccgctgagaccgctgcaggcgagccgcccacggctgccccaaccaggaacgcacatttgcccctttttgcggggaaggggtggagagggcggcgcctggggagtcgagtccgcccgcccaggtcccgctcggagccgcagtctgggagggcggcgggcacggcagccccgggccccagtcagcccggcgcgaccctcaccctccagcacgagcgccgccgccaactcttgctgttgtcatagttctcgccaaagctcagcgtcaccgagatgaagtcccgatgaggcggcggcggcggcggtgggtacatgactacagtggtggcgacggcccaaggggccccgcccactggcggcgtcaggaagtccgactgagaggaaccgagagctccgcttctcctgccctcgcaggcagccatcgcagcgccgtcaacagcccgcccatcacacggatacgcgactgcgcgtgcgctgcgtctctatgcggccagtgcgcccgcgcctgtctccgctgcgctccagcgtacggggctgcgtcctacggcgactgcgtcagacaactgctgcgactccgccctgccctcaggttcattgcgcatgcgtccggcagcgcctgcccaggtgtgctacgagcgtagctgtagcaacggggcgggccttggttcgcctggggcgtggtcgctgtctggggctcccacgtggttcgcctcatgggcctggagctgggcttctctcgcctcctgtcgtctggctgcaccgactttgcccacgccctcacgggagacgcagacactagggacc

SEQ ID NO: 43259 - DNA, 2300 bp, Homo sapien
ccttgggccgtcgccaccactgtagtcatgtacccaccgccgccgccgccgcctcatcgggacttcatctcggtgacgctgagctttggcgagaactatgacaacagcaagagttggcggcggcgctcgtgctggagggtgagggtcgcgccgggctgactggggcccggggctgccgtgcccgccgccctcccagactgcggctccgagcgggacctgggcgggcggactcgactccccaggcgccgccctctccaccccttccccgcaaaaaggggcaaatgtgcgttcctggttggggcagccgtgggcggctcgcctgcagcggtctcagcggcccaaattctgcggggcggtggtgggaagagggctcagagccccagcaggttttctgggcttcgttcgcttttctgcaaggtcctggcccaggcgcctgcccctcttggagcggaaaccggaggttccccgtggtgtatgctcccctcggtacagtgagaaatgagcccctcttgattggctcctggtctgttcgtggtggtctcaggccgaagggcattgataaccacatgcggactgtgcatcgcctgggcggtgcctgggctacatctgtgggagtcgcaggagtctttctccactgttgatgaaatgtgacagaaatgtttctgcttttttcttatcctcgtctcatctgcaccactgtattaacgacatctgtagtattgtcccagcaatgttcctactccctgctgagagggaacttctccccattcaaaataaatagagctggccgggcacggtggctcatcccgcgttccacccactacactccagcctaggtgtaacagaatgagaccctgtttccaaaaaaaaaaagaaatagagctgaacactggatcttccagaagaattccttattgtcctcacagtttgtgacagttgagacgttccgtgtgatatattcagtaagaaatgtcattctctgtacctcccttagaaatggaagcaactgtcgagattgcagcggaatatgattctcttcctccttgcctttctgcttttctgtggactcctcttctacatcaacttggctgaccattggaaaggtatcagaaacacgtgtacttgaaaacgatatctgtgttgagggttgattgggcagaagcaatcttgcattctaccttaaacagctccaggaggcatatatggcaacgaattggcaagaaatcaagataaagagaaaggtagagctgtatgtaaccacctggctagaacacagatgttaatttgatgctgtctgactactttctaggtctctggtgtaagtactgatatgtccagcctcccttatagagtaagtcagctggtgggcttgaacactcagcctaaataaccacacaaatttcgtagcactcattagcgtgtgtttggaaaagaccaggcagagttctggtgaggatgtggagaatctcttctcacttggtctaagatgcttctctttggagcaaagctaaagggctcctgcccacctgccacatgctgaacgtccctgaatggaaaataggaaggcaaaagatgtggggttctgtgttatggacaaggacacaaactgccaagtgttttgaaaaagatttcattcccttgggacattgttgaattcatttcagtgactatcaggtatcataatgttgatttgtaatggatagtgcctgccaagtgtttttataaagcagtttaaatctcttgtaggccttgtggcatatttgaaataaaatagcttctgttattcagctctggctttcaggctagaggaagagcagaagatgaggccagaaattgctgggttaaaaccagcaaatccacccgtcttaccagctcctcagaaggcggacaccgaccctgagaacttacctgagatttcgtcacaggtactttgagcaaatggtgtggggttataactggggttcaatccagaggcatttcaaaccactgaagattgagaagaattattttcctttaccatttattaccacgtgtttacctctctctcgttttggactggtcggataatacttggggaaagagaggcgtagtctttgcttcattctttttgaagaccagccatggccagttccggttttacttctgactgtgcagtgttgaataagacagacctgtttcctctcaagaggccacagctggtaggagaggctggtgagaagccaggcacagatgggcagaggcagatggcacatggtgtacatcctatgtggaaaagagcagggcgctggtgaagaacagtg

SEQ ID NO: 43260 - DNA, 2300 bp, Homo sapien
ggcacgggagctcaggactgaactgtgtgtttcctgccactcagcagcctgcacctcaggatgatggggccgctttgggtgcagggctgtgccttggccgtgggtatggagcgtgggggtgggaaacatggagccacaaatgtttgacggcagctgacacccttccttctcccccgaagctggaggggagcggtgatcgagcctgagcagggcaccgagctcccttcaagaagagcagaagtgcccaccaagcctcccctgccaccggccaggacacagggcacaccaggtgaggccacacctgcaccccttcctccccgggcgctcaggggctggtggctgatgggtgcaggcttcgtctcagccatggtgggtggcgcccccgccctggtgtgcaccttgcccttcagcatccccctgttgtctgagtcctcacaggctctgcaaccttggtgacaccatgtggctcttggcctgctgtccctgagcacatggctgcagaagaaggtgtgtctgagaggtttgtgtctgggccaggctgccccacgggatccctggagactgctgcccgtgctgtgtcccctgtctcggcctggccagtcccaggcagctctgggggccacttcattctcagcaccgtttgttgggggcctcccaggtgcgggccttcggccaagctcagtgcatgacctgaggcctctttcaacctcatgacaccctctgacacgataagccactcaccctcccgttctccagactgaaaagcagggctgaggacagccacccccagagtcgtttgcttgtctgtgggggctcatggcaggtcgctgagtctggagccctgctctcatcatgccccccaggtgtctctgaggtggggagggagcccagagccaggactcccagccccgggcctgtgagggatgtgtagcaatctctgcggcatcaatgagggcagaggcagaggcagaggcatagacatgccatgagcacaaggaggcctcagaacctttcctgagaggacgtgtggtttggtgccgttacacacgtgtcaatccacacattagtcaatgttggccgggcgtggtggctcacacttgtaatcccagcactttgggaggctgaggtagaaggatctcttgagtccaggagttcaagaccagcctggacaacacagtgaggccccatctctacaaaaaaaaaagaaatttatatatatgtgtatatttgagacagagtcttgctttgtcacttcactgcaacgtctgccttctgggttcaagcaagtctcctgcctcagcctccctagtagctgggattataggcacccgccaccacacctggctaatttttgtatttttagtagagacggggtttcgcgatgttggcgaggctggtctcaaacttctgacctcaggtgatctgcccacctcggcctcccagagtactgggattacaggcgggagccaccgtgcccagccaaaaaaatttaaaaaaagggaacgaagggactgtagcgcgtgtgcacagtgcgattcccgtggagcacctgaagcccacgtggcagaaggagcgtgtttgagtcgaggatgttcatcgcgaggtctgcacccgtccgtgtttcacattctgagttggcaccacactcacccacgtctccacaggctgtgctcactgtgctgtcccagcgcccttggggcagccacccttgtccctttggccagaggccaccgaggcccaaggagggtgtgcctgcccaggcgccaggtggaggtgcatgggccccagtcaggtggtcgggtgacaggtgccatcctgtgcagtctccagaggtctcaggcccttggcaggctgtgttctccctgggggctgctgcagcctctgtggccctggcctttgctgtgcccaccaccgcccttcccgtcgtcccaaacccaccgtcatctttgccccatgggggtcacagcagtgctctgcctgagggtgtccatctgtgccgacgccaggaccacgtccgccatggcctgtgctctctcccccctactagtgcatctgaactatcgccagaagggcgtgattgacgtcttcctgcatgcatggaaaggataccgcaagtttgcatggggccatgacgagctgaagcctgtgtccaggtccttcagtgagtggtttggcctcggtctcacactgatcgacgcgctggacaccatgtggatcttgggtctgaggaaaggtacctggtgctttctggggaggggctgagccctccgtgtgggcctcgtgtgctgaggcagagtgtg

SEQ ID NO: 43261 - DNA, 2300 bp, Homo sapien
ttttattaacaaatgttgacgacttcaagatttacccccttgagataggaggtgatattgaagccctgcaggggaacgataacgccccagacatgggtttggttttttgtttttgtttttttgtttttgagatggagtctttcactgtctcctgggctggagtgcaatggcgcaatctcggctcattgcaaccttggcctcctggtttcaaacgtgggttttttggagacagagtctagtggtgtggcccaggctggagtgcagtggcacgatctcagttcactgcagccttcgcctcccgggttcaagctattctcatgcctcaccctccccagtagttgggaccacaggcatgcgccaccatactcagctaatttttgtgtttttagtagagatggggttttcccatgttgtccaggctggtctctaactcctgggctcaagcaatccacttgcctcagcctcccaaagtgctgggattacaggcatgagccaccacgcccagccaaatgtattttgaagatggatagataataggaaaacgttggagccatccatttgtctctgcatcctttactgttttatgtcatagaatttgaggaagccaggaagtgggtgtcgaagaagttacactttgaaaaggacgtggacgtcaacctgtttgagagcacgatccgcatcctgggggggctcctgagtgcctaccacctgtctggggacagcctcttcctgaggaaagctgtaagtgtcttggggtgtcctgcagggagatggtggactcgcattcaagcagttacccctttagtggacttgtggggacgtgactgtcttcctgtttcctcttcaaatgcactggagtctgtttctgagctcatattcgtgagctgatgaagccactttgatcaccactggccttgtagagacattcactcagtgcagagtgatgcccgtttccttgctgctgtgttgaccccagagagccttcagtgtctccactgaactgcatgaaagggtgtagacgaggcctctgggtgacctgaacgttggttctctactctgctcatataccaggaggattttggaaatcggctaatgcctgccttcagaacaccatccaagattccttactcggatgtgaacatcggtactggagttgcccacccgccacggtggacctccgacagcactgtggccgaggtgaccagcattcagctggagttccgggagctctcccgtctcacaggggataagaagtttcaggtaagggggcaggctttctggctggatgcgcctcccctggagctaccttttgctcatcacagcaggtactgtgtgtgtgtgtgtatgtgcatgtgtgttttcaggttttttactgtgataaaacacacaaaacgcaccaccttaaccatttccaggcgtggtcggtggtgttacattcacgctgttgcaggcgtgcaggtcggtggtgttacacacattcacactgttgcaggcgtgcaggtcggtggtgttacacacatttgggctgttgcaggcgtacaggtcagtggtgttacacacatgctgttgcaggagtacaggtcggtggtgttacacacattcatgctgttgcaggcgtgcaggttggtgctgttacacacatgctgttgcaggagtacaggtcggtggtgttacatgctgttgcaggcgtgcaggtcggtggtgttacattcacgctgttgcaggcgtgcaggtcggtgctgttacacacattcctgctgttgcaggagtacaggtcggtggtgttacacgtgctgttgcaggtgtgcaggtcggtggtggtacacacattcatgctgttgcaggagtataggtcggtggtgttacacacattcactgttgcaggcgtgcaggtcggtggtgttacacattcacgctgttgcaggcgtgcaggtcggtggtgttacattcacgctgttgcagacgtgcaggtcagtgctgttacacacgctgttgcaggcgtgcaggttggtggtgttacattcacactgttgcaggcgtgcaggtcggtggtgttacacacattcattctgttgcaggcgtgcaggtcagtgttacacacattcacgctgttgcaggcgtgcaggtcggtggtgttacacacattcacgctgttgcagatgtgcaggtcggtgctgttacattcacgctgttgcaagcgtgcaggtcggtggtgttacattcacgctgttgctggcgtgcaggtcggtggtgttacacacattcacactgttgcagacatgcaggtcggtgctgttaca

SEQ ID NO: 43262 - DNA, 2300 bp, Homo sapien
tttcctcttcaaatgcactggagtctgtttctgagctcatattcgtgagctgatgaagccactttgatcaccactggccttgtagagacattcactcagtgcagagtgatgcccgtttccttgctgctgtgttgaccccagagagccttcagtgtctccactgaactgcatgaaagggtgtagacgaggcctctgggtgacctgaacgttggttctctactctgctcatataccaggaggattttggaaatcggctaatgcctgccttcagaacaccatccaagattccttactcggatgtgaacatcggtactggagttgcccacccgccacggtggacctccgacagcactgtggccgaggtgaccagcattcagctggagttccgggagctctcccgtctcacaggggataagaagtttcaggtaagggggcaggctttctggctggatgcgcctcccctggagctaccttttgctcatcacagcaggtactgtgtgtgtgtgtgtatgtgcatgtgtgttttcaggttttttactgtgataaaacacacaaaacgcaccaccttaaccatttccaggcgtggtcggtggtgttacattcacgctgttgcaggcgtgcaggtcggtggtgttacacacattcacactgttgcaggcgtgcaggtcggtggtgttacacacatttgggctgttgcaggcgtacaggtcagtggtgttacacacatgctgttgcaggagtacaggtcggtggtgttacacacattcatgctgttgcaggcgtgcaggttggtgctgttacacacatgctgttgcaggagtacaggtcggtggtgttacatgctgttgcaggcgtgcaggtcggtggtgttacattcacgctgttgcaggcgtgcaggtcggtgctgttacacacattcctgctgttgcaggagtacaggtcggtggtgttacacgtgctgttgcaggtgtgcaggtcggtggtggtacacacattcatgctgttgcaggagtataggtcggtggtgttacacacattcactgttgcaggcgtgcaggtcggtggtgttacacattcacgctgttgcaggcgtgcaggtcggtggtgttacattcacgctgttgcagacgtgcaggtcagtgctgttacacacgctgttgcaggcgtgcaggttggtggtgttacattcacactgttgcaggcgtgcaggtcggtggtgttacacacattcattctgttgcaggcgtgcaggtcagtgttacacacattcacgctgttgcaggcgtgcaggtcggtggtgttacacacattcacgctgttgcagatgtgcaggtcggtgctgttacattcacgctgttgcaagcgtgcaggtcggtggtgttacattcacgctgttgctggcgtgcaggtcggtggtgttacacacattcacactgttgcagacatgcaggtcggtgctgttacacacattcatgctgttgcaggcgtgcaggtcggtggtgttacattcacacttgcaggcgtgcaggtcggtggtgttacacacattcatgctgttgcaggcgtgcaggtcggtggtgttacacacattcacactgttgcaggcgtgcaggtcggtggtgttacattcatgctgttgcaggcgtgcaggtcagtggtgttacacacattcacgctgttgcaggcatgcaggtcggtggtgttacacacattcacgcttttgcaggcgtgcaggtcggtggtcttacattcatactgttgcaggcgtgcaggtcggtggtgttacattcacactgttgcaggcgtgcaggttggtgttacacacattcacacttgcaggcgtgcaggtcggtggtgttacacacatgctgttgcaggcgtgcaggtcggtggtgttacattcacactgttgcaggcgtgcaggtcggtggtacacacattcacactgttgcaggcgtgcaggtcggtggtgttacacacattcatggtgttgcaggcgtgcaggtcggtgttacacacatgctgttgcaggcgtgcaggtcggtggtacattcatgctgttgcaggcgtgcaggtcggtggtgttacacattttcacgctgttgcagacgtgcaggtcagtggtgttacattcatgctgttgcaggcgtgcaggtcggtggtgttacattcacgctggtgcaggcatgcaggtcggtggtgttacacacaacgctgttgcaggcgtgcaggtcagtggtacacacattcacgctattgcaggcgtgcaggccggtggtgttacattcacgctgttgcag

SEQ ID NO: 43263 - DNA, 2300 bp, Homo sapien
gcaggtcggtggtgttacacacattcacactgttgcaggcgtgcaggtcggtggtgttacattcatgctgttgcaggcgtgcaggtcagtggtgttacacacattcacgctgttgcaggcatgcaggtcggtggtgttacacacattcacgcttttgcaggcgtgcaggtcggtggtcttacattcatactgttgcaggcgtgcaggtcggtggtgttacattcacactgttgcaggcgtgcaggttggtgttacacacattcacacttgcaggcgtgcaggtcggtggtgttacacacatgctgttgcaggcgtgcaggtcggtggtgttacattcacactgttgcaggcgtgcaggtcggtggtacacacattcacactgttgcaggcgtgcaggtcggtggtgttacacacattcatggtgttgcaggcgtgcaggtcggtgttacacacatgctgttgcaggcgtgcaggtcggtggtacattcatgctgttgcaggcgtgcaggtcggtggtgttacacattttcacgctgttgcagacgtgcaggtcagtggtgttacattcatgctgttgcaggcgtgcaggtcggtggtgttacattcacgctggtgcaggcatgcaggtcggtggtgttacacacaacgctgttgcaggcgtgcaggtcagtggtacacacattcacgctattgcaggcgtgcaggccggtggtgttacattcacgctgttgcaggcgtgcaggttggtgttacacacattcacacttgcaggcgtgcgggtcggtggtgttacacacattcatgctgttgcaggcgtgcaggtcggtgttacacacattcacacttgcaggcgtgcaggtcggtggtgttacacacattcacactgttgcaggcgtgcaggtccgtggtgttacacacatgctgttgcaggcgtgcaggtcggtggtgttacattcacactgttgcaggtgtgcaggttggtgttacacacattcacactgttgcaggcttgcaggtcggtggtgttacacacattcacacttgcaggcgtgcaggtcagtggtgttacacacattcatgctgttgcaggcatgcaggtcggtagtgttacacattcatgctgttgcaggcgtgcaggtcggtggtgttgcacattcatgctgttgcaggcatgcaggtcggtggtgttacattcacgctgttgcaggagtacaggtcagtggtgttacacacattcatgctgttgtgcagctatcacttccatctccagagcccttttcatcttaaaactgaagctctcccatcacacagtgacccttcatgtccctccccagtccctgaaaaacactgttcaggtttttcttcctggacctcattgtgtggagttcctcgtgtgagtgcagtcacacacgatttgtcctttttttgttttcgtttgttgagacagagtctcattctgtcactcaggctggagtgcagtggcgtgatctcagctcactgcaacctccactcccaggttcaagtgattctcctgcctcagcctcccaagtagctgggattacaggcgcctgccaccacgcccagctaatttttgtgtttttattagagacagggtttcaccaagttggccagactggtctcaaactcctgacctcgtgatccacccgcctgggcctcccacagtgctgggatgacaggcgtgagctaccacacccggctgatttatccttttatttgggctcctttcactcagcgtctttaagcttcatacgcgaaagatgcttcagagattcctttttcaggctgaatatctgctgcgtggctaggccactttttgtttaatcctctctcctctggtggacaccaggactgtgctgttttggttgctgtaagcgcgggtgcacacgcctgcctgaggctgtgttttggccgttgtgagtgtgggtgcacacacctgcctgaggctctgctttgttgtgagtgcgggtgcacacacctgcctgaggctgtgttttgggtgttgtgagtgtgggtgcacacacctgcctgaggctgtgttttgggtgttgtgagtgtgggtgcacacacctgcctgaggctgtggcgcgatctcggctcactgcaacctccacctcccgggttcaagcgattctcctgcctcagcctcccgagtagctgggaccacacccaccaccacaccccgttatttttttgtatttttagtagagatggggttttgccatgttggccaggatggtctggaactgacctcaggtgatccacccactggcctcccaaag

SEQ ID NO: 43264 - DNA, 2300 bp, Homo sapien
atgtccctccccagtccctgaaaaacactgttcaggtttttcttcctggacctcattgtgtggagttcctcgtgtgagtgcagtcacacacgatttgtcctttttttgttttcgtttgttgagacagagtctcattctgtcactcaggctggagtgcagtggcgtgatctcagctcactgcaacctccactcccaggttcaagtgattctcctgcctcagcctcccaagtagctgggattacaggcgcctgccaccacgcccagctaatttttgtgtttttattagagacagggtttcaccaagttggccagactggtctcaaactcctgacctcgtgatccacccgcctgggcctcccacagtgctgggatgacaggcgtgagctaccacacccggctgatttatccttttatttgggctcctttcactcagcgtctttaagcttcatacgcgaaagatgcttcagagattcctttttcaggctgaatatctgctgcgtggctaggccactttttgtttaatcctctctcctctggtggacaccaggactgtgctgttttggttgctgtaagcgcgggtgcacacgcctgcctgaggctgtgttttggccgttgtgagtgtgggtgcacacacctgcctgaggctctgctttgttgtgagtgcgggtgcacacacctgcctgaggctgtgttttgggtgttgtgagtgtgggtgcacacacctgcctgaggctgtgttttgggtgttgtgagtgtgggtgcacacacctgcctgaggctgtggcgcgatctcggctcactgcaacctccacctcccgggttcaagcgattctcctgcctcagcctcccgagtagctgggaccacacccaccaccacaccccgttatttttttgtatttttagtagagatggggttttgccatgttggccaggatggtctggaactgacctcaggtgatccacccactggcctcccaaagtgctgggattacaggtgtgagccactgtgcccggcctctttttactttgttaatggtgtattttgatagataacagattgtcattttcatgaagcacagctggtcagtttattgttgctcatgtatttggcctcatgttcgagtccctgtttttaatcatgagctggacacagccctctttagagcaactgtgaccacttgtggtgagaagtgcagcccacaccatccacgtgaggctcccacacgccatccacgtgaggctcccatgcagacatttagaaggcgttttcactgcagctcagaaaatggccccaggcccccatgggcacccccatgtcaccagggcctctggttgctgccggtacacagggataggcagccaggcctcgaaggtgctgggcatgggtttgggtgtctgcgttgggtagagacccggagcgcccttgctgggcgtgccctaacatcccggtaccctgtgcccctctgtgggccaggacgcctggtgctgccagctgggcgtaagccctgaggagctgagggtggctgtgacttggaggatgagtaggagctcaccaggagggcgtggagccgaggcgtttaatatcatcaggagcaacactgggctcagaaggcaggcacacttgccgtccctccagagccatggctgacggccaggcctggtgggctctcgtgaggacagtgcctgtggttgtcagatgctgtcccttcgagtaagggatgagagccatcctgaagatgggtcagctctgtggtgaccacccgttgggagcagtgacattcaggtgcgttgcactggtggctgtgtggctgtgtggtacggccaccaggagccatgtgggcaaggacagctgtgggctgggcacagagctctctctgctgggagtcagtcggtgctggggcgaggggaggcagagctcacagagcccctctacagctcaccctgcagctcggccctggccagtaaacccaccatccccctttctgccgcaggaggcagtggagaaggtgacacagcacatccacggcctgtctgggaagaaggatgggctggtgcccatgttcatcaatacccacagtggcctcttcacccacctgggcgtattcacgctgggcgccagggccgacagctactatgagtacctgctgaagcagtggatccagggcgggaagcaggagacacagtgaggcccggcccgctgcccccagctcccgcggctcccccgttcccgcagccccccactcctgctgcccccagctcccacggcccccgctcctgctgccccccgccacactgtgtgt

SEQ ID NO: 43265 - DNA, 2300 bp, Homo sapien
gcctccagccacagggcggttttctcctgtctcagaatagaactaatgtacgatcgggttttacacggagacattccgttcccaggggcatgtcggagacagaagccttcctcttatctcaactgcaaagaggcctccctctttcactaatcctcctcagcacagaccctttatgggtgtcgggctgggggacgatcaggtctttcccttcccacgaggccatatctcaggccgtctcactggggggaaacctggacaatacccaggctttcttgggcagaggtccctgcggctttccgcagtgcactgtgtccctggttaatggagaatggaggatggcgatgacttttaccaagcatactgcctgcaaacacattgttaacaaagcacatcctgcacagccctaaatcccctaaaccttgagtcaatacagcacatgtttctgtgggcacagggatggggctaaggttacaggttaccagcacaggcctagatgccttaaaccttgattccatacagcatatgtttctgtgggcacagggatgtgggcaggggactgtggccaccctcacccctggcagagccatgctgggtagccccatgcccacccttcccggcttgggaggccctggctgctgcccagaggggcatcaatgcctgggccgtggacaagagggaaagtggcttccttggaaaccctgctcctggagccctccctgaggctctggcccctctgtgggcccagccaagcctggagcgtctccaggctctggtgtgcttggggagctggccagctctcggcctagctggcgtctccagagctgcggtcctgggtgagggttgctggtggagttctggccacctaaggcacccgagggagccaaaggagcagaggtgtggggtgggggacgccgtggggtacctccacatccaaggaggtctgctgtttgtcctcacccccgtcctgcgggggccccggcaggcagccccaggaactgcgtagggatgggacagggcccagatgtgagggccgtggtggggacggtgtgtggccctggatgacctcgtgttgcagtgtgacgtgatggtcactgccaccatgctgagggccccagccaccagtcacccaccatggggggtgcctctgtgtgaggcacgggagggccatggcgtgaggggctgtggaagtggccggtcttctccgctcagccccacacaggatgggcagggcagggtcatgctggccgagggtagtcttgggagaaggacagggtaactctctgtagctgagcccctgctgcccctgcacctgttctgggcctggctagcggcccatgtacatccccagcaggactccacgtagctagtctggcacccaccactacggccccctcacccactccctgaactggacgctggggaaaggtgacttcttccatcctctgggtgctccccagggaggaggccccagctcccagcagaggcctctggtccccccttgtccctgcagggctgtgtgggcacactgggtgccagtcggaagggcaggtggcgattcccagctcttgggagctacccggccacatcccggccctgcccagacgctccaggggcaccccacactcctgcccgctgcgaggccccgccccgccaagcccagcccgttatcgcttggacaaaccctgggttgctttcttcggggggccagcactctgtttgggaccctctccctcccgcccttagggcagcagaacggcccccactctcccggccctgccttggagtggggcacctgccaggagcaagtgctggggaggcttggcgggcgcagcagggactcgccctagcgcagctccggatggggccgcggtaggaggacgagccagtggggcgggaggccgcggagatggcccgggggccctctgcttccccgcgccgtgcccgggaaggacccctgggcagcggccgcggggcgcggggtgttggggggcacagccccggcgcggcgctgaagcagcgacggtctccgtggggaccgcgggcgcccgaaacacgtggggcctggagggaggagcgcgccctggcggccccgtgaccccgcccacgtgacgggcgcccgcggaaggcgacatgggctccgctccctgggccccggtcctgctgctggcgctcgggctgcgcggcctccaggcggggggtgagtggcggcgccccccggcccattccccggtcccggccccgcctctgaggttcgcgtccccccacagcccgcagggccccggaccccggcttccaggagc

SEQ ID NO: 43266 - DNA, 2300 bp, Homo sapien
gactatacctctgtgagggtccctgggctcccccaggtcagggcagaggtcctgaccccagtctagctctttagcgggggccaggcccgagatggccagctccgtttcccctgcgtggcctggcagcccctccaggagctggcacgggaagcaggcctgtcctccacgcccttggccggccttggctgcgatgggtggagacgcttctgcccgccccacccctgtctgtctgcctcctcctctcaagcaggcttcctctcgacagaaatgtgtctgcaggtggctcttgagccccagttctcagggattcacctgcagaggatgtagagccggggtcccttccctgcttctgatctgcccaaaatcctagggagagccctgattggcaacccctcggccaatggactgaggccagggcgcgtctgcacccgggttgacagccctgactagaaccgcgaggctggggtcagggaggagcagccgcctcccgccggggccgcagctgtcagagtgggcaaggggatctccacagagggagactgtcccacagtggcccggggtagaacagcgcttccctccccacccagcgcctgactgctggccccgggcccatcccagggcagtgccccaggtctctggtcctccccacagcctttgtctcaccaggtctcagaggggtccgagtccaggctcatctgttgtggtaccactgccccctccctcatggttgtggaagaagcccacggggggaaaatgcagagcagaatccaggaaagactcgctcacaggaggagctgtggcctggagacgcggcctccaccccatctccatcatggacaacctgccaaggggtcttgaacagaagcttggggacgcacatacggtccggtggggcagtgacccactggcagaccagctccctgagtagaaaagaaaaagccctggtttgtggggtttgatgattccgtggcagcagagataatcccactgtggccaatttcgaagcctgactgtaacagctgctggcaggtgtctgaacatttagcgatcagctctccagggtcagcgggagtcgctccagcaccccacggggtgggggtgggtgggtggagccagggcctctgctgcagcctccaacccctttcttccacgctgatgaggcgctgtctgggctcaggtctacccccacgcagctgccaggctctggcctgcctgaggcggatacttttttttttcttttttttgatggagtgttgctctgtcgcccgggctggagtgcaatggtgcgatcttggctcactgcaacatccgcctcccagattcaagcgattctcctgcctcagtctcccaagtagctgggattacaaatgcctgccgccacgcccggctaatttttgtatttttagtagagacagggtttcaccatgttggccaggctggtctcgaactcctgaccttaggtgatccacctgcccttgcctcccaaagtattgagattacaggcatgagccactgtgccctgccgaggtggaagtttggagatgggccacaaactcctggagatagggccagctcagtccccctgagcacccacacacaccctcctgagagccaacagaaggagtgagggccccgaggcggatgacccgtgtgcctcaacccgaacggggagaggcggggtctgcagcagggtacgggcaggtgatcccccaaggaaagattttcctgtattgagagagaaggggccaagaggaggagcttgtcaaacaccacagcccctccccctcctctcagctccagggggtccctggtgccagtgttcggctgatggagagaacggcaagcgggagagagagtgtgacccctgtgggcacatgacttcccttgctgcactgctgcacatagcagaggtgtggtgacgaccctgttttgtcccattgggggcgtttgctgttaggtctgcagaatcctcagttgctattggaaatggtgacatcactggcaggggcggagcttcagccatccttcaagttagggaggggcacgcacactccaggggtggagggggacaaagacagggtggtgtggaccagagggatgggtaaggctctggaaaagggggcgctgggagcgcattgcgagggggctggagagggagagaggagcggaagctgagggtgtgaaacggctggccccgaacacacctcgcggcgctccagtgattcctggtgtccgacctcagccccagtcagtgcgggtccagtttccaggctctcgcggaaggcctggctgagcacatg

SEQ ID NO: 43267 - DNA, 2300 bp, Homo sapien
ggtgcccaagggcaaatgacacactggcattgtgagcccccccacccccacctcacagtcctactgtgaagtcagcaccttccaacagttccgtcagaggtgtgcagtggggccagggctggacatggcccccggtccctggcctgtgtcctgcctgcgtggtggccccttgggcctcacatatttgtcccttctgctcatccctgctgcaggtgcctcctcctgcccccgcactccactcccagccatggctccccttccccaggcaaggtgggagctctggtgtccttctggtggctaccagggcaggggcagacttgggggccctctgcaggcaggtgaccggcccatggccatgtggccctgtctctgcagctggaacctactgtgaatgcagccttggcctcagccgcgaggccctcatcgccctccttgtggtgctggcgggcatcagtgccagctgcttctgtgccctcgtcatcgtggcaattggtgtcttgcgggccaaggggtgcgtgaaccctggggccgggagaggatgggagtgaggccaggctggctgccctgggcccttggtcttgcaagaagggctttaccccctgggtgggctgtcacctggggtaggaatggcgtttcctaggcgtgtgctgggggagctccgggggcccagcactgttccaggactcatgttggccttcgtcccctcagtgaaacatgcccgagacaagtggacaacaggtgagcaccagggaggccctcgagggaggcacgctgtctcaggggaggcccttggcggggggagctatcccaggggagtccctggaggaggaggggtgctgtccctggaggaggaggggtgctgtccctggaagaggaggtgtgctgtcccaagggaggccctttgtgggggtgcactgtcccagacgccagcctgtcctgggggaacaaggactctaccagctcgtgatgacccggcccgtcatgcaggttggtggagaattttggggtccaggaagatctcatggacctgcacccggtttacgtggagtcccagctaatggacgctgacctggaggtctccctggtgccaccactagaggatcagagccttgtggccatccccatggaggcttcttcagaggagccgccaccacccccgcccctaccacctgagtagagggctgagggcagctgggggaggggaattaaagcgtatttagtggctgtgcactgtcctccctgcaggccctcctgagggcagctgggggaggggaattaaagcttgtttagtggttgtgcaccgtcctccctgcaggccctcacacccctcacggctgcatcatggggggtgcacgcgcatatgggtctcatcaaagcagagtgcccaggccccacagcaagttcccctgttcctctgccccctggcagtaagccatacccctaatgtttccaccttctctgccacagctggtcagcccggctccttcctgcacccagctttggaaagcccctagaacaggacctgcaactggcaactgtgaagggcgctgggtttaacagcaggacttgggctgatacccctgccccactgcactggtctgtacctctatcccaggagagtcctgggggggaggggtggggcaggcacgcctctcctgcctcgggtgtgctgtctccctccaccccaaggcctgtctccaacccaggccctatccagcatgggaatgggaccatccctgcgtgggggccactccgcatgtgcacgttgggatcactttgcggagcctgggtggggtcgagacgggtgaggagcaggacctctgggttgcattgcgtgtgggcgcctgttgcagccgtgagctgggcgggtgcaggtgggcggtgtcctgctgctcaggtcagggctcggcgggcgcccggtggtggacaaggcggggtgaggtggtcttgatagcgctgtggccggcgctgagccaagagtagtttggagctcccggacaggtggctggcggtgccgggcgttggctgtttgccctgcccccgccccaagcgtggatccagccgtgggacaggaactgcctgagctcgggccagagagttaatatttgtgcaggcgccgcaggaacgggctccgcggacgacgggctccagggacgcacaggcagcgggcctcccaccgcgggtgccgggggcgggggggctgcccccatgcggggcccttcctggtcgcggcctcggccgctgctgctgctgttgctgctgctgtcgccttggcctgtctgggcccaggtgtcggccac

SEQ ID NO: 43268 - DNA, 2300 bp, Homo sapien
gagagggttctggggcacagccagcatccagtctgcagaccccaaccccaggtaccccaggaaggggatggtccagcctcggcccaggcaggaggagcagcctcaggacagagccgccaggaggccggcgggcgggcggggctgagttcaagggagggtccacagcttctccaggtctgctgtgaaggaggctggacctagatgtgttttcctttttcttttgcaagtaagagggccttgctgtgttgacaaaccaagggaacttactcctaggggagggcagggcgatgtgtccactttagaaaccaagggggaagcttccttccggagacagacaaggggagggccaggcggaggcccccagggcaggaggccaaggggctgtggtagggccgggctgctgaccatggtggcgaatgcctgctgcctccctccaggcctcagcttggctctggaagagtccaggtgtcccttgcagcttgtggagggtctgtgtggcttgcacctgctctcggtggaaaggagcaccctggccatccccacacctcgagctctggcctgtgatacagcctggtgtctctggagcctgcgggcaccgtgccccgctgtgttctggtacaaatcatccgtgtggcccggctccgtgctcggtccctttccccctgcccctctggctgcctcaggctctccagcgttgcttccaggcaaggccccaatggcctccctccagggtcctgccttgggtcccaggcatgactcagccacttcctgttgctcaggcctgatgtgctgggacagccacactctagtgccctttgtcttaacttcagtgggacacaggagtggctcagggaggccccggggctgtgctgagaggtcccaccagcagagctcctggccgagcgaccttgttggacacgtggctggccatgcagcccacagcgtcacccctgagcccttgcatgtgtcctgcggcaggctgaccagtggcggcgtttgtggaggtcatggccttggagccagaactaggacctagcaagccactgactccacttccattttctgtccataaagaggggtttgtttccattagaagctgccggatcctggaaggactcaggagcccttggcccacagagcaggtgtgtcagtgccccagtgctaccagaacaaagtaccacaaaccagcgggcttaaaagaaacatatcattttacagaagtcagaagtctaaagtcagggtcagcagggccctccgaaggctctaggggaggctgcttcctcccctcttccagcttctgggggctccaggagctccggggcctgtgggtgcctcgctctggtctctgccgcgtcgcccgtgatgttcccccgtgtctctgttcctatctccctcttagaagaacactctctctattccagggtgacgtcatcttaattatatctttaatgaccgtatttccaaataagatctcatcagaggcaccgggagttaggggttcatgtgtcatttttcgaggggcacaattcagtgcatgacaatttgccccatggtgggcccctcccacgtgcaagtgacagccccagtgtccccaaaagtcttcaccatttcagcatcaactccaagtccaaaatctcatctaactaccatccacacaaagttccacacacatctcagcctgtaaatgcatcttaacgaggtccaggtgaggctggagtgtgcgccattcctctacgtaaatagatctaaacaaggtacaggtgaggctggagtgcgcgccattcctccagctgggacgccgtgaaatcagccaacagatgatctgtttcaaaagttcagccgtaagacaagcatacacattcccaccccaaaagggaaaactgggaggaaaaaggacagcgagtccaaacccagcagccgaaattccacttgacttccaggcctgcgaatcctctttggccccctgctccgtcagccttggcctcggcggctctgctcttggagcctgccttcctttcactccagcctggcagcacttctgcgggtgtaaaattctcacaccttgttggcttatgcagctcaccagtgccgaagccttcagacaggcgggtccgcagccctttcccggaggccccacctgtccctgtctgctgctgagatggttagttggatacacaggtcacacctcatgtctagcaaaccctggtccagccacacccttggccacgtctcagagctgcctggatagagtatttttcagatccccaagggctggtgcctttttgcttaatggtccctgc

SEQ ID NO: 43269 - DNA, 2300 bp, Homo sapien
ctcacatggggcctccaggcacctgtgctgttggggtgtggtctggggctctgctctgggctcccggagccataggggagctgggcccagccatgtgggtccccccatcctgttcccatgtgtcacctgtcctttcctcagtgtttcagagtccccctactgaggtgcagattggctgtgatgttgggttttcaaagagggagggtgtccccaaagcggtgggcaagagtgggtagtagggtggagagggtgaacatccgtgcggtcttgccactgggtagcaggtctgtggggcatgagcacgcctgggccccgcggcggaattgccacctagaggtttgtgctcgcctgggccccccggctggtctcaagggcgtgtttatccatttaagtgggggcaagtgtgcccaccaggcacagcgcacaggtcgtgtgtgtctgtcatgtctcacgctagggttgctgctgccagtgataagtgtgggcactggcgcgtgtgagaggcacgaagactgcaggggggccgggacgtcgccttttgggccatcacccaccctgcaggttttgatgtgctccagcctccagacgcaggtggccttcgggctcccctcggtcccggccgacagggtgggtggccgtgaggctcctcccagcctctgagtcagcccggggctcaccatgcctccctgcagctcacactagcgttctcctgacagtggatcgagcgggtggtcggctggctcggcaaggtgttcctgcaggacggccccgccaggcccgcatctcccgaggccggcaacaccctgcgccgctggcgctgccacgtgcaaaggttcttctaccgcatctacgccagcctgcgcatcgaggagctcttcagcatcgtccgaggtggtcctgccccggccctggggtccgctctcccgtctggggagtcttcccagggccttccccgtgtctcctctgtgtctgcatctgggctccctgtgccttcaccgtgtctgctctgtgtctgcgtctggggctcccagggcctttgccgtgtctgctctgtgtctgcgtctgggctccctgtgtctgcgtcttgggctccctgtgccttcgccgtgtctgctctgtgtctgcgtctgggctccctgtgtctgcgtctgggctccctgtgccttcaccgtgtctgctctgtctgcgtctggggctcccagggccttcgccgtgtctgctctgtctgcgtctgggctccctgtgtctgcgtctggggctcccagggccttcgctgtgtctgctctgtgtctgcatctgggctccctgtgccttcgccgtgtctgctctgtgtctgcgtcttgggctccctgtgccttcaccgtgtctgctctgtgtctgcgtctgggctccctgtgtctgcgtctgggctccccgtgccttcaccgtgtctgctctttgtctgcatctggggctcccagggccttcgtcgtgtctgctctgtgtctgtgtctgggctccttgtgtctgcgtctgggctccctgtgccttcgccgtgtctgctctgtgtctgcatctggggctcccagggccttcgccatgtcggctctgtgtctgcatctgggctccctgtgtccacgtctggggctccctgtgccttcgctgtcgctcttgcaggggggtgcaccgggcagtgctgggactgtccccactgcggcgtcccccgtgcctggatcagggcaggtgtggcagatgctggacagtgcttctgggtgtccactgctgtgctgccttggccttggctcctgctggggactggcccctgggtgttgctctgtccaccctgtggcattgtggtcaaatgcatcagcacgccagagtgtcggggggatgtctggtgcctagcaggtggtctcatcatcgtcctggggctggcaagcacgtgtcctttcccacaccgcacacactctgcaccagcctgcacgtgcgcacgcatccatgtctgtccctgagggatgttcttcttcttgtagacttcccagactcccggccagccatcgaggacctcaagtactgcctggagaggacggaccagaggcagcagctgctcgtgtccctcaaggctgccctggagactcggctcctgcatccaggtgctgtgtgctgcccggccacccagcactctgggcttagacactcaccaggggacccatgtccagggagcctggggcctagtctgccagccctggacttgtaggtctaaggaagaaatgggttgagaagcaattggtgaggtccttaggggatctgaggtgcccgtc

SEQ ID NO: 43270 - DNA, 2300 bp, Homo sapien
ggagcacagagcactcccaggctctgctgtccccgcccagctggcctctatccaggtagggacactggccttccccatgtgatcagtggcagcaggtgtggctgtcgggggccctagccttatctcctaggatcaactctgaaacgacaaccaactgcactgctaccctggccgcagaggtacagatgccactgtttgtgcctttcagtgcagtctctggtctacagtgacaaaaggactcaagaggaggatgagaaaagttgccgtgtaacttttgcagggatgagcccaacagaagcccttcacggtctccctgacccctgccagcaaaaggagcactcctttagtccacctttagtccacctaagacctctcaagtagctgcatggctacacccccgttcaatgtgacaaaaccaccacaaatggccaagggtatgacaattgctagagaactacaacaggacctgtctctcacaacaaacccctctcctctccaaactaacaagagactgcttgccctcacagtgacctgatcttcctggagagaagcagcagcaagcttctgttcacaattacagggcaaggaatgtcgacgagggtgagaatcattcctccccaggatcgacaaaaggcacagtggaattctgcagagtccaggaagtttggagttgctaagaaatttgctgctgcagacacaagccacatagggccttaccagggtcaaggcatgaatctgtgggactgaaggtgagtgacagaagagagacacctgtgtccaggacacgctgcacaggaatccctgggactctctctctgtcatgttcctggttatcaggacggctcaccagctttctgctgaggccagctggacccaggggagcagcggggaaccagaaggagcaagggcatggccatcgggacagactactcacaagacctggctgagctgatggaactgctccagagcctggcgacaccagcactgttgcttgtcactgctgcaccctgcacacagcgggctctgcaggagccggtagtaccggcgacgggcataccggctgtccagctccccttccagttccgggtctgtgcccccttcccccttcctcttactctgcatatagactctcaagaagcacccatacagacgctggatcatctcttggaaggttctgggggtgctaaagaacaagactccgcgcaacatagtgtggacttcttctcgcagcccctgagcaccagtgcccatcagcaagcccaggcgagtccatttctccagcagctctaggctacgcaggtagggatccaggcggctctccagcaggccaaaagcgtcaaggagtagcaaaaggcactggggctcatccgcagagttctcgcattgggagatggcattccagaactcaggggagatgttggcctgcagatcgttctgcagcacctccacgaaccactcctccaggaccgagtgtagcccgtggcccctcagaacctccaccgccgcccggagctcctcttcctttggcgggactgcaccgctggtccgggaagacacctggggtgcagaaaaccgtgaggcgaggggaacacaacatagaggtggggagaggcggggaagggaagaagctgagggggaggctgcaaaaactccgctgccccctgtccgtgctgcccggacgttgggccgaagctatggaagggctgtcagcggagctgaacgaaacgaaacggaaaggtggtggaaaatggcaggacaggacagaggcggatgatggacagagccgtatgaacccgagggtagcggccccaaagcgcgtacggtcccggaaactccgcgcggggccgcccctctcttcccaggcctcaccagccccagcgcagccggcggcaccaggccggtgctcacggtgttccaggccactaacaactcctgtccgggccgggagtcgctgtccccctccgccaccacaactgccgccgccatctgcacccaccgactccgagattcgctcggcgcggcgcgcggcgatgacgcacgtctgcacgcgcagccatgacgcgcacaaggcgctcagcgatgacgcgctagttcggcgcgccgtgggggagtcgtgcgcaggcgcggacagcgctgcttccgcggcggttggggtggtggggccccgggcggcgttgaccatgacccagcagggcgcggcgctgcagaactacaacaacgagctggtcaagtgtgagcggcgcagccgggacggggaggtcgggagggccgcagggccgggttcccggctcgcagcgggg

SEQ ID NO: 43271 - DNA, 2300 bp, Homo sapien
cctcaaagccaggctgggttagcactggcccgtgctgggtgctctgcccaagacctggctcttcacactgagcagaaataaccacatggctagcgagaaccggataaagaccaggacccaggatgccccaggccccacagacagccccacagtcactcccacagcagcctgggttcctcaatgggcctggccacgctgcccctgcccgaaatgccagcgaggcacagactgcccacagccgggagccccagccggtcctgacgccttgccgtggcaacacccctgccgtgcctatcccctgatgctcggcctggcctcccgagctccaccttgaggtaggcggcctccgtctccgcgatggtccggtcgaactcgttgcgagaggcaatcttgcgtgccaggttctcgttgacgcgggccagcttctctgtcagctgcctcacctcattctgcagccgctgcttctcgtcctcctcctcctggatctgccggcacagctcctcccgcttctggcacagctcctctatgcctgggggccgggaggggcggcgctgtgggcccagggcaggagcgcggcggcggagggcgggcctccttccacccgaggaagccagagtcaggcaccacccccgagcgcccggcgcggggcctgcgagccagcgagggctcgggccacggacacccggcctccggcacggagggctctgctcagccgcgcgatgcccgcagcgaggcgggtccaggggcaccccgctgcgagccgggaacccggccctgcggccctcccgacctccccgtcccggctgcgccgctcacacttgaccagctcgttgttgtagttctgcagcgccgcgccctgctgggtcatggtcaacgccgcccggggccccaccaccccaaccgccgcggaagcagcgctgtccgcgcctgcgcacgactcccccacggcgcgccgaactagcgcgtcatcgctgagcgccttgtgcgcgtcatggctgcgcgtgcagacgtgcgtcatcgccgcgcgccgcgccgagcgaatctcggagtcggtgggtgcagatggcggcggcagttgtggtggcggagggggacagcgactcccggcccggacaggagttgttagtggcctggaacaccgtgagcaccggcctggtgccgccggctgcgctggggctggtgaggcctgggaagagaggggcggccccgcgcggagtttccgggaccgtacgcgctttggggccgctaccctcgggttcatacggctctgtccatcatccgcctctgtcctgtcctgccattttccaccacctttccgtttcgtttcgttcagctccgctgacagcccttccatagcttcggcccaacgtccgggcagcacggacagggggcagcggagtttttgcagcctccccctcagcttcttcccttccccgcctctccccacctctatgttgtgttcccctcgcctcacggttttctgcaccccaggtgtcttcccggaccagcggtgcagtcccgccaaaggaagaggagctccgggcggcggtggaggttctgaggggccacgggctacactcggtcctggaggagtggttcgtggaggtgctgcagaacgatctgcaggccaacatctcccctgagttctggaatgccatctcccaatgcgagaactctgcggatgagccccagtgccttttgctactccttgacgcttttggcctgctggagagccgcctggatccctacctgcgtagcctagagctgctggagaaatggactcgcctgggcttgctgatgggcactggtgctcaggggctgcgagaagaagtccacactatgttgcgcggagtcttgttctttagcacccccagaaccttccaagagatgatccagcgtctgtatgggtgcttcttgagagtctatatgcagagtaagaggaagggggaagggggcacagacccggaactggaaggggagctggacagccggtatgcccgtcgccggtactaccggctcctgcagagcccgctgtgtgcagggtgcagcagtgacaagcaacagtgctggtgtcgccaggctctggagcagttccatcagctcagccaggtcttgtgagtagtctgtcccgatggccatgcccttgctccttctggttccccgctgctcccctgggtccagctggcctcagcagaaagctggtgagccgtcctgataaccaggaacatgacagagagagagtcccagggattcctgtgcagcgtgtcctggacacaggtgtctctcttctgtcactcacc

SEQ ID NO: 43272 - DNA, 2300 bp, Homo sapien
gcttggcatccccagctgtctctctgggctgggtcctatgctggccaccagggtgtggcagagaacaggacgagcaagcagagctcctgagaggagggtgagccgtgggccagtcaggggaagaggaccggcggccctgctggggagggctcagggtggggctggcctggggagggtgggcaccctcagcggtgtccctgaggctagtggggcagtcacagggaggccactccagaccctcctccctcctctcccaagggggagcctcaggctctggctctgcaggtgtctggcagccccatgctgttgatacgggcaagcagcaggctggcacggatctttacaaagataatctttattcataatcacaggccacaggggtgagacctgaggtttgggttctgtggtgaaggagaacccctgtcctcctgtcccttgccctgggcctctgctggctgaggagggacaaggtgagggggcccccatggtgctcagacaaccagagcctccctggcagggcaggagtgtgggtgccacagagacaagccccttgcagagctgacctggagcccaccatccccatagcctgtgtgagcatgaagcgaggacccccgggtgggctgtgccctgggcttgtcactgatgccagtggaggctggcacctgcccctctcggcacctgagacagtgagggaaggtagctgctgccgtgaagaacaaagatgctctgagcacacacttgctggggctgagctgaggggcacacggaggcaggccctgcccgtggtctggtcagctgtccctgccgccgctacttttctggtctggggctgtagccttggtcaggttcccagcttccctcttgagaacgctgagcaaagtctgggagctctccaggatctggggccagagaagtgagaaggttgttaatgttcacctgttggtaaggtcctaagccccagctgtcctcacactcaggtgctgggacctggctgggggtgctgtagccaagggatcctgtgtgggggaaggcggaagcccaaggggactggcagacggggtggcagggccctcttccctccggaatctgacccaaaacacttcctctccaccctcaaagccaggctgggttagcactggcccgtgctgggtgctctgcccaagacctggctcttcacactgagcagaaataaccacatggctagcgagaaccggataaagaccaggacccaggatgccccaggccccacagacagccccacagtcactcccacagcagcctgggttcctcaatgggcctggccacgctgcccctgcccgaaatgccagcgaggcacagactgcccacagccgggagccccagccggtcctgacgccttgccgtggcaacacccctgccgtgcctatcccctgatgctcggcctggcctcccgagctccaccttgaggtaggcggcctccgtctccgcgatggtccggtcgaactcgttgcgagaggcaatcttgcgtgccaggttctcgttgacgcgggccagcttctctgtcagctgcctcacctcattctgcagccgctgcttctcgtcctcctcctcctggatctgccggcacagctcctcccgcttctggcacagctcctctatgcctgggggccgggaggggcggcgctgtgggcccagggcaggagcgcggcggcggagggcgggcctccttccacccgaggaagccagagtcaggcaccacccccgagcgcccggcgcggggcctgcgagccagcgagggctcgggccacggacacccggcctccggcacggagggctctgctcagccgcgcgatgcccgcagcgaggcgggtccaggggcaccccgctgcgagccgggaacccggccctgcggccctcccgacctccccgtcccggctgcgccgctcacacttgaccagctcgttgttgtagttctgcagcgccgcgccctgctgggtcatggtcaacgccgcccggggccccaccaccccaaccgccgcggaagcagcgctgtccgcgcctgcgcacgactcccccacggcgcgccgaactagcgcgtcatcgctgagcgccttgtgcgcgtcatggctgcgcgtgcagacgtgcgtcatcgccgcgcgccgcgccgagcgaatctcggagtcggtgggtgcagatggcggcggcagttgtggtggcggagggggacagcgactcccggcccggacaggagttgttagtggcctggaacaccgtgagcaccggcctggtgccgccggctgcgctggggctggtgaggcctg

SEQ ID NO: 43273 - DNA, 2300 bp, Homo sapien
gcatgcagggccctgccctggtgaacctgcttgcgtgtggcgggagaggctgcttcctttgtgcctgctcctgcagatgctttttggggaccacggatggcaaggttgggttaagaggctcccacctgggcagcctataaaaactagggatttctgagaaactggttcgttggggctgctcggggctccagaattggcatttccaagccccgcaggcacctgccggaggtcggaggacccctggtgaaagcagggtccgggccagagtgtggcctgtgcaccgtccacggacacgggtgccttcggtcctggagcagcgcccttcctgcaccgcgctctcagcggacggaacaggcggcctcggtgctggcagcatgaggaagtcccaagctcagccaaggtcactcggggcgcagggtccaggggccgcgcacccggctacccccagggacgccgggagctgagagcgcagaggcggaagtggggtctgccagtgagcggcgcgaggcaccggggtgtgtccggggggccgtccccaatggaggccagctccggtgataggcgttgtccaatgaagtcccttgggaggcggggttgaggcgagtgttgtccaatcggtagggtcacttgaggggcccgccctcctcccctgccataggtgggcctcccgcacggggcggggagagcgggctttccccaatggtcggtggcccgggagggggcgtggccgcggcgcccaggctggccgcggcggcggctgccactccggccctcagtccagccgtccgctgccgcgttcgcagcatggccgccctggggcggccgggctcggggccgcgcgctgcggtgcccgcttggaagcgtgagatcctggagcggaagcgggccaagctagccgcgctgggcgggggcgcggggcccggggcggcggagcccgagcagcgggtgctggccgagagcctgggcccgctgcgcgagaacccgttcatgctgctggaggccgagcggcggcgcggcgggggcgcggcgggggcgcggctgctggagcggtaccgccgcgtgcctggcgtgcgcgccctccgcgccgacagcgtcctcatcatcgagacggtgcccggcttcccgcccgcgccgcccgccccgggggccgcgcagatccgcgccgccgaggtgctggtgtacggggcgccgcccggccgcgtcagccgcctactggagaggttcgacccgcccgccgcgccgcgccgccgcgggagccccgagcgcgcccgccccccgccgccgccgccgccgcccgcgccgccccggcccccgcccgcggcccccagcccgcccgccgcgcccgggccccgcggtggcggggcgagccccggggcccggcgcagcgacttcctccagaagaccggcagcaactccttcaccgtccacccccggggtctgcaccgcggcgcgggcgcccgcctgctctccaacgggcactcggcccctgagccccgggccggccctgccaaccgcctcgcgggctccccgcctgggtcgggacagtggaagccaaaggtggagtcgggggatccctccctccacccgccccccagccccgggaccccgagtgccactccagcctcaccccctgccagtgccactcctagccagcgccagtgcgtctccgcagccaccagcaccaacgactccttcgagatacggccggcccccaagccagttatggagaccatccccttgggggacctccaggcccgggcgctggccagcctccgcgcaaactctcgaaattctttcatggtcatccccaagagcaaggcctccggggctcctcctcctgaggggaggcagtccgtggagctgccaaagggagacctgggcccggcctccccgagccaggagctcggatcccagccggtgcctggaggggatggtgcgcctgccctcgggaagagccccctggaggtcgaggcacagtgggcagtcgaggagggggcctgtcccaggacagccaccgccctcgctgaccgggctattaggtggcagaggccgtcctcaccgccccccttcctgccggctgcttcggaagaagctgagcctgctgagggcctcagggttcctggcttggccaagaatagccgggaatatgtgaggccggggctgcctgtcaccttcatcgatgaggtagactcggaggaggccccccaagcagccaaactaccctacctcccgcaccctgccaggcctctgcaccctgccaggcccgggtgcgtggcagagcttcagccccggggcagcaa

SEQ ID NO: 43274 - DNA, 2300 bp, Homo sapien
cacctgtaaccccagctacttgggaggcgaaggcaggagaatcgcttgaatcctggaggcggaggttgtagtgagccgagatcgtgccactgcactccagcctgggtgacaagagcaagactctatctcaaaaaaaaaagaaaaagaaaaagtttattttctccagcttaatggagtggcaggagaataaggcaagcattaagctagcggctgctgcagactgtcatggggcacagaagctgagaagggcatccccaagttaaaaaaaaaaaatctgttctgcatcattgcagagacccaggcgaccttggtgtgggaaacagcagtgtctactgagcaggctgctgactgcagggcaggtgatggaaagaaggtgatgtccgtgcactccaattccccttctccccgtgactccaagcgatctccctattgtctgcaggcttgaaaggctgtggaagcactctgaagccctccctggggcagaagggacttgtcagccgggaggctgtgccctcagggtcatggtatccggagccttgatgaggggacgttcaaccgatgggagaggagtaaccttaacgtggcagcagggtggaataatcagacacaggggtcggccctatggggcccaccgttaccctggctttttttttttttttttggctctgaatgcattggagagctctccaagcatgcagggccctgccctggtgaacctgcttgcgtgtggcgggagaggctgcttcctttgtgcctgctcctgcagatgctttttggggaccacggatggcaaggttgggttaagaggctcccacctgggcagcctataaaaactagggatttctgagaaactggttcgttggggctgctcggggctccagaattggcatttccaagccccgcaggcacctgccggaggtcggaggacccctggtgaaagcagggtccgggccagagtgtggcctgtgcaccgtccacggacacgggtgccttcggtcctggagcagcgcccttcctgcaccgcgctctcagcggacggaacaggcggcctcggtgctggcagcatgaggaagtcccaagctcagccaaggtcactcggggcgcagggtccaggggccgcgcacccggctacccccagggacgccgggagctgagagcgcagaggcggaagtggggtctgccagtgagcggcgcgaggcaccggggtgtgtccggggggccgtccccaatggaggccagctccggtgataggcgttgtccaatgaagtcccttgggaggcggggttgaggcgagtgttgtccaatcggtagggtcacttgaggggcccgccctcctcccctgccataggtgggcctcccgcacggggcggggagagcgggctttccccaatggtcggtggcccgggagggggcgtggccgcggcgcccaggctggccgcggcggcggctgccactccggccctcagtccagccgtccgctgccgcgttcgcagcatggccgccctggggcggccgggctcggggccgcgcgctgcggtgcccgcttggaagcgtgagatcctggagcggaagcgggccaagctagccgcgctgggcgggggcgcggggcccggggcggcggagcccgagcagcgggtgctggccgagagcctgggcccgctgcgcgagaacccgttcatgctgctggaggccgagcggcggcgcggcgggggcgcggcgggggcgcggctgctggagcggtaccgccgcgtgcctggcgtgcgcgccctccgcgccgacagcgtcctcatcatcgagacggtgcccggcttcccgcccgcgccgcccgccccgggggccgcgcagatccgcgccgccgaggtgctggtgtacggggcgccgcccggccgcgtcagccgcctactggagaggttcgacccgcccgccgcgccgcgccgccgcgggagccccgagcgcgcccgccccccgccgccgccgccgccgcccgcgccgccccggcccccgcccgcggcccccagcccgcccgccgcgcccgggccccgcggtggcggggcgagccccggggcccggcgcagcgacttcctccagaagaccggcagcaactccttcaccgtccacccccggggtctgcaccgcggcgcgggcgcccgcctgctctccaacgggcactcggcccctgagccccgggccggccctgccaaccgcctcgcgggctccccgcctgggtcgggacagtggaagccaaaggtggagtcgggggatccctccctccacccgccccccagccccgggaccccgag

SEQ ID NO: 43275 - DNA, 2300 bp, Homo sapien
ccacccacctcggcctcccaaagtgctgggattacaggcgtgagccaccacgcctggcctgcttttgcttttaatcatttaggggtgtaaaaaccatcctcagctcaagggtcatacaaaaacaggccttaggacattgtttgctgatccctgctctacagagtgccaacaaggcccacaaagaccacactctggcaagaagtcatgggctctggggtcacaaactattcaatgggtctttaacatgagcccagattgttgtcttcatacagggtgggggggggggtgcctgagttacccacctcctagagcaggaaggagggattctccagaacaagtgattcccaccaccaccatccactaagctctagccacaggtttcaatccatttaaaaccgcagctctgtaaccagctacaccacgtagcagagagtatctcaatattcatcctatttaacccttgagggttacaggcaaccactattcatttcaggaaaacattctcttactttatttgcatctcagcaaaggttctcatgtggcacctgactggcatcaaaccaaagttcgtaggccaacaaagatgggccactcacaagcttcccatttgtagatctcagtgcctatgagtatctgacacctgttcctctcttcagtctcttagggaggcttaaatctgtctcaggtgtgctaagagtgccagcccaaggtggtcaaaagtccacaaaactgcagtctttgctgggatagtaagccaagcagtgcctggacagcagagttcttttcttgggcaacagataaccagacaggactctaatcgtgctcttattcaacattcttctgtctctgcctagactggaataaaaagccaatctctctcgtggcacagggaaggagatacaagctcgtttacatgtgatagatctaacaaaggcatctaccgaagtctggtctggatagacggcacagggagctcttaggtcagcgctgctggttggaggacattcctgagtccagctttgcagcctttgtgcaacagtactttcccaggatccacaggaaatactcagagtccacctggacattttacttatattcagtttccaagtgtcagaggggttcaggactgtctggcctggggggcctcctcatgacctcaattcaggattatctactcaaagcattaaacaaaaggaaatacattttcaggatgaaggctgctcttttaagccctgctgaagaaaccatttcaaacaggattggaatagggaaacccggcactcagctcggcgcaagccggcggtgccttcagactagagagcctctcctccggtgcgctgcaagtagggcctcggctcgaggtcaacattctagttgtccagcgctccctctccggcacctcggtgaggctagttgacccgacaggcgcggatcatgagcagctgcaggagaatgaagagcggggacgtaatgaggccgaaccagagctcccgagtctgctccgccagcttctggcacaacagcatctcgaagacgaacttgagactcaggaccgtaagtacccagaaaaggcggagcaccgccagccgcttctctccatcctggaagaggcgcacggacacgatggtggtgaagtaggtgctgagcccgtcagcggcgaagaaaggcacgaacacgttccaccaggagaggcccgggaccaggccatccacacgcagtgccagcagcacagagaacaccaacagggccagcaggtgcacgaagatctcgaaggtggcgaagcctagccactgcaccagctcccggagcgagaagagcatcgcgcccgttgagcgcgggccggggcccggccgagcgtgccacccgcggggctgcgtctcctctccccgtggccctcgcccgcgcctgccgccgctgctgcgagcgagaggcagcgagcggccccgccagccccagccctcggccctgatgcgccggcaatcccccggccccgacccgggactcaaccctggccgcccgtgaacgcccgcctcgatcggacgccatgcccccacagggcgcgtccctagtgcgtcacttccggtcgacggcggaaggcggaaggcggagcggtccctgcaacccggccggcgggaactgccttctagtttttagtctcagaccagaccaccgggcgcaccccgatgccgagcccgcagcttctggtgctcttcggcagccagacaggcacggctcaggatgtgtcggagagactgggtcgcgaggcccggcgccggcggcttggctgccgggtgcaggcc

SEQ ID NO: 43276 - DNA, 2300 bp, Homo sapien
aacaatccctttgccaagaaatcccatggatccctctcaggctttatctgatttgacttctgtgcagctttacatgccagagcccttcctggaacactcactcccccagtcctctccttggggtgctgcaccctctcttctagctgcttggtcactctcctgccctcctgggctctaacgttctgggcagcctgtcctgtggggagagaggagcttcctcttctcacacttctgtattgtggctacctcaacacctatctccgccccaggatcttccttggagcgctagtcctactgcacttctccacttcaatgtctccaggttcccttcctgcacagccccctactcccaccgtgttctctgatttctgtggatggaaccaccatccatcttggttccagagcccacatccctgtctcgattctgcttgacctattgggtccgttccatgtcccggggactctctcttcctgacaccactgcaatgtgtccacttctatcttctgccaccacttcagctcagatcggtagcatctgctgcctgtcctgtgcatctcatggcattattcctgctgtcctgcagaccagtgcggttttgctagcttaggaacatgactgtgtcacccctacagttccgacaacccttcatttcaagcccatctgccttgctgtggttactcaggctctttggactgggcctggcttcctgcctctcttctcctcccctcttgccccagtgtactcctcagcttggccaccctgagctgctttccacttttcacacaaaccaaatcatctttttcctctgcgctgactgctccttcttcctcggtgcctgactagccctcacgcatccttccgtgactcagcttacactcttttcttccagaaacctctgcctgggccccaaggttgggtgagataaggctcgatgccccttatcagtgctcctgtgacatatgctactttccccagcagcaggtgtttgctggcactgtcattgcccgttagctgcttctgctacagtgtgaactctgccaggatggaaatatggctgctgggttcacagctggatccccagcaccagactgtgccaagaatagaatatgtgcttaaaagatggtcagagaattcagcaacgttccctgagggtcatacagtctagaaatacacacaagacccagactagatgcacatatagatagccctggaaaaataagaaaggttaaaacggataataaggctatttggtggctacgacgagtttattagagagggcaaccggagcccccagccccactcacggacgttctctcaaatccacctctgaaggtgcatgagataaaggagagctatttactgcacctagacgccaggcaatgaaaacggggtgagggtcgagggcagggatctgaggagccacatcaggccagccttaccttcatgttgtcaggggggtctccttggcctgtagttgcacaaacaaatatcaccaggggctcgttaatcagattcacctcaacaaaaagacacacacacgtaagacctccggctgtaaggaccgggcgtccttcccaaaacttgacccccttctcctttactcaggctgacagggcagagggatttatgtgagcagccagaccgtcttctctttcaggttccaacctcctccaggtgctaaactgaactccccttcccaaacctccttccctaaatccgccataagggaaagacccgctctcagagaaaatgcgacgccttttgggtcgatgaccccgcgaggcgggcacgccaggcctgctcgtcccccacgccgaggccctagcgagccctcaccaccgggtaggagtccagggcctgcacccggcagccaagccgccggcgccgggcctcgcgacccagtctctccgacacatcctgagccgtgcctgtctggctgccgaagagcaccagaagctgcgggctcggcatcggggtgcgcccggtggtctggtctgagactaaaaactagaaggcagttcccgccggccgggttgcagggaccgctccgccttccgccttccgccgtcgaccggaagtgacgcactagggacgcgccctgtgggggcatggcgtccgatcgaggcgggcgttcacgggcggccagggttgagtcccgggtcggggccgggggattgccggcgcatcagggccgagggctggggctggcggggccgctcgctgcctctcgctcgcagcagcggcggcaggcgcgggcgagggccacggggagaggagacgcagccccgcgggtggcacg

SEQ ID NO: 43277 - DNA, 2300 bp, Homo sapien
tccctattgctcttctgagtgacactcgcccgaggccccacagaggggccaagccagaccctatgcgcagggctgctcctccagcctgttttgcccacgcgagctcccgcaccagcggcaccgtcccctctgggctcagcactctgcaggccctggggctctgcctagagcaggtgcggtctggccagtccagcggagagaggagctgaaggaggccaggatgtccagggccaggtgcggggccagagctggtcacagcgtggcagcggaggccctcgaagccctggtcccctgcctcacggtgaccagcaagcccgagggctccacaggcagaaggcggacccaggagggcagggaagccccgggtgaggaagcggagaggcccgggcctgcgcgctggagtgccaggggccaccctgtccgggcaggtgcggtcctcagggccgcctccaccccgcactgggctgccagcctgtccttcgcgcactcccaccggacccgtccgtccaccggcctcggccttctgatccgctccgcccgccccgctcttgccccttagagtcacagcgatctatctgagctacggcaccgggcacaggcggagctggaggactcggggccttcccatggggcggggggccggggacgggggaaggcaccggtgggccctggaaccagctcccctgggatcctccgcgcaggtcccctccctctcactccagagtcctgaggcctcctactgtgagggaggagaacagccggattctcctcctgaatctgggggggcgggggcttgaccaggacccaggatcagcctggagagaactgggggcgacgcgggggtcctgccccccacgcagtccgcgggcgagagcgacgccgggagcggaccgaggggcggccgggaggctggccccgccccgcggaccccgcgcgggtccccagacggggggtggcgctgcgggcgcgggcgggcgccgcgcgcactgcggtccccgcgcctccgccgcagagcgcgccacgctccgcacgcacctgccgccgtcgccgccgtgccgaaacccgcgccccgcgccccacgcccgcgcccgcgcccctcggtgccgcccgggccccgccatcgcctgaggtcgctgcggccgccgccggagccgccggagccccccgagctgccgggccgaggcgcgggcgccgcgtccgggcctgcctttgagacaacctctgcggcggcggcgcgcggccgggacgccaggctggggcaggtgagcgcagggggcgggggccgggggcggactcagcgcccctccccacgcgacgggggtcggccctcgggaaggtgcgtctggccttggaggcggggaccggggagggggttgggttctgaggcccgcggaggtcgggatcccacggctgaggtcagggtcagaggtcgggcgcccggtcctttgtgcagggcgagggctagggtgggggtggccggggcactgccctcatgccgtctctcacctgcagctcaggcctggcccaggcctcgcctctgctcctgccgcggagcctgccgccccggtcctcctgcagccagcgcttcggctagctgccttccctgggcgccctgtcctggagccatggggcccacccagcccctgcctgccccgatgtcccggcccgcggcctgctgacctcggctgcagggggagccccccccgcgccccctcgccagcctcagcagccagagaccctgggtgagaccctgggccagacccccagcccagggcagcctcccacccctccctgcccccgcctgcctccccctcccccaccccttcctcctcctcccaggactggaccagagaagccactgtggccactggggggggccctgcacccccaactctcgccggctgtccctaggagtccacgggccgtccggggccccccccaggcctggcgggaccaggatgctgccctgtcacctgccccccagccccacacaacgcccccacccacccgaacatccagtctgactggagacagccggatgccctctgaccccgggcccgaggcgggcagtggctggccgggcctcctcatgtcctgcctgaagggtccccatgtcatcctcaagatggaggccatgaagattgtccaccctgaaaagttccctgagctaccggctgccccctgcttcccgcctgctccccggcccaccccaactctggcacccaagcgtgcctggccctcagacacagagatcattgtcaaccaggcctgtgggggggacatgcctgccttggaagggg

SEQ ID NO: 43278 - DNA, 2300 bp, Homo sapien
tgagagggaggggacctgcgcggaggatcccaggggagctggttccagggcccaccggtgccttcccccgtccccggccccccgccccatgggaaggccccgagtcctccagctccgcctgtgcccggtgccgtagctcagatagatcgctgtgactctaaggggcaagagcggggcgggcggagcggatcagaaggccgaggccggtggacggacgggtccggtgggagtgcgcgaaggacaggctggcagcccagtgcggggtggaggcggccctgaggaccgcacctgcccggacagggtggcccctggcactccagcgcgcaggcccgggcctctccgcttcctcacccggggcttccctgccctcctgggtccgccttctgcctgtggagccctcgggcttgctggtcaccgtgaggcaggggaccagggcttcgagggcctccgctgccacgctgtgaccagctctggccccgcacctggccctggacatcctggcctccttcagctcctctctccgctggactggccagaccgcacctgctctaggcagagccccagggcctgcagagtgctgagcccagaggggacggtgccgctggtgcgggagctcgcgtgggcaaaacaggctggaggagcagccctgcgcatagggtctggcttggcccctctgtggggcctcgggcgagtgtcactcagaagagcaatagggagaggtgtgcgggtgacaggggcgctgctggaggggtccttacggggccctggcaagatggtggggcaactgaggcagcctgggcctggggagggccgggagcccagctccgccgcagactctgctcaccgacccggcgtgcgcccgaggaagcaccaggccgcaggccccgccccctcagcgagaccccaccccgtaggggatgagatcccgcccccgccacgaggccccgccccccaggccaggccttttcagacccgccattcagagctggagaaccccaagccgagtattggtcacatccgaaccgggtctttcgggaaaccccggagcgcgtgggcttctgggcaataatatttccacggccggttcctgccttgtttgcgcatgcgccataggcgccactcaagtggcaggcagggaggtgggcgggacttccggcgcctgcgcagtggacttccgtcgccggcctctcaagttttgggtccccaggagcacccagttctccccaaatcggggccgggttgcctgaactcatgtcccgaccggtctgactggccctacacaggccacgtctgactggaacccgcccttcctggtgctcccctgggccccaagggccccactgccgtgggtcgtccccgcggcactcgccagtgcccgctgcacccctgcctgcgccggtgcagatggagcctgggttcggctggaggcggggggcccaaggtggggacgctgggggggcgcgtgtggcccccacgcccgccagccagagggtaactgcagtttgagaaatgagctaaaaatgtcagtagtgtctaaagcccgtgtcactgattgtaagataagacctgtgacaaaacgtgcaaatcaaacattttttatcagtgaaaaaagcagaaaagccactgggcacgctggctcacgcctggaatccagcactttgggaggtggaggcaggcggatcacttcagtccaggagtttgagatgagcctaggcaacatagtgagacctacatctctataaagaattagccggcgtggtggtgcacctgtagtccttccagctactcaagaggctgaggtgggaggatcactagagcccaggaggttgaggccgcagtgagccagatcatgccactgcaccccagcctggatggcagagtgagaccctgtctcaaaaatcggccgggcgcggtggctcacgcctgtaatcccagcattttgggaggccaaggcaggcggatcacctgaggtcaggagttggagaccagtctggccaacatggtgaaaccctgtttctactaaaaatacaaaaaattagccaggcgtggtggtggttgcctgtaatcccagctactcgggaggctgaagcaggagaatcgcttgaacccgggaggcagaggttgcagtgagccgagatcgcgcagctgcactccagcctgggcaacagagcaagactccatctcagaaaagaagcagaaagcctccaagagccaatggctctcaagcatcttggtctctgctaagaagaggctcagaggcttagaagccctgcctcgccggggctttgaggtgtgtgagc

SEQ ID NO: 43279 - DNA, 2300 bp, Homo sapien
gccccagggcctgcagagtgctgagcccagaggggacggtgccgctggtgcgggagctcgcgtgggcaaaacaggctggaggagcagccctgcgcatagggtctggcttggcccctctgtggggcctcgggcgagtgtcactcagaagagcaatagggagaggtgtgcgggtgacaggggcgctgctggaggggtccttacggggccctggcaagatggtggggcaactgaggcagcctgggcctggggagggccgggagcccagctccgccgcagactctgctcaccgacccggcgtgcgcccgaggaagcaccaggccgcaggccccgccccctcagcgagaccccaccccgtaggggatgagatcccgcccccgccacgaggccccgccccccaggccaggccttttcagacccgccattcagagctggagaaccccaagccgagtattggtcacatccgaaccgggtctttcgggaaaccccggagcgcgtgggcttctgggcaataatatttccacggccggttcctgccttgtttgcgcatgcgccataggcgccactcaagtggcaggcagggaggtgggcgggacttccggcgcctgcgcagtggacttccgtcgccggcctctcaagttttgggtccccaggagcacccagttctccccaaatcggggccgggttgcctgaactcatgtcccgaccggtctgactggccctacacaggccacgtctgactggaacccgcccttcctggtgctcccctgggccccaagggccccactgccgtgggtcgtccccgcggcactcgccagtgcccgctgcacccctgcctgcgccggtgcagatggagcctgggttcggctggaggcggggggcccaaggtggggacgctgggggggcgcgtgtggcccccacgcccgccagccagagggtaactgcagtttgagaaatgagctaaaaatgtcagtagtgtctaaagcccgtgtcactgattgtaagataagacctgtgacaaaacgtgcaaatcaaacattttttatcagtgaaaaaagcagaaaagccactgggcacgctggctcacgcctggaatccagcactttgggaggtggaggcaggcggatcacttcagtccaggagtttgagatgagcctaggcaacatagtgagacctacatctctataaagaattagccggcgtggtggtgcacctgtagtccttccagctactcaagaggctgaggtgggaggatcactagagcccaggaggttgaggccgcagtgagccagatcatgccactgcaccccagcctggatggcagagtgagaccctgtctcaaaaatcggccgggcgcggtggctcacgcctgtaatcccagcattttgggaggccaaggcaggcggatcacctgaggtcaggagttggagaccagtctggccaacatggtgaaaccctgtttctactaaaaatacaaaaaattagccaggcgtggtggtggttgcctgtaatcccagctactcgggaggctgaagcaggagaatcgcttgaacccgggaggcagaggttgcagtgagccgagatcgcgcagctgcactccagcctgggcaacagagcaagactccatctcagaaaagaagcagaaagcctccaagagccaatggctctcaagcatcttggtctctgctaagaagaggctcagaggcttagaagccctgcctcgccggggctttgaggtgtgtgagcaatggctggggactgcaggcccgggaatctgagggcctcaccccacttcctttccagagccgtgacctcaggctcacctcctgccctcctctcaggcaagctgcagatgccctttagggcccaggccatgccccggatgtgaggggctgagtcactggtttggcagtgcccctcagagcccaggcctgggctgccacccacctgaggacgagggctgggccagctgtcgtgctccagttgctggggcctcttgggatcttgggaaccccatctctgagccccgccccatggccccgcccctcccaaggagggaaaaggcggctgccagtcgctcaactcaggcactgggacctagagctcagaagaccgagaggacagactgccgtgttgccaccacaggtaagcccttggccgccgggactgccctgaactcaggggcactgcagggtcagcccccttctctcccatctctcagcctccccgaccccattcccagctccatcccaggaccaatgccaccaggggagggggaggatccctggcaggggtggcagctg

SEQ ID NO: 43280 - DNA, 2300 bp, Homo sapien
cacctcctgtcctgcctcggggcctgggcttccgggaggaggtggcctggaccaggccttgaggatgaggcaggaggaggctggggccgtgggtgctgggccgtctcctggtctgctgagcagggtgggggcctctctggggctgagcaccaggcgctaggctgctctgcgcaggtactgcctcaccactgtaagccaggatgccaggcagggagtgagcattgaggccagcttggggcgccctggtgttccgggcagggcagagacaaggcgaggaggtggcagccgagctggccacgcaggacagacgggtcctcacgccatgccagcccttccctgacgcatggtgaccagctccacagcagggcagggcaggcgcgtggcatgcagaggtctccaggcgtgggacagatgggtcactgccctgaccctgtgccaggacttagcgtgccaggctccccgccttgccccgttgctggcccccaccagagggtgaccacacccaggccagccacgagaacttgtctgaccagtcctgggggcagactgccaagaaggtgggcaggggtgaggaggggccatttgcttccacccagcggggctgtgagtggttctggggtcctgcccacctgtcccaacccttcttggtccctcaactctgctctgcctgcagtctggtgtggacacactgatcatacctcccggaacctgggcctcccagggtggcctggaggctgcagacgggcagagcagccaggagctgcccaccaaggaggcgtctggcactgtctggggtcccgagctgggagcggggatccccagacacggagctggtgcgccacctggagtccatgtggactggtgcagccctctgccgtccagccggcatcaaggtgaggctgagaagccacacagatccacagacaagcacagtggcaaagtctgcagaaggctctgagccaggagggaaccctggcaggcttcctagaggaggagatgtgagcagaggccaaggcaggaaaacattccagtatggaggggaggttaagggaaggagagggtaagagtgagggagcggagggaaggggaggggagggggagggggagggtgggggaggggagaggtgagggaggttttgagtgtggcgaagggtgtgagcgtgctgagaagccctaagagtggggaaatggaccccaaggccagcctggataaggtgttagcagaagctggctgggtctggacaggagggggtgggcagggggcggggggcaccttatctcttgcaagtgggtggtgccgttagatctagtttcaaggctttgtggctgaaacgggagcccacgcccgccacagctggccacctgcctctctcctgactcccgtgcaaggccagtaatgcaacccaggagggagccgcagggcgccctgggtcccccactcccttctccggccaccccgtggctgtgcatagctgcccagcagagcccatgcaggtaagaggcctgggctcaggtcggccaggagggtgggggcctggagctgggccagggtggtgctgcgggaacaggaggctgcccggctggtgcccacatgaaccagaagtgtgcagaccctggttctgcctgtgcccggtgccacgctccctcccaggtctgcacgcaccacccccacagacccagcgcctgacctctggggtgggctcctggggccagcaccccatccaggcggaaggtcctcgaggcaggctgtccaccgctggcttccctctggcaggatgctgcagccggagggcccccaggcctcggaggaggggggcccccggaggagaggacagactgcatcatctgctgctcggcctatgacctctccgggcacctgccccgccgcctctactgtggacacaccttctgccaggcgtgtgtgcggcggctggacacaccggcgcccgagcagcgctggatcccctgtccgcagtgccgtcagagcacgcccacgcctcgcggaggggtggccatgctagacctggacctggctgctttcctggcggtcaaggctgagcgggagccggcaagactagaacccctgcccctcacctccctcaaaggcagcgccatcactcggcagccagctgggctgtgccctgccctgggaccccagccccacttcccccagcccagatactgctgctggggctgtggcagcctctgctgcccacccctaggcagccccgaggtctgaactctggccattcccacccctgcaggggaaatgcctgccttggaacccctgaccacacacc

SEQ ID NO: 43281 - DNA, 2300 bp, Homo sapien
agtgggggtgggggtgttgcagcactgacttggtggtaactgctgtccacagtctggccccagccccagccccggcccctcaaaagggtctgtgtggtggctgctcggagccaggaaaggttcagcgaaggatgagaccaactgggctgtgagacctcaagcaggccccagccctctgttggcctcaggcaggccccgccgaggcatccccttcaatgcctgtatggcttcgtgcctacacgagaccctcccagaaccgcacccgacacacagtgggaactccatgagctttgttgagtgggtgaattcacagggctgccatgcagggcagggaggaaggaggtagtcttgccaccctcccggtacaccccggggacgtctgtgggagaggggagacctgctctgggcagcccgccaggcatagccagaccggccctgcccctccagcctgcagcccaggcccccgggacgccttcgcatcctcttgggagccatcctttgcgctgcgtctaggcccaagccaggcttgccgcccactcagacagcagtgtcctcaccaggcacatccggtcgggctagtctggggtctggtaattgtggccaggacaggtgggaggtcaccagcctcctgcggagcctcccagcccccaaccttaggctgtggcctgggatgttcacggctgggatgacaccaccctgctgggccacacgaagctgcgtataggatgctactgccaggttgttctgagtgggctgaacccatgatggtgtgtggtcaggggttccaaggcaggcatttcccctgcaggggtgggaatggccagagttcagacctcggggctgcctaggggtgggcagcagaggctgccacagccccagcagcagtatctgggctgggggaagtggggctggggtcccagggcagggcacagcccagctggctgccgagtgatggcgctgcctttgagggaggtgaggggcaggggttctagtcttgccggctcccgctcagccttgaccgccaggaaagcagccaggtccaggtctagcatggccacccctccgcgaggcgtgggcgtgctctgacggcactgcggacaggggatccagcgctgctcgggcgccggtgtgtccagccgccgcacacacgcctggcagaaggtgtgtccacagtagaggcggcggggcaggtgcccggagaggtcataggccgagcagcagatgatgcagtctgtcctctcctccgggggcccccctcctccgaggcctgggggccctccggctgcagcatcctgccagagggaagccagcggtggacagcctgcctcgaggaccttccgcctggatggggtgctggccccaggagcccaccccagaggtcaggcgctgggtctgtgggggtggtgcgtgcagacctgggagggagcgtggcaccgggcacaggcagaaccagggtctgcacacttctggttcatgtgggcaccagccgggcagcctcctgttcccgcagcaccaccctggcccagctccaggcccccaccctcctggccgacctgagcccaggcctcttacctgcatgggctctgctgggcagctatgcacagccacggggtggccggagaagggagtgggggacccagggcgccctgcggctccctcctgggttgcattactggccttgcacgggagtcaggagagaggcaggtggccagctgtggcgggcgtgggctcccgtttcagccacaaagccttgaaactagatctaacggcaccacccacttgcaagagataaggtgccccccgccccctgcccaccccctcctgtccagacccagccagcttctgctaacaccttatccaggctggccttggggtccatttccccactcttagggcttctcagcacgctcacacccttcgccacactcaaaacctccctcacctctcccctcccccaccctccccctccccctcccctccccttccctccgctccctcactcttaccctctccttcccttaacctcccctccatactggaatgttttcctgccttggcctctgctcacatctcctcctctaggaagcctgccagggttccctcctggctcagagccttctgcagactttgccactgtgcttgtctgtggatctgtgtggcttctcagcctcaccttgatgccggctggacggcagagggctgcaccagtccacatggactccaggtggcgcaccagctccgtgtctggggatccccgctcccagctcgggaccccagacagtgccagacgcctccttggt

SEQ ID NO: 43282 - DNA, 2300 bp, Homo sapien
aggggggcccccggaggagaggacagactgcatcatctgctgctcggcctatgacctctccgggcacctgccccgccgcctctactgtggacacaccttctgccaggcgtgtgtgcggcggctggacacaccggcgcccgagcagcgctggatcccctgtccgcagtgccgtcagagcacgcccacgcctcgcggaggggtggccatgctagacctggacctggctgctttcctggcggtcaaggctgagcgggagccggcaagactagaacccctgcccctcacctccctcaaaggcagcgccatcactcggcagccagctgggctgtgccctgccctgggaccccagccccacttcccccagcccagatactgctgctggggctgtggcagcctctgctgcccacccctaggcagccccgaggtctgaactctggccattcccacccctgcaggggaaatgcctgccttggaacccctgaccacacaccatcatgggttcagcccactcagaacaacctggcagtagcatcctatacgcagcttcgtgtggcccagcagggtggtgtcatcccagccgtgaacatcccaggccacagcctaaggttgggggctgggaggctccgcaggaggctggtgacctcccacctgtcctggccacaattaccagaccccagactagcccgaccggatgtgcctggtgaggacactgctgtctgagtgggcggcaagcctggcttgggcctagacgcagcgcaaaggatggctcccaagaggatgcgaaggcgtcccgggggcctgggctgcaggctggaggggcagggccggtctggctatgcctggcgggctgcccagagcaggtctcccctctcccacagacgtccccggggtgtaccgggagggtggcaagactacctccttcctccctgccctgcatggcagccctgtgaattcacccactcaacaaagctcatggagttcccactgtgtgtcgggtgcggttctgggagggtctcgtgtaggcacgaagccatacaggcattgaaggggatgcctcggcggggcctgcctgaggccaacagagggctggggcctgcttgaggtctcacagcccagttggtctcatccttcgctgaacctttcctggctccgagcagccaccacacagacccttttgaggggccggggctggggctggggccagactgtggacagcagttaccaccaagtcagtgctgcaacacccccacccccactggaacgagctgtcactcaggagccccagggaaggactgctgccccccacccccagagcaagggcgcaggagggagacggaagagaatttgctgagcggacactcagaagcttctaccttctccagggcaaagtccccatgcacacagcgggggctgggcagcaagcaaagcagggcaccagcagcccctgggcagggtgagcctctgggggagctgccccgcaccccagggcaggaagaggcccagtcctcctaggggacaccccacaggcggtggggccagctgggactccgctggggagaactgtgcgctgggccaggcagcgggtggggaaggtggcctggggagctctgtcctcccctctgcagatggaggctgccggccgccgtcgctggctataccagggccgagcccgctagcagcctgctgggcccaaccctgccctgaacccggatctgaaccctctgacctcgggctgggtgccctccccggctacgtgaaaaagcccgtcctcccccaccacctggtgcaaagggcttccctcccctgctctgccgagggcagggatgaccctgagaaggtctggggagccctgaggtgcatggaagtgggggactggcgtctctcgactcccgggcagccccagccatactctagcatcctgcctggctgggtggagtgtgtctcttgggtcacacggatgcctgctgaggatgcccagtaccgagggccggtgccccgccccgcagtgccctcggcctgattcagagcccacccctgggaggagccccactccaggagggttgggctggggcttggaggtcctagccacagagtgacaggatggagacaaggcctaggggccttggggccaggagggtacccccgtgagggcctgggctcctgggtaaacattaatgggctcagtacccagcaggtcatgtgcgcgatcaggggatctttgacctgcaactgctcccgccccgtgtctcctccctgcaggtgccccctcaccacccacacaggtaggagctcctaggacc

SEQ ID NO: 43283 - DNA, 2300 bp, Homo sapien
ttctggtatcgcgcattatgtggtgaagacagaggtgcagtccctccaggaagagagaaataaataagcagatgttgtttccaacagcctccaattgggagacagatgcccagtggccagagcacaggagactgtcagggccgacctgatggtgtaatttatttaaaatgctacaaaaatacagccaggtgcagtggctcatgcctgtaatcccagcactttgggaggccgaggcgaatgaatcacaaggtcagttccagaccagcctggccaagatggtgaaaccccatctctattaaaaatacagaaattagccgggcgtggtggcgggcgcctgtaatcccagctactcgggaggctgaggcaggagaatcgcttgaacccgggagatggaggttgcagtgagccgagatcatgccactgcactccagcctgagcgacggagccagactctgtctcaaaaaaaaaaaaaaaaaaaaatagccaggcgtggtggtgcacacctgtagttccagctacttgggaaggtgaggcaggcgaattgcttgaaccggggaggcagaggttgcagcgagctgagattgcgccactgcactccagcctaggcgacaagagcaaaactccatctcaaaaaaaaaagaaaaaagctacaaaaatgtagaaggcacggcggctcattcccgtaaatccgagcacttggggaggccgaggcgggcggatcacttgaggtcaggagtttcagaccagcttggccaacatggtgaaatcccatttctaccaaaaatacaaaaattagcggcgtggtggtgggtgcctgcagtcccacctactggggaggctgaggcagaagaatcgcttgaacctgggggggggcggggagccaagatcgcgccactgcactccagcccgggagacagagcgagactctgtctcagaataataaattaagtaaaataaaaatgctgcaaaaatacagcccgtttgtttttaaacaggcgcaaccacatgtaattcattttaagtttcttttcccacccaagtaaaaatcaagtcataaattaggaaaagcattaacagaagtatgtttcagccccagcgcgctgacctgtggttggaataccggccctggagcccggaggtcggggcccacccgccgagggaggtctgggcgctgtcctggtctccacggagctcgcgcactcacggggccgaggcaccaaggcgaccggcgcagagccagcgccgtctccacaacagggcagggcgcgcagctgcgggggaggcctcgcccctccgctcccctcccctgccctccgccccggccctcggggcgcggcgtcccccacgtgctcccctcacgcgaccgcgagggcagtgggcgtgcggcacccgggagcaggaaactccgtggcctctgcggctctgtggagagctcccctccaccgccgcagcccccgagcccgtgtatcttcctgcctttaaggcatcgcagcctcctcggcctggaggccccgggctcgctccgtgcggaccccgctccagaacccgcccagcgcgcagatgccgtgtcccggcgcaaggccagagagggcgcaactctggacgtggggccgccaccgagcctgcccttcccggctcccgaaaggccccgggctcagagccaagactgcgcttgcccgaggcccgtcgggcccgccctccctcggcgcccccagcgcagctgcccgccgcccgaccggaagcccgcactcgcgcctgcgccccaccccgtccgcgcgccggccgcggcactgcggcggttaccaggacgctgaagcagcgcagccaatagcgccagcctggcggcgtgctcccggcagccagccaatgagacggcaaatcaatcatttgaaacacccaatggacggagcactgcggcgccaggagggggattgtgatagggagataggaggctgcggctgaccaataaagaccaaactggcttaaaaaggcggaccttaggcagcttgattgacgggggcaaggccaatcaaacgagggagcttgccagcctcgttctggcagcccattccgagactagcggaggcgggcagggagggtatataagcgttggcggagcgtcggttgtagcactctgcgcgcccgctcttctgctgctgtttgtctacttcctcctgcttccccgccgccgccgccgccatcatgagggaaatcgtgcacttgcaggccgggcagtgcggcaaccaaatcggcgccaaggtaagttgccggggcgctggggccaggcgggcctgccgggc

SEQ ID NO: 43284 - DNA, 2300 bp, Homo sapien
gccactcatagaactagggaagttatgacgtttactggtttattgtaaagggtattgattgcaaaggataccaatgaagaagcgtagagagaggcacggggaggggctggcgcttccatgtcctcgctagttgccgccctctgggaacctccaggtgttcccctgtccagaagttccctgagcctcagtcctcttgggattttacggaagcttcctgatgtcagcattcctgcccccagggcttaggtgggacctctcctggaagggtcttaagacccacagtcagaaaggtgagaatgttagcgtcctgccttggggcaggtgaaaggagggcaggaggtaaaagtcccccgcccgcaccccccaagcatcacccacccaacattctaacaaaaggccctaccaagggctatgggaatatgggaattaccagccaggaacggtggaggaaaaccagcgtctaccagaatgccagacagcttcttaggagtggaagcaatggtcccagtttgcagtgtcttgtatggacgtgatccataccaacttggtttccagaaggcaccacccaaattagaggcccttctcactgtgaccctgccggcagtaagcctcagaaactgctctcaacacacagtcagcatgtatgtgattatggtcctgctttatgcccttatatttacggactgcggtctttttttcttaaaaaggtcatattggccgggcacagtggctcacgcctgtaatcccagcactttgggaggccgaggtgggcggatcacgaggtcaggagttcgagaccatcctggctaacatggtgaaaccctgtctctactaaaaatacaaaaaaaaaaaccatattagtctgcattttccatggaggtgttgtttatatctttgttttgtgagagctttttatgctgataccagatttgttcatagcacttactgcaaacttttttccagttttttagtttgccttttagttgtttttttgtttgtttgtgagaaatggtctggttctgttgcccaggctgaagtgcagcggtgcgatctcagctcactacagcctcaacctcctaggctctggccatcctcccacctcagcctcccaagtaactgggatcacaggcacattcaccatgcctggctaatttttctttcttttttgtagaggtggggtttccccatgttgcccagctggcctgaactcctaggctcaagcaatctgcacacctcatcctgcctcggcctccgaaagcaccgcaattataggcatgagccacagtgcccagcctttcttctttctttctttttttttttttttttttgagacagagtctcactctgtggcccaggctggagtgcagtggcacgatctcagctcattgcaatctccacctcctgggttcacgccattctcctgcctcagcctcccgagtagctgggactacaggcgcacgccaccgcacctggctaatttttgtatttttagtagagacgggatttgactatgtcagtcaggctggtctcgaactcctgacatgatctgcctgcctcggcctcccaaagtgctgggattacaggtgtgagccaccgtgcctggccgccttccttcatttttatggttaggaagtccttcctgtacaaaaaaagaacaaaattcaggatttgcttaaaatgtaaacataacaccctgcgccacatgaagggctggagggagagttcgcacagccctgcaggccgggaagcccctgactcgagccaaggctctgcagctgcaaggcctcctgtcagaggagggggcctggggactcccttagcctcaccctgagactggggctggtggcctcctgggggcagcaagagcccaggccctttctggagggacagtcctgttttctgagctctgaagttaatgggacttcctcccggaccacctgcctcaccgcaactcctcccctgcctggcacctgtctgggcctcagtgtctcacctgtgcaatgtgggccctcacagggttagcgaggtggcctggcccaggaggtgcccacaatgctggcccctcacaatggttgcccggtgacaggactcccctcagggaagggagctggatgccgggagggactggagccagcaaggccagagtgaaagcaaaatgacaactactcagaaacacgatctcttcacgccggagcctcactatgtccctgggtgagagccgggagctctggaggtggctggggccagggctgcaggagggggagaatggctggggcctgaggcatggaggccagctgtga

SEQ ID NO: 43285 - DNA, 2300 bp, Homo sapien
aagaccgcagtccgtaaatataagggcataaagcaggaccataatcacatacatgctgactgtgtgttgagagcagtttctgaggcttactgccggcagggtcacagtgagaagggcctctaatttgggtggtgccttctggaaaccaagttggtatggatcacgtccatacaagacactgcaaactgggaccattgcttccactcctaagaagctgtctggcattctggtagacgctggttttcctccaccgttcctggctggtaattcccatattcccatagcccttggtagggccttttgttagaatgttgggtgggtgatgcttggggggtgcgggcgggggacttttacctcctgccctcctttcacctgccccaaggcaggacgctaacattctcacctttctgactgtgggtcttaagacccttccaggagaggtcccacctaagccctgggggcaggaatgctgacatcaggaagcttccgtaaaatcccaagaggactgaggctcagggaacttctggacaggggaacacctggaggttcccagagggcggcaactagcgaggacatggaagcgccagcccctccccgtgcctctctctacgcttcttcattggtatcctttgcaatcaataccctttacaataaaccagtaaacgtcataacttccctagttctatgagtggctccagcaaattaacccaaagacggtgtcacaggaaccccaaattgaagctagttggtcagaagttccaggggcccaggcttgcgactggtgtgtgtctggaggccctgcccctatctgtgtctggaggccttcttgggatggagctctcaccctgtgggatctgacaccatctccaggtaaatggtgaaggaaatgaattagaggacacccagcttggtgtgtggggaacaacccccctccctcaacatttgggcagaggcctccttctgtgacggctgtggtggtgtgggcgcagagccggacactgagagagcatttcccccacgcaccttctcaaggagaggatggatgtccagcagcaccattcacggtggcaacgtttattacagggcagggaggacctggaggagcctatctgtccaatgacaagggcttcattagcaaagtacactctgttccactggcagccagtcaactctgaacccggcacaacctgggcaggggccccggagcacaggcgtgaacccctcgcccagataaaacccgtgtttcctcaagcacgtgtccatctgtctgcctggcaggcccagtgctgaaggggaggcatccagagagggcggaggagggccccaagttggccctgttcacaggccctgccctggtggattctgggccaaggtcagggctgggaccaactggtggtcagctccagagaccacacagtgagggccctggtgcccacacgggctcttgctcacacaggctggctgttcctttgcagctctggcagcccggccatctgtgacaccctctagcctctgtgcccccaggtgagaggtaggccctcacaccccagccctggctgggctccaaggcccggcctgcctctggtgtcagacccatctgatgtggatttgcttttcccttaagtggaaatccagatggggtggcggctcctcctcttcctccagggagccttcctgggcccctccctcctacccccagggggtcctggctggccagacacagctgggcatctcctagggcttggtggatgccggtgggtcctgttccctccaccccctctgctgaggcctcagtcctcccagacctgctagagtggaccccagactcccaggagaccccagggtgcaggagaggggagaaggctggaaaggttgcggggagggagagggctgggccaggagtcaccggggcaggctgggggtcctggcccaggcggacccgctgatcatctagttagtgggggaggggcccaccaggggtcggggcccggggcagcccctccagggccagacaatgtgtcttcctcaggagtcccagcaacagaggggcctaccagtgaggtcacagagctccgtggtgccgttggggaagagagccaggagactctgatgatgaattctgaccagaaggcagtgaaattcctggcaaatttttacatcaatggaggcaaacactggacccatggtcacctgaggcagacacaaccagagcccacccagtaactggcggagagggggagaaggggcgggccagctgggagtggccagggggctgagggacagtgtggggggcaggttgc

SEQ ID NO: 43286 - DNA, 2300 bp, Homo sapien
cccaagcgccacgacacaggccccttctgcacgctctagagccagctgggcacaacctgcttggcccggccaccgagtggaaccatggcctcccccggggctttcccaggcctcccctgggacttggggccccagcctggccttctgaccctctgggcaccccgatgcacccttctggctggccaacccttctatgggctgtggacaaggctggcccagcctggatcccccatctgcccatctccccgctacactgagatgctgttggttttcccgagctctgtggtgtgcagttgtctgtccttcacccgggggcggtcctagagatatggctgccgctgggtcatttccggctttccctgttgaggggtctccattcagctgcccctgaaaggtgctctcttctctagggtggcagcctgtgactgaccctgagctctagcctggagcgagatgggaggtgggctctgtgggacacccccacccagccgtgtcactcaggggcctggtctagctgctgtccacctgagggtcagctgcttgccgagccagggaactgggaaggaggcgtcaaatgccctgagccgccacctccaggtggggtcggcctggccagacctcaggaagggcccagggatctgctcaccagggcccagccccacttcccctaggccttgagctgaagacctggctgggcttagtcacctgtgccctgaacactctggcccagggccctgcagactccactcccggggccttcacctgctgggaccctgcactgcccctgcctgcaacttcgcctggctggggcctcccttgtcatcactggcctgccctcctacccagggtcgggccccaaggctgccaccttgcaggagccttacctgcggtgccgtcacccgcacctccccaggtcctccccagacccaggacccagaccaggcccagagctcaaccccttcaaaaaggctctgggcagctgcttctgtggcctcagcaccaccccctttctcagagaggaatcccaggctcaggattgtgtgtgtgctgtgacccttgtcctcctctgccaccgaaccagctgggggttggatcaaggcactggaaccctcgccctagggctgaccaacttggccagcggcaagagagctgtggtagccatggccttgggagctcggcccggcttgtgggaacaggagctctgctcacggctgcaccaccaggcacccctggtgagacccaaagctaggagtgggagcggcaggaaagatggagcgatctcctccagctgggctgaggagggagggcttcctggaggaggtggtggaggaagaagccttcaaggaagagcaagagtttgctgggcagcgggaaagaaatttctagagaaaatttcagcagcggagaccgaaaagagagagggtgtgtgtagggggcttggcgcggcacagcctgcgggagggcggcgggctggagaggcggggaggcccggggagcccacccgcctgggataagaagggacactgtggaacctggactctccttcacggctccgcggagctcggtgggcgccacagcctcccggtgcctgggagggcggccgtcgctcgcgctcccgctgcgggcccggtctccgccaggccccggccccctgaaggcgctcagatctcagttttggcgacagcgccggggtgggcttcgtgcccgtttcacgcggaggaacccacgctcaggagggagtctgcgcctgtgtccggcccctgcggggcagaggggcggggagctcaacccccggcaaaacgtccccgctgcgcgtggctgccgcgagatctgcaagagcgttttccacgcttatgtacacgaaattcactcggctgcgacgacgtccgttcccggagcagacggaccctgagtccgccccccacgccctcacccgccctcttctgccagaaagcccgggcgcgggcgggaccgggtgggcgcatgcgcgctgggctggctgggcggggtctctcgcgccgggtgagggcgctgctcccaggaacctgcgcgcggccccggcggcgtttcccgggggccggttggcgggcggacctgggcggtgcggggcggaagtgggcggctgcgggacgcgcgcggagtcgcgcggcgggcgggacctggccgagctggagggcgccggggagcggggctcgggcggtccccgaggcccggcggagcgggcttctggggtgtctgcggcggcgccgggggaacgggctggggatggggcgcctagccgggcggtggccggggcctcg

SEQ ID NO: 43287 - DNA, 2300 bp, Homo sapien
tggccttgagcggctccgtgcagttggtcagggtctccttcaggtcctcgccgttggccacgcccaggtcctgcagccccgcgaacatggccgaggccccggccaccgcccggctaggcgccccatccccagcccgttcccccggcgccgccgcagacaccccagaagcccgctccgccgggcctcggggaccgcccgagccccgctccccggcgccctccagctcggccaggtcccgcccgccgcgcgactccgcgcgcgtcccgcagccgcccacttccgccccgcaccgcccaggtccgcccgccaaccggcccccgggaaacgccgccggggccgcgcgcaggttcctgggagcagcgccctcacccggcgcgagagaccccgcccagccagcccagcgcgcatgcgcccacccggtcccgcccgcgcccgggctttctggcagaagagggcgggtgagggcgtggggggcggactcagggtccgtctgctccgggaacggacgtcgtcgcagccgagtgaatttcgtgtacataagcgtggaaaacgctcttgcagatctcgcggcagccacgcgcagcggggacgttttgccgggggttgagctccccgcccctctgccccgcaggggccggacacaggcgcagactccctcctgagcgtgggttcctccgcgtgaaacgggcacgaagcccaccccggcgctgtcgccaaaactgagatctgagcgccttcagggggccggggcctggcggagaccgggcccgcagcgggagcgcgagcgacggccgccctcccaggcaccgggaggctgtggcgcccaccgagctccgcggagccgtgaaggagagtccaggttccacagtgtcccttcttatcccaggcgggtgggctccccgggcctccccgcctctccagcccgccgccctcccgcaggctgtgccgcgccaagccccctacacacaccctctctcttttcggtctccgctgctgaaattttctctagaaatttctttcccgctgcccagcaaactcttgctcttccttgaaggcttcttcctccaccacctcctccaggaagccctccctcctcagcccagctggaggagatcgctccatctttcctgccgctcccactcctagctttgggtctcaccaggggtgcctggtggtgcagccgtgagcagagctcctgttcccacaagccgggccgagctcccaaggccatggctaccacagctctcttgccgctggccaagttggtcagccctagggcgagggttccagtgccttgatccaacccccagctggttcggtggcagaggaggacaagggtcacagcacacacacaatcctgagcctgggattcctctctgagaaagggggtggtgctgaggccacagaagcagctgcccagagcctttttgaaggggttgagctctgggcctggtctgggtcctgggtctggggaggacctggggaggtgcgggtgacggcaccgcaggtaaggctcctgcaaggtggcagccttggggcccgaccctgggtaggagggcaggccagtgatgacaagggaggccccagccaggcgaagttgcaggcaggggcagtgcagggtcccagcaggtgaaggccccgggagtggagtctgcagggccctgggccagagtgttcagggcacaggtgactaagcccagccaggtcttcagctcaaggcctaggggaagtggggctgggccctggtgagcagatccctgggcccttcctgaggtctggccaggccgaccccacctggaggtggcggctcagggcatttgacgcctccttcccagttccctggctcggcaagcagctgaccctcaggtggacagcagctagaccaggcccctgagtgacacggctgggtgggggtgtcccacagagcccacctcccatctcgctccaggctagagctcagggtcagtcacaggctgccaccctagagaagagagcacctttcaggggcagctgaatggagacccctcaacagggaaagccggaaatgacccagcggcagccatatctctaggaccgcccccgggtgaaggacagacaactgcacaccacagagctcgggaaaaccaacagcatctcagtgtagcggggagatgggcagatgggggatccaggctgggccagccttgtccacagcccatagaagggttggccagccagaagggtgcatcggggtgcccagagggtcagaaggccaggctggggccccaagtcccaggggaggcctgggaaagccccggggg

SEQ ID NO: 43288 - DNA, 2300 bp, Homo sapien
gtggggtcggcctggccagacctcaggaagggcccagggatctgctcaccagggcccagccccacttcccctaggccttgagctgaagacctggctgggcttagtcacctgtgccctgaacactctggcccagggccctgcagactccactcccggggccttcacctgctgggaccctgcactgcccctgcctgcaacttcgcctggctggggcctcccttgtcatcactggcctgccctcctacccagggtcgggccccaaggctgccaccttgcaggagccttacctgcggtgccgtcacccgcacctccccaggtcctccccagacccaggacccagaccaggcccagagctcaaccccttcaaaaaggctctgggcagctgcttctgtggcctcagcaccaccccctttctcagagaggaatcccaggctcaggattgtgtgtgtgctgtgacccttgtcctcctctgccaccgaaccagctgggggttggatcaaggcactggaaccctcgccctagggctgaccaacttggccagcggcaagagagctgtggtagccatggccttgggagctcggcccggcttgtgggaacaggagctctgctcacggctgcaccaccaggcacccctggtgagacccaaagctaggagtgggagcggcaggaaagatggagcgatctcctccagctgggctgaggagggagggcttcctggaggaggtggtggaggaagaagccttcaaggaagagcaagagtttgctgggcagcgggaaagaaatttctagagaaaatttcagcagcggagaccgaaaagagagagggtgtgtgtagggggcttggcgcggcacagcctgcgggagggcggcgggctggagaggcggggaggcccggggagcccacccgcctgggataagaagggacactgtggaacctggactctccttcacggctccgcggagctcggtgggcgccacagcctcccggtgcctgggagggcggccgtcgctcgcgctcccgctgcgggcccggtctccgccaggccccggccccctgaaggcgctcagatctcagttttggcgacagcgccggggtgggcttcgtgcccgtttcacgcggaggaacccacgctcaggagggagtctgcgcctgtgtccggcccctgcggggcagaggggcggggagctcaacccccggcaaaacgtccccgctgcgcgtggctgccgcgagatctgcaagagcgttttccacgcttatgtacacgaaattcactcggctgcgacgacgtccgttcccggagcagacggaccctgagtccgccccccacgccctcacccgccctcttctgccagaaagcccgggcgcgggcgggaccgggtgggcgcatgcgcgctgggctggctgggcggggtctctcgcgccgggtgagggcgctgctcccaggaacctgcgcgcggccccggcggcgtttcccgggggccggttggcgggcggacctgggcggtgcggggcggaagtgggcggctgcgggacgcgcgcggagtcgcgcggcgggcgggacctggccgagctggagggcgccggggagcggggctcgggcggtccccgaggcccggcggagcgggcttctggggtgtctgcggcggcgccgggggaacgggctggggatggggcgcctagccgggcggtggccggggcctcggccatgttcgcggggctgcaggacctgggcgtggccaacggcgaggacctgaaggagaccctgaccaactgcacggagccgctcaaggccatcgagcagttccaggtggggcggcccccggggcggggggagcccagttggagggccgggccgcctgctcgggagtcgggcctggcggaggcgccggaagttttccggctttctgctggtggctgagtcctgttctgggggtggagtccggagccagcacccctttgctggacggctgggtggctttcggtggctgcggttaccgccagcacggctgggaacacctgggtgcgtgcctccctgtgctctcaggacctcggggtgcccgggcgcactgggctgcgtttgaggtttctcttggcttcctcagacagagaatggtgtgctgctgccatctcttcagtcagccctccccttcttggacctgcacgggacgccgcggctggagttccaccagtcggtattcgatgagctgcgggacaagctgctggagcgagtgtcagccatcgcttcggaggggaaggctgaggaaaggtgggtcagcgggaggggtgggcaggtgagatg

SEQ ID NO: 43289 - DNA, 2300 bp, Homo sapien
caaggactgggatgggaccgtgcgtggacggctgagcctcgggggcgcatggttactgtagcgaaagcctttaggggcagaaagagcagagctgcctgagcgactgggtgtggacgctgctgggaagttagggagaaggacttggtaggggaggaccgagggcccaggcacgggaggcatcgtctggtgaagtgaaacctatggggaatttgggaggagaagtggggaggctgcccacggtttggggaaaacaaccttgctggcaagggctgggggaagcagtgagggtgaagtcctttcagaggctgagaacatgtactgtgtttgtgggtgatggacatgaattctgggcgcagcggcagggctgggttgggtagggaggcgggaggggaggcctcctggaatgggaatgggtgtgattgggggtggccctgggtatcacaggagatggtgatggccctgggagctggggttctggggctcccttcacccctgtagatgggagaaagtgcagggggtgaggccttggcccaggcctcagattcacctttgacccatagggccaggtcttggggcaccccttgagcgagtccctttcctgcagagggctctggcctgaggatttgctgggccagcctctggcagaagcagctccagccctgggtgcacttggaggcagggcagaggctttgctgcaggttttccagggctcggtcagcctgcatctgcccgagggcctcccctccagggtcctctctgtgtcagaagaagcaccgagactcaaagcctgaggcccccaaaggaccccaacctccgtgctggggccacggggcctggacagccaacctccttccgctctggtcccacagaggccggggagtgggcccaaagagcaccagcattccacctggtgtgtgcggcccccgcggcctcgacaattggggatccgggcccccgagcaccccttgcacaggggaggggagccctaggcctggctcctggaggggagcgtgatagtccggtggaccccataccctggagagaatggaaacccccaacccacgaccggtttccctgatggagcctgtctggttgggtgcagtgtgtgaggaatatacagctggaaccatcaggcccgggctggctgttgggaggagtggggcgtccctgggactgcggggtcctgagctgaatgccagcagcactggtgtggctggagcggccaccttgcccctccttggaaggcggcttccaggctgggccagggtaggaggagtccagggtcctttaggcaggccggcagggggaagggcccagagctccagctcctggctcccggcccaagttgtttctaaatttgttccccaacccccacagggaccctgagccgcacgtggttttttccgtgatagaacttccgtctgtgtgtgctggcctgtcctgggcagggggctccaggctggggacggaggaagggggaaaggaaagacaatgagcccactttggggggcccccgattggggtcaggaggggaatgaaaaagcggggagaggagtaataagagagggattgggggtatgcagctcggcagaggaccctgcccgccccctgtgctgctgccttgctcccgccttgcttacacagggcctggagcccctccccccagctgtaagccctgtgtgtggggtgacaggtggaagggataacctgggggaggtgggggccctggaggacaggctgaggtgcaggagcccagggtgggggcacagcatgcagcaggggccctcggcctcaccaggtgtcctgagcctgaccaagccaggagggctctgagcgctagagaactgaagcgggaatgtgacctccggccaggggatctgggcaagccggccaggcctcccccctttggcgcctccgtccagcccaagtcccgcctgggccgcaccccctgactcacttcctttgcatagaagcggaaacctccccagagcttcctctactccggccggccgctccctggggacccacaggtgtcgctgcccctccaggccgaagctggcccaggaggcccctggcccaccccctcgccctgggaggcgcatttcctgcttggagtctcaggccccagcgtctggcacaggcaggggcctgcggagctgagggcagtggaccagctgcaggtagggggtgggttggggcccagggcccagttcctgccagtcagtggctctcttgctccgaccggcctcttctttctgtccatcttttcgtttcacctccactagtctccggggggctcc

SEQ ID NO: 43290 - DNA, 2300 bp, Homo sapien
agaactgaagcgggaatgtgacctccggccaggggatctgggcaagccggccaggcctcccccctttggcgcctccgtccagcccaagtcccgcctgggccgcaccccctgactcacttcctttgcatagaagcggaaacctccccagagcttcctctactccggccggccgctccctggggacccacaggtgtcgctgcccctccaggccgaagctggcccaggaggcccctggcccaccccctcgccctgggaggcgcatttcctgcttggagtctcaggccccagcgtctggcacaggcaggggcctgcggagctgagggcagtggaccagctgcaggtagggggtgggttggggcccagggcccagttcctgccagtcagtggctctcttgctccgaccggcctcttctttctgtccatcttttcgtttcacctccactagtctccggggggctccctgcactgctcagctcgttcactggaggggtgttgggaggaccccagttttggagtcggggctgggaggcctgggttgagcctggggacggggcccgggcctattctcaaaatcataagttccagccagacccccgccaagtgttctggagcgtgtgggggcgtctctgaactcctgggcgctcaggcctctgcttcccgcggcccctccttgggagacggcccagtccagtgggagccgcgggcgggggcagggtccgggggtgactgttcaccccagtgggcgcctgggcggccactgactccttcgacgactcctccaggaagccggggcggccaccagataagcctctaccccgccacttcctcaaggcccgcggccgtttatgggaagacccgagagatttgcatcggggccctgcggaggggcggaggggcggaggggcggaggggtcgcttgccggtctgaggggcgaggccgcgaccaggcccctggccctggggcagcccgggccgcaccccacgggactcccagggggtaagatcactccggggaccggttccggcggcccgcgggaaagggcagtggcgggagtccagagaccctccccgtcttcccgttgcagggagggcgacctgtatgcggagcgccgttcctgcgacatggaccgcggccagcccagcctggagcctgctgccgcggccccccgagcctcgggccggtgcgtgatcgcgcccgtgcgcgctgtgctccgcctgcgccgccgggtgtgtgtcctacgcaaacggcgcctcctgcagccgggtggggggcccgacgtcgggaccggggcgcccaggccgggctgcagcccccgggcaccgcgcgcggacctggaccagccaaagttcttcaccttcgacagccccgcggagctaccctccaggacgccacgcaagaagcgccggcgcagccgcctggtgctttacccggagacctcgcgcaagtatcggccgcgcgtggagcacaggagccgcgcgcagcgctgccttctgctgctagtcgccatcgtgggcttccaagttctcaacgctatcgagaacctggacgataacgcgcagcgctatgacctcgacgggctggagaaagcgctgcagcgcgcggtgttcggccagcccgctgccgtatcgcgcatcgtggcgctgatgcgggactacctggccacgcatgtgcacagtcgtccgctcctcctggcgctgcacgggcccagtggcgtgggcaagagccacgtgggccgcctgctggcgcgccacttccgctcggtgctggaggacagcgcgctcgtgctgcaataccatgcgcggcaccactgccccgaggcgcgcgccgcacaggactgccgcgaggagctggcgcggcgcgtggccgacgtggtggcgcgggccgaagcggaggagaagaccccactcttggtgctggacgacgtggagctcatgccgcggccgctgctggacgagctgcacggcttcctgcagccgcagcgctcccaccacttccacaacgccatctacgtgctcctcagtggcgcgggtggcgccgaggtcacgcgcttcgtgctgcagaacgcgtcccgcgcgctgcccctgcgccccgacggcttccgcagtgccgaggccgcagcggcgcaggcggaagaagacctgcgcgccagcctgctggctgtgctgtcccgggagcatccgctgtggcaggccgcggccatcgtgccgtttctgctgctggacaagcgggatgtggtcagctgcttccgggacgagatggcgggtgagggcttctttcctgaccaggcccgcgcggagaa

SEQ ID NO: 43291 - DNA, 2300 bp, Homo sapien
ctgtgcctgccggggcgcccgcaccgcctggccctcgccaggggccgctgccgatttcacgcccgtggcggggccccgcgttcccacaccgagctcacacagggcccctttgtttgccgccgccacggatgccgacggcactttctcccaggccctgctcctggcccacagcatagccaaatgccttctccaggcccggcttgagcccacctgggcttcggcctgtttgcaaaccacccaccctccaggggaggccctgtgcctgttgagcaccaagggctctgcccaccccccagtcatgccctctgcctcttgccagtctagcctggctgggccctgggcatatgcacaaaatccatcaatgcccaggacagagctcctgccctcctgacagtgagctcagagcaccctgcacacccagccctggtctgaggtccagagacacagccagcaccagggaccagcaggcagcccagcggctccccctccttaagaggccaaaggtgcccagcagagcacggcaggccaggccatgccatccctgccccgggcctgggctccacagcgcccatctctgttctgctgggggcctactccgggactccactgtgtcctcacctgcatattggggagcacccctccaccctccgtggcccccttgagagctcctgggagaagcagtgaggcccaaaggagagagctgaacagaaccagcgggatcacggccccaggaagaccagagcgagctctgagctgtgcctttgagggacagaggttcccagcccaccaggaggaccccagggcctcaggaccctgctccggtcagccagggtctgtcccgaagggagcctgcccagtttttcctgccagtatgggcacagcatggggtggggacacacccctgtggggagccggatgtggggacatggagctggtgggcggaagcctcctcagacaaggcctggcatgggggtctccccagcccgagctcagagctgcctgcgcggaattcccggcttggcttcagaaggaattcaagccccagcctgcctggcctcctgctccgcgcctgagaatcactcctccttaatttccaacgaccacagcgagttgtaaactgtaaaactctaatgaggaaatgcgctgtgcttcccctgctagtgcctcccggtcaattgttagagtggtcaataaaaatgggttttacagtttggaagccaggcgtttcagaattcccttctggccctggcgccacacctagccctgctcacctgggcaggacctatgtgtcccgcatgctggtgcgtgggcagcagagggaggcaggccgcggtcccgaccctcccgctgcgccccggcccggggcttcctcccgagaggacagcggaacccccttcaccgccaggcgatagaagccgcggtggccggccggaggcccctcgcatcagtacggttggggcacacataggctgagccggcggccatgaggctgcccgcgcgcgggaaggacccgcgtggctgaaggccccacgtcagggcctggagttgccacccgcgtggacggtgagcccggaggcgcgggctggccggggtcgccgcgcgcctctccgctcagaggggtctctccttcgccacgggcctgagatgcccgcgaaccccctgcccgggagaggccgccctcggggccacctggcggtcgcgctcgggtaccgggcaaggcctgggtctggctgctgagggagcttggaattccccgggtggccggagggagaaggggcgggacgaccgcaaagagacgcggagcgcccggggggcgcgcggacggcggcggcgacggagctggacccccccggcggccacctggcctcccccgcccaggcgctgccggcgaccagcgccccctgccgcgaagcgcgccgccgccgggacccgcccccggacccctgcgcacggcaccgcccacgccccgcccccatgtgggcgcggcccaatcccggggccgccggcgcgcgcgtcacgggctgccattgttatgcaaatataaagaaggtaaaaggcgccccggcgcggcgggcgagctagtgctgcggcgcgtggggaggcgccttgggaccgcgtgggagccgcagccgaaccgagtagggaccgggaccgcgcggcgccgccgtccccggccgggcccggcccccgcgagccgagcgcgcgcccccgtcgcccacccgggcgcggctggatgcggcggggtccccgcggcggcgacccccggccccgagcgcccggagcgcccagaggcggcgtgc

SEQ ID NO: 43292 - DNA, 2300 bp, Homo sapien
ggcacaaacgcagatgccaacgccaagaaggaaactccctgaggaaagacagggaggccccagagggaggccagacgaaagggcccgccacacaagtgcaagggagaccccggggccggcgggacccccaggctgagtggggtggaccccagcagaggcccaggtggtgaggagggggtgggctccggggcagaggtggaggacggtgaaggggcaggcgcagcccctctgcccgtctccagcccgccccagaaggaggccgtggtgaggctgccctgagccctcagtgctgagctggcctttcctttcagcgctgtgtcccaacgcggccattcagcagcgcctggcggccctgcggcacctgtgccacaagcggtttgtggaggttcgtgagcaggagggggtcctgggggcagccagccgcggcctgagccacagagtttggcctgggatactcactgcgcactgcagggtgcacagacatatcaagtaggagctgcttcttgccccagagctgggtgagctgggccaggcctgggtgaaggggaggccatggggccctggctctgggctgtggcaccagggcgggtgagcacctgggctctgccaaggatgtaccctgccaggggtcgaggaaaactcccaccaggccccgatacagcctctggagctgcctggcaaccgccccttcctgtttgcctttgcagaagagcctgtcacaggagaactggaccgaccatgtgcaggtgagttcgtgcccttgcctgtaagccggcagggcggcctgggcggctgtcctaggggcacaggcccggagcctcctggtggaagtgcgcagagctgaggccttcgctggggctgctgagcccagaccccatgttggggcgtgtggctggcaggcgggtgtagggtcctcaggcccgggaggcctgagcgggagccgagggcatcagtagagcctgactgggcctcgttccaggcagacggcagcgtccgtgccacccgaaccaacccagcggagctgcctgtggggccgggtgggggctgagagtcaccagagaggtgcaaggcgcctgggcgaggccggaaggaggaaggccaggcccccccagcccggtgccagcgcagagccggccggaagggcagcggacgtcctgaagaatgcgggcggcttccacgtattgtcgtccacgtgggaacccacgccggggaagcagcctcaggctgctgggcctgaagccagcggggcaggcggaccctcctcgaggccgtggggtgggaggtcgtgcaggagctcagcctgctgggcaggtcccctcccttcccgcctgacactcaaggccatcctggacccatggactccaggaccttgcggggagggagaccctcgcttgtgctgggccctgcatttcccagcgggggctgagggtcccgcaggcctgtaggtgcctctgctcctgggctgggcgctgccacggtggctgcggggtgggagagagctcaccctggtgaggatgaggtttctcaggacccccttggtcattgccacccagagggcacccctctgtctgctcctgggccatgggtgaatgggtgcccaatagcctcctgagccctgccagccaaaccccacataatgaggaggaggggaaggggcagaggggctcccctggcaagaggaggagcgtggagatggggcaggctgggcaggtgctccagaaaacatgcccgggctcctgggacccggggtgggggcagatgcctggtgagagcaggagggccggcagaggcttggaggccgggaaggtcagtggaggcttggaggccaggagggccagtggaggcttggaggctggaaaggtcagtggaggcttggaggccaggagggctggtggaggcttggaggccaggaaggtcagcagaggcttggaggccaggagggccggtggaggcttggaggccgggaaggtcagcggaggcttggaggccaggaggggccagctggggctgaactgaggtgggcagccttcacctcaggcttggagacccggaaggccagccggggctacactggggtggacagcctttgcctcagcacctctatctcagccgctttggtcctgtggaaccttgacctcaggcaggacagatgctgcaggcctcaggtggacggctgcccctcctccccgagtgctcatagccagtctgcaaggtcggggtctacgggggtccctcggggcagggccctgtggcacagcaatgtccccatctccatcctcacggccaccctcctcacaggg

SEQ ID NO: 43293 - DNA, 2300 bp, Homo sapien
cgcgggctgctctcgtgggtcatttttgctggctatgggagcgcggcttatggaaattattaatagcagctcaggcccgtggtacgtgcaggcggtcagggcccggccgtgccccgatcgcagccagtgtggccttggagcgctcgcggggtgcccgtctccgcctcgtgggaagggctaggaccccccaggcctcaggatgcgctgaggctgggggtcctcagccttggcccgtccactgcaggcaccattgtgttctggggcccgcagatgggtcgtgtgggaggtcacggctttgcgccttgccttgaccccacctcctagccttcctctggctcatcagcaatccccgagcaaggccctgggacccaggctgtgtggccagccacccccttgagtccctgctgccccatccaggccaagcccaggcctcccacctgtcccagcctatgcaaggcctggctcagcacgggggggcttgtctgccaggccaggcccctcggcctgagggccacgtggctgaacacgggaaggccctgcactccggcctcagtgaccaggtgctggtgcaaaagggtggtagccccctcacccgccgtgctgcctggcccctcccaggccctgagtaatctgccgcctttgtgtttgccaggcagccacgctgggcgcgacgttgaagctgcagtcggagcttggcgttgaaaaggtgaacgtctttctcatgtaaattgtttaggttcaaacttggataacgcccaggtctctataaacagtgtttgttggaggtcgggagtccaccaagccacagtgggggacagcagggccatcgggggccggcgagggcctccagagccccctaaaccaccatcctcctcatgggctgaccccaaatcagacgcagccgcacgtacacgaaccccgtgtccagctgtcccctgaagccctgagtgtgctccgtgcagcagctggggccaccccttccctggagtgggcaccagctgcctcgaggacacgcagcccatgtgcttctgggaccctcctctgctgcacgcctccaccgtgcagtgggctgggggaagcagtcacctaactgtgaatttccggacagatgacacagtcctcgaacccacagtgtctgcagggatggcagatccaagcttctacaatgggacttcgtgcacatcacagggacacaaggggaacctgctggttaagcaggggcagggtgggggagtgagcacccctcgggcagagccaggtggggacgggacgcatcctggtctccctaaagagggaggggtgtctacacagcctgcagggctgtgctccgggcgatgggtgcagactccaggtctacaagagctggggccagagagggctcttggggcttcgcgttctgcccgaggactgtcccccaaggcactgctgggcaggtgggccccatgcagtcggcgccaggcagcctcacctgtggggcagaggaggtgggggaagggaggtgaggagtcttcttcgaggggcgttgtctacgggaattcgttcttgctgagggaatggctggtgtgccccaaggcccagcgccacagccagggactccctcagggcctcttggaggcaccgacagcgtgtgggtcttgcagacctgctcgggaggcagtgctggtaccatgtgccacgagaaggcatttccggactaccagggctactgccagtggtttgtcttggtcctgcctccccacatttggtgacaaatgagcttccccagggtcccccttgcctcttagggcctccaggccttcatcatggagatggggatggccacagagcccagcaggagccttgggcgagtgtgtgtgagcgtgagcactggccgggcgagcactgctgggcctggacggcctctgggcccctttcgttctgacactttggccgctccctctgggttggaggtgagtcaggttttggctgaggtggcggaggctgtggcctgaccgtgtgtccccctgcagatgagcatcccactgctcctccaggacaaggtggccctcgtggagcgctatgtggccggcttcccggacctccagaggaggctgctggtcctcatggattcctggtgccagcccggctttgacatcaaggacgttgccaggtgagtcccgtggggcgctggcagctggcaccagatggcatcctgggagccctggttagggaagggagtgtaggggggcagcaggcgcgtgggagagctctccccaggaagttctggtgtttgggtcacagctgccatgtgactgcagctg

SEQ ID NO: 43294 - DNA, 2300 bp, Homo sapien
gcctatatggccaatcaccactgttgtactttaggcaaataatcaggccaaatataatcctaaaatttattttacaagtaaattggtcttaccaagatttatctttggtagaaatggggaagtagagaaaaattatgtttcagagaaaaactacagcatacctgttactggattctagccctgatcattgtattttttattttcctacaatctggactaaatcctgaacaatcttctggctacaagtctcaaagaagaacctggctgggcagaggttcacacctataaccccagcactttgggaggcccagatgagaggatcacttgggctcaggagttcgagactagcctgggcaaggtgtcaagacctagtctctaccaaaaaaatttaaaattagccggtcctggtggcaaacacctgtattcccaggtactcaggaggctaagacaagaggatcatttaagcccaagagttcaaggctgcgatgagtgggaatcgtgcctctgcactccagcatgggtgacagagcaagaccccatttctaagtaaacaaataaataaaaagaaagaagaacatggattttagtttcttcatgtttttagttgtctccctaatggaacaggtttgtttttttcatcctggcatacaaattggttatagtcctatgtgttacttctgagaaaattaaaattaatggtgtttctaaaaactagagatgattcaacaggtgacagcagttgtataaattaatgacttcactgagacctcatgtttgccaccctgtaatgccattccaattcagtttgtggtgttcttaaaaaaaaaaaaaaaaaaaaaactccctgaaatgtctcctccttccctgcttggcatgggacaggactatgtgggaatgagccttcccagcaagaggggacactctgaccctcagattttgataatcaatgctttcaagaagaaagattttgatcaaaaggggggcaaatgagaaagaaaaaaatcatttatctgaggaatgtaaagcccttttaaactgtgggcccagaaagcttgatgttaagtgccagaaagcatttcaaatgaaaccgcagcccctcactacccctcgagccaagtaactatccactgatgacaccaagccgtggtcaatcgcgaaccaatgccatttctacaagccagtgagctcctgggcaacgttcgaaaccacctgctctccgatgggctctgttttctttaaaaacctgagcctctgttttgttctccgttgcacctggtgacccaggccgccctcgacctctgtgcctgaataaacccaccgggcaccacattctgacccttttaattattttaggttgacaactaatacaggactcagcgccggtggacaggaagccagggcccctgcagggaggcgcccgtcccttctcccggggagggcagggcgggcgcgcgcgcgtcccaccgggagcgcctcctcctcggcgagggagcgaagggcctccgggtcctgtgatgtccgtgctcggaaggcgcggaggagggcaggccctgcgggacagggcggcggggtcgccggggtcggctcagctccccgcggcgtccggctgctcggcggcctccggagcggggccctgcgggagaacgcaccttccccgccccatcggggcctcagtttccccaccccgggagagccggcggcccgcccccggctcactcccagctacggccctcacctcaggacgcgcacccggcccggccccgctctgcccccggcgcccagaccgcccacctggcccgcgcggcccggggtcgctcacctgcggggccgggaccgccccacaccgtccacgcccggcgcggaaccttggcccgaccgcagccgctggcccggagggctttatccggcgcaccaaggccagcgcgggcggggcgaggaagccgggcgcacaaagctcccggcggaagtccggccggggcgggggccgaatgggaggtgggcgaggcctgagggtctggagtgggcgtagccgtttctggcgggggcgtggccttaccggggaggggcgggcgcctgccgccagggggcgccgcggggcagcggggttgcacctggcgcttggcgcccgcacctctgcccgcctcggagaccccgcagccccgcgccgccgcctggccccggccccggcccctccgcgggatcctggcccctcctcgagcgccgccaccggccgccatggcctctctgggggacctggtgcgcgcctggcacctgggcgcgcaggctgtggatcgtgggga

SEQ ID NO: 43295 - DNA, 2300 bp, Homo sapien
tcatgtgtttatctgtgtgtaaagcacagctcttccttaaaccagactcaggaggacacagaaggttctgaacagggaccgtggccatcagttaaatgtgtgtgacaggaagggtgctacggtctctttcacaaatctggctgagtgggggcttgtcgttgaaccaagttcacacaggtgtgaagtgtggcggctgagcacaggcacgcagccctgatgtggggtggcggctcagggccagcagaacccacctgtctgccccaaacgtcacgcaaggctcctaacaagagacagcagttccagcgacaccctctgcaccctgggctgcccctcacgtgatcggctttatgaatcatagctgttccatctgctttcctaagttcccatattcctaacatgcatatgctgtgggttagtcgtatgactttcactgcgtcccctctctgtagtgaaaccaggcacaagagcacaagtgactgggttagccccggacataggatttgttgctgaaccacctggtgtctaaagattacattccctttcttggataacattttaaaatgaaatcattgtgggccggacaaggtggctcacatgtgtaatcccaccactatgggtggccgaggagggtggatcacctgaggtcaggagttcaagaccagcctgaccaacatggtgaaacccgtttctactaaaaatactaaattagccaggcgtggtagtgggcgcctgtactcccagcaactagggaggctgaggcaggagaattgcttgaacccgggaggcagaggttgcagtgagccaagattgggccacggcactccattcagcctgggtgacagaacgagactccatctttgaaacaaacaaaaaaatgaaatcattatggaggtgattgtaaatttgtacgcagctttaagacacaagagaggggggtctcatgcgctttgcccagtctcctccaagggggatattttgccagtcaggggcgtggagaccctcccacagcgcgcagttccctctcctttaaatcactgctgtcaccgagccttcagtaaccgtgggcacctgcctgcttctgcggggtgcttgggactgagcgggggtgggcagcgctggcgtttgggatgcgcaggaacaggcggccccggaacgcgagggggcacgagaagggcaccgggctccgtgcagggcctcggccgctgcaccctggcaccctggactcctggctgtttcggggagtgggctgggggagggctgagggctctgaggaggagactgacccggtctcccggccatgaccacaggcgcaacgctttccccttagggcagggcggtccctcgggcctgacccagcccagcagcttcccccttcccggtgtgagtcaccctcgggccccggcctctcccggtgaccgccgcgccccccagcgcggcctcgcttagctcaggtgcggcccccctgctcggctcccacctgccggggcgttcgctgggtcgggggcggcagggcgaccccgtgacggtcggggaggggcgctgggccctccccaggggctcgaggcggaggcgtcgcccgcaccggcctccccacgccccgctcacccgcagcgcggcctcggggtccccggccagcaggtgcacgcagcccgcgttgaagcacagcctggcgggcggcgccgggacgcccgagaagaggtgcaaggcgcgggcccagtccccacgatccacagcctgcgcgcccaggtgccaggcgcgcaccaggtcccccagagaggccatggcggccggtggcggcgctcgaggaggggccaggatcccgcggaggggccggggccggggccaggcggcggcgcggggctgcggggtctccgaggcgggcagaggtgcgggcgccaagcgccaggtgcaaccccgctgccccgcggcgccccctggcggcaggcgcccgcccctccccggtaaggccacgcccccgccagaaacggctacgcccactccagaccctcaggcctcgcccacctcccattcggcccccgccccggccggacttccgccgggagctttgtgcgcccggcttcctcgccccgcccgcgctggccttggtgcgccggataaagccctccgggccagcggctgcggtcgggccaaggttccgcgccgggcgtggacggtgtggggcggtcccggccccgcaggtgagcgaccccgggccgcgcgggccaggtgggcggtctgggcgccgggggcagagcggggccgggccgggtgcgcgtcctgaggtgagggccgtagctggg

SEQ ID NO: 43296 - DNA, 2300 bp, Homo sapien
gcggggctggtgtgaaagctgcctaaccacagccccatctccgccctgtgctgctgaggggaccccggctgcccacaggttccaggaggctctgtctgacttctggctggccctggagcagctgaggggccacgctgccatcgactacacgcagctgggcctgcggttcaagctgcaagcctgggaggtgaggccgggcagggctcactgtgctgctggctgtggggtgtccacgggcggtggcactgtcacaggagggccctgtggactggggagcgcctctggccgaagctcttggtgccatggaataccctggccactccttgacccgcaggaggttctggtggcagtggaggtggagggaccattttgtgccatttcaggccaccaggggtggctccacccagaaggagggcagaggcgaaaggctgctgggtgggcagggagcaggcagggggttgtgcccaccctccactgtgcccccagccctttcctggctgcctggaacgtgttggcaccgaaggaggggtgctgagaggcccccccaccagaccccggaaatgcatcgccctgaagccttctgggaatagcattgtcttttaggacaaaaagatggaagggaaagcccactggtgtgggtctggagtcagggttaaagccaggtgggggcccgccagcccaggacacagaacggtgcaggggaggggccgggtggggggattgggagaggagctgggtggggagacgggggagaagccaggtggggggactgggggagaggctgggtggggggatgggggaggggccaggtggggggactgggggaggggctgggtgggcagaccgagggaggagctgggtgggggaaccgggagagggcctgggtggggcatcaggcccctgccatcaccttggccccactcccaggtgctacacaatgtggcgtcggcacagtgccagctggggctctggacagaggcggccagcagcctaagggaggccatgtccaagtggccggaggggtccctgaatggcctggactcagccctggaccaagtgcaggtgaggagtgccagcccggtcatggttttgggctggtgcctaccaaagctcctcaagaccaatttcatgagatgaagaagcttccggagggagatggccctagtgcccagtttcgggtgccaggcgggggcttcctgtgacctgcgggaagggggtggggggcccaagcggccccttctgctccaaggcacaggggctctgcggctgcaggcctggttggtcaccccgtctgcatctgctggatacccaccccctccagagacggggctcactgccgccacggcaggtccccaggggcgaggtcttccggccccaccggtggcacctgaagcacttggagcccgtggatttcctgggcaaggccaaggtaaaggtggggacggcgtcctggggcatggcggctggtgctgagccctcgaactgtgttcccagggatggggggaggtgcagtccaggccaccgtaagggccaggagggtagagagtgggcccacagccatcctcaaactggcgcccacggtaggggggcggtgccccaaatggggctgtgagcttgaaggcagagcccactagagccggctgcataggagggggctccagctctctcaacaaggaccctgcaggtgccaccccgcccccagactgggccatggccacagccacagccttgcagcctcccagagtccctgcgtctctctgcgtcctttcatgcctttgtgtctccctgtgtccctgccacagacagcgaggtcccgggggggtccctgcgtccctgccacagatagcgaggtcccgggggggtccctgcgtccctgccacagatagcgaggtcccggggggggggggtccctgcgtccctgccacagatagcgaggtcctggggggatgcctgtgtgcctgccacagatagcgaggtccccgggggggtgcctgtgtccctgccacagacagcgaggtcccaggggggtgcctgtgtccctgccacaggtagcgaggtcccggggggggtgcctgtgtctctgccacagctagcgaggtcccggggggcgggggtgcctgtgtccctgccacagatagcgaggtcccggggggtctccctgtgtccctgccacagatagcgaggtccctgggggggtccctgtgtccctgccacagatagcaaggtctcacgggggcaggggctgcagtccgacggtctgggccacgtcacgcccacacttgggtcagagccaggcaaca

SEQ ID NO: 43297 - DNA, 2300 bp, Homo sapien
acttcagcctgggcaacagagtgagacttcgtctcaaaaaaaaaaaatttatatatatgtatatgttttaactgaataaaatgaaaatacaacatatcaaaaattgagagagatagctaaacagtgcttaagagggaaattcatagcacaaatgcttacattagaaaaaaagaaaggttcaagtcaataatctaaccttctgcattaagaaaccagaaaaggaggagcaatataagctcaaatcaagcagaagaaaggaaatacaagtaagagcagaattaaaataattcaaaaaccggccgggcgtggtggctcacgcctgtaatcccagcactttgggaggccgaggtgggcggatcatgaggtcaggagatcgagaccatcctggctaacacggtgaaaccctgtctctactaaaaatacaaaaaattagctgggcgtggtggcacatgcctgtagtcccagctactcaggaggctgaggcaggagaatggcgtgaacctgggaggcagagcttgcagtgagctgagatccggccactgcactccagcctgggcaacagagagagactccgtctcaaaaaaattaaattaaattaaattaaatttaaaaattcaaaaaccaaaaagaaaaaattatgaaacaaaaagcaggttctttgaaatgatgaataaaatggataaacctctagctagcaacactgatgagagacacagaggacaaaattaccaatatgaggaatgggagggttagcactgcagaccctacagacattaaaaggataaccaggaagtactatgaataattgtagtcacataaatttagcaacttaggtgaaatggaccaattccttgaaagccacaaactaccaaaactcattaaatagacaacttgaacaatcctattaagtattaaagaaactgaatttgtactttaaaacttttctaaaaaggaaagtactggctcagatggttttaccaccaaattatacaaaatatttaaagaagaaatttaatacaaattcttcaaatcccttccacaaaataaaacaaggacagctggctgggcgcggtggctcacgcctgtaattccagcactttgggaggccgaggtgggcggatcacaaggtcaggagtttgagaccatcctggccaacatggtgaaaccccatctctactgaaaatacaaaaaattagccaggcatggtggcaggcacctgtaatcccagctactccggagactgaggcaggagaatcgcttgaacctgggaggtggaggttgcagtgagccaagtctgcaccattgcattctagcctgggtgacagagcgagactccatctcaaaaaaaaaaaaaaaaaaggacaacttcccagactcattttataagcccagcattatccccatacagaaaccaggactaaaaaagaaaactatgcaactttgttgaacacaactgcaaaaatcctcaacaaacacatttgactcttatgacccatggcagctagtgtataaagttgctgcaaacactgaattaaagaatatgctaaactattgctcctaagggaaatgcaaagttctgttcctgcaagcttctggtcacatttttgttaaatgatcaatatattaataaaaccttcttttatgtgtatttttgtttaagggcaccttacttaatatgtattgtatcactaacattgaactcatggccaacagcgctaactcttgcacgaatgaagcttatccaatgtgtgttttctctgtaaagtgcatctcagccttcttgcatttctgcactatgctgagacgccattataaacagtgaaatcaccaagaaaaagcacaaaaatgcacacacatgacaccaaatatgctaccagtaaagagagtcccgattgagaccccaagagggttcttggatctcacacagaaaggaattcaccgcccccccgcattcccccaccctattccccgccccccaacacccccagccccacccagcccggccctggctccgcgcctcccccagccccgccccgcttcagaggcccggaccccgacggcggcggccccgggacccacggcgagcgggaaaggcagagtggctgcaaatggaaaacgacgggcgccgcggggctgcaggcgcttccgcccccgccccgggcctggaccttcggggtcacctgactccgacctgcccgggccgggcggcacggggggtaaagtccgggccggggtcaggagcgcggctgcgggccgtggggggcggggtcccggagttctgcccctcgcagctccaggct

SEQ ID NO: 43298 - DNA, 2300 bp, Homo sapien
agcaggagagggggctcctgcaggcccccagcccgccatggggtggtgcagacaggagccccgctctgctgcagcgcaggcaggctggatcctctgccacatgggcgtggaggctcagggcgtaagtcccgggcgaggacggaaggtcagagcctgggaatgcagctcgggaggagacttgatccagagcgccaggcactgcacctttgttctggagttgaaggggagccctggaaggctgtcgcgggaagagcactgggtgggatttgcctttgggtgggaggtggtgccaggagccagggagagcactggcttcccacaccgaaggggtgagagtagagccatgacccgacgggggctaggtgggcaggggctgccgtcaccctctcacggccctcttcagcccctggcttcctcccccaggaacttccgcaaacacctgcgcatggtcggcagccggagggtgaaggcccagagtaagaccccgtgcggcgggggtgggggggcggcgttgcgcttggctggttggggctttgcttgctgctagctgcgataagaacgacccccgccccaaccccaatcgggccctgcctcaggctcctccccttccagccacttccccagcccggcccaggctcctcccctcccagccacgcccccagcccggcccaggctcctcccctcccagccacgcccccagcccggcccaggctcctcccctcccagccacgcccccagcccggcccaggctcctcccctcccagccacgcccccagcccggcccaggctcctcccctcccagccacgcccccagcccggcccaggctcctcccttcccagactccgcctctggccctgccccagtgttctcagatcctgcccctgaaccaaccgagcctctggtccgtgtctgcttcatgtgccttagaccccacccacattagcttcctcctctgcccagggcccctgtggtcccctcgcctggggtctgagactcccgaggccccgccccacccgctcgctaatgcgggttttgctctctgcagcgttcgctgagcggcgcgagcggagcttcagccggtcctggagcgaccccacccccatgaaagccgacacttcccacgactcccgagacagtaggtgccccgcacaggcccgcccaccttccccagagcctcccctagaccccagacccctgctgggggtcccctgccagggccgctgggctgcgcttttgcactcctgaatcttggtttacctgtttgtgagatggggacgccctcagcatctccgatcgcaaaggcggggctaacaacggccgcggcagtgctggccgggggcgcctgtagggccgtgcccaccgccactcgcaagaggccctcaggggcagggggctgcggtgcccgcccccactccctcccaggcgcccggcggacttggctggagctgatgcctgcacgcgccttccaccggcctcgcaccagggtctcccttcccacatcaggccgctgcccagtggtgtccacaggcctgtcctgccgggctggcggcgacctctgtatggtcctcccacttgcttggaggaccctccgggatggggctttcgggccctgtgggccttggggccatggccaggataggaggtgctgccgggcctgctgtcctggtgaccctcttgcttcccaggcagtgacctgcagagctcccactgcacgctggacgaggccttcgaggacctggactgggacactgagaagggcctggaggctgtggcctgcgacaccgaaggcttcgtgccaccaaaggtcatggtgaggcccagcccgggcagtgctcctctacaccccgagcaggactccgccccaacccgagtccagccagctctgcctgggaccacgcagccttctccagctgcctgggggagggtgtctcacagggctatacccttgggctgcctggcagccagaaggtagcctcatgggggctcccacagccccttggcttttggatgggcctggggcccctgagcagctctttgtctccgcagctcatttcctccaaggtgcccaaggctgagtacatccccactatcatccgccgggatgacccctccatcatccccatcctctacgtgagtcccgccccgggcctgcccccaacagatgccctcttgcggccccaccctgggccagcgccggcaccccaggtccccagggtgctgtggcgctgctggctctgacgcagccttgatgtggccttgtggcctgtgtctgtccccaggaccatgagcacgcaacctt

SEQ ID NO: 43299 - DNA, 2300 bp, Homo sapien
aatgtttctcaaactttgggtggccaaagggaaagttaagccaaaaaaatcaaagcgtcaagttaccaagagcgtggtcttggtgagtgagcagcagacattcgagcactgccctctgtgcccgtgtggggatgccaccctccccccacccgccctggctgccagcttctgctgacccctggacccagaagcatctgcttcccaacagggagggagaggcttcaggaacccctacttcacccagccaccgctcctttttgtctctcttagacgacatccctattcgtacctggttccccaaggaaaatcttttcagcttccagacagcaaccacaactatgcaagcgtgagtcttgtgcccacgacttggggtcagggttgggtggtctctttctgctgctcaggaaacagcactttttcccagtctctgggcctaccaggggggctgcttctgaacagacccacgtgcctatgctgtgccaggcctgccagggaggccagggctgactgctcttcccctcccatggctggtgcccagcccccccccccacacacacacagtcaggggacctggcccagggctgcagctgatgagctctcagtggggtgtggggtgtggcaggttctcctgctcctatccactctcctcagcctgtgtctgccctccctcaaaccccaaatagaagcctacttctgtttcatacgtgccataggtcatcacagtttcagggtccccgcagggacctgctcctctctgtcttgacatacatttggcttttctgttctgggattccttccagggaagttccctttgctgcattggtccccacaccaaagaagtgtcctgcccgggggagtccaccccacacccagcctcaggctgcctggtctcagcaaccagtccttgtggcatgggctgcagtgacatcagcttccgttgcccattcagggctggccagcagtgtagccagcatcctgctggtggctgggttacctgtgagggacctattgggtcagtgacaagaagggaactgtagggaccgggtgggggctgaggggaggcccggggttgagctcactgtgtcttctctctcacgccatcccttctggccctggcttcagcatctcgtaagtacctgtatgacttggtgcctaagggcacagctgttgtccctggggagaccctcccaccccaaataggtttgggcaggccagggacctgggtcttgagggagtgccgctctctgcgggcctggctcccagcgggcaccgaggtcgcagcagggcctgctgggagctgggcctcgacaggtgaggcaggctgggactcctctgccgggccccgtgccccagacgccctgctgggccctctgctcgcaccactgtcccgacgtctgtgtccctcctgcctccggccaagggcagtgctgactcgcggtggtttcccagggtgttcaggggctacgcggagaggaagcgccggaaacgggagaatgattccgcgtctgtaatccagaggtagggcctgccagccactcgccaccagggtccatctctggtctgtgctggcctggcctgggccccctcggccctggcagacctgatgggggaagggtggtggcgaccactggcctggccctgctctggggacgtggcaggcaggagaggccatgtggcccgggctgcaggaaagcatctcaccctcagtcctgcactccgagggcacgtgtctctgtctgggctggggccagcagcaaggcccccctcccccactccaatcacacagatgtgtctgggaagcttttttgcccgttttggatgttgggccttggcagggtccaaagtttggtggaggagaggacctgcccctgaggtggctcaaggacacagagcaggagagggggctcctgcaggcccccagcccgccatggggtggtgcagacaggagccccgctctgctgcagcgcaggcaggctggatcctctgccacatgggcgtggaggctcagggcgtaagtcccgggcgaggacggaaggtcagagcctgggaatgcagctcgggaggagacttgatccagagcgccaggcactgcacctttgttctggagttgaaggggagccctggaaggctgtcgcgggaagagcactgggtgggatttgcctttgggtgggaggtggtgccaggagccagggagagcactggcttcccacaccgaaggggtgagagtagagccatgacccgacgggggctaggtgggcaggggctgccgtcaccctctcacggccctcttcagcccctgg

SEQ ID NO: 43300 - DNA, 2300 bp, Homo sapien
agggcatagacaggtttgggggtgcatgccgctgccagggtctgacagcagcagccactgtgaggcttggaacagagaacaggtgctcaggtcacagcatgccagcggactcaagattaaaaccggcaggcttctgctgcggcctccacaccctatgagctgtgagctccctcagctcctcagcaaaatctgccaggcctcacagtccgctttcgccctgctagcaccaggtcaatcaaggagtgcttcctggaggagggggcctgggaggatcttaagggatatgtagggaggaagcaccgcttaatcaggagactgggctgccctccgagagtcctggggagctgttggggcccagccaggcagtgggcatctttccccagggttgttgagttgtgtggtagcttgtccaccaggcagaaagtcactccactgtccccacacttgggcatcagggaaaggctgtgggggccctcggaaggggacagccctcagcaaggtggtctctagcctcggtgagggcctccagctagagcatgggggctgcagagaaggcctcagagcctcttctgcccaagggaaacagacgcattgttttcctgggcctcctggagacagactgtgctttcaaaggaatgtttctcaaactttgggtggccaaagggaaagttaagccaaaaaaatcaaagcgtcaagttaccaagagcgtggtcttggtgagtgagcagcagacattcgagcactgccctctgtgcccgtgtggggatgccaccctccccccacccgccctggctgccagcttctgctgacccctggacccagaagcatctgcttcccaacagggagggagaggcttcaggaacccctacttcacccagccaccgctcctttttgtctctcttagacgacatccctattcgtacctggttccccaaggaaaatcttttcagcttccagacagcaaccacaactatgcaagcgtgagtcttgtgcccacgacttggggtcagggttgggtggtctctttctgctgctcaggaaacagcactttttcccagtctctgggcctaccaggggggctgcttctgaacagacccacgtgcctatgctgtgccaggcctgccagggaggccagggctgactgctcttcccctcccatggctggtgcccagcccccccccccacacacacacagtcaggggacctggcccagggctgcagctgatgagctctcagtggggtgtggggtgtggcaggttctcctgctcctatccactctcctcagcctgtgtctgccctccctcaaaccccaaatagaagcctacttctgtttcatacgtgccataggtcatcacagtttcagggtccccgcagggacctgctcctctctgtcttgacatacatttggcttttctgttctgggattccttccagggaagttccctttgctgcattggtccccacaccaaagaagtgtcctgcccgggggagtccaccccacacccagcctcaggctgcctggtctcagcaaccagtccttgtggcatgggctgcagtgacatcagcttccgttgcccattcagggctggccagcagtgtagccagcatcctgctggtggctgggttacctgtgagggacctattgggtcagtgacaagaagggaactgtagggaccgggtgggggctgaggggaggcccggggttgagctcactgtgtcttctctctcacgccatcccttctggccctggcttcagcatctcgtaagtacctgtatgacttggtgcctaagggcacagctgttgtccctggggagaccctcccaccccaaataggtttgggcaggccagggacctgggtcttgagggagtgccgctctctgcgggcctggctcccagcgggcaccgaggtcgcagcagggcctgctgggagctgggcctcgacaggtgaggcaggctgggactcctctgccgggccccgtgccccagacgccctgctgggccctctgctcgcaccactgtcccgacgtctgtgtccctcctgcctccggccaagggcagtgctgactcgcggtggtttcccagggtgttcaggggctacgcggagaggaagcgccggaaacgggagaatgattccgcgtctgtaatccagaggtagggcctgccagccactcgccaccagggtccatctctggtctgtgctggcctggcctgggccccctcggccctggcagacctgatgggggaagggtggtggcgaccactggcctggccctgctctggggacgtggcaggcaggaga

SEQ ID NO: 43301 - DNA, 2300 bp, Homo sapien
gggagaaccggcctccctgtgatcctgcaggtctgagcagcagatcgtgagggccgagggcccaggactttgcgaccagggggccgctggcctcagtttccccgctctggaggcctggacgagagggcgcggagccaggccgcccggccccgcccccaactcaacccgggcccggacgtcacggtgggcggggccacatgtcctctccgagctctccggggccctgacgtcacggtaggtggggccgaccgcccctctgggcccgcccgggccctgacgtcacgatgggcggggccggccctcggttcgggcagcgctctcccgggagcggcggcacgcgcggagcgccgggtgcggccatgcggggaccgggcccgaccccgagcccgaccccgagcccaagcccgagccggagcccgagcgagaccccgagcccgagcccgagcgcgacccccggtgcggcgcggctaccccggcggaggcggcgggcgcggggcgcgctctgaggcccgggggatgcgccgccgcctcgaccatgggcgccgccgcctccaggaggagggcgctgaggagcgaggccatgtcctcggtggcggccaaagtgcggtgagtgcggcggggccgccttcccgcaccccgccctggacctccgaccccgcccgagtccgcccctgccccgcggtgctccccgggctcccgggccccggcctctgccactgaggcgccctccccgcgccccgcgcctccctcttcctggtcccctgccctgctcttccctcccctcccctcgcgagcgcgtggtgggcgagcgcaccccccaggtcgggagtggcctcggttcccccggggaacagcagccgaccggcctcgcgacccctctccacggtccgacgggcaggggccgggcctgcaggcctggccagggcgcaccaggaccaagggtgtgtgggctcccggagggggacgaccccgaccctccttccagacgccgagggcctggctggggaccggacccccggctcttgcgcggcccggtgtttgggagggtcgtgccgtggcctctgaccgtgccctctgtccaccctcagagcagcccgagcgtttggagagtacctgtcccagagtcaccctgagaaccgcaacggcgcaggtaggggcacgcgaggccgtgccagggccgcccagaccccccagcccaagggatgctgatccctgcctccgggggtggagcgtgaggggcattggttgcgcgtgggcccggcgccctgccggcctggcttccttacatcccctgccctccctgcccgagccccaggagcagttcccagccgctcgtcaccatggcacccaccccgcctgggccgttggcatggcaacaggcctcctggctcccccagggctggcaccactgcctctgggggccagctggtggggggagggggaagttggcaccaggcaaacggtgcgatcgcaggctgggggatggcctgcgtgttcctacccggcaggaccgcacacaggtagcacagcgtcacccagcccccacgcacatgctagagcttcaggcccagataggagtgaggggctcagaaacacgccagtgactagggtttgggcagccctagtcccccacagaggccaggtgcccactgggtgttctctgccttcggcctgctatgaaaccggcagcggggggcccacacgcggcaggcaggctcactcagtgtctctcctagatcacctgctggctgatgcctactctggccacgacgggtcccccgagatgcagccggccccccagaacaagcgccgcctgtccctcgtctccaacggctgctacgagggcagcctctcagaggagcccagcattaggaagcccgcaggcgagggccctcagcctcgagtgtacaccatctctggggagcctgccctgctgcccagccctgaggcggaggccattgagctggcggtggtgaaggggcggcggcagcggcaccctcaccatcacagccagcccctgcgcgccagccctggtggcagccgggaggacgtcagcaggccctgccagagctgggcgggcagccgccagggctccaaggagtgccccggatgtgcccagctggctcctggccccacccctcgggcctttgggctggaccagccacctctgcctgagacctccggtcgccgcaagaagctggagaggatgtacagcgttgaccgtgtgtctggtgaggggtttgtgtcagggcatagacaggtttgggggtgcatgccgctgccagggtctgacagcagca

SEQ ID NO: 43302 - DNA, 2300 bp, Homo sapien
cgcccacgtccacgcccaggctccagcagctggggtgcttggtggcactcctccgtcccgggcaccacgtgttcccacagcagtgggactgtgaccaccccgggtcacccagcccctgcccttcattcacctcaactcccagccacacctcaggcctgaagtagaaccacgttttgcctcccaccccacccagtgggaaatgggaatgaaggctgcttgttggaggggccgcaggacaagaagggcgggtccactaccctccatgctccatccagggccctgcgcttgggccttcagccagtggcctcctcacagcagaactggacattctcctgggagacgtcttcatggctgccgcaggccgagagggccctgggcaaggcagcccctatccacagttgccaggtctggggtgctggagccctcagggtgcttggctgacaaggggaggagtgtctgcccgctccttgtccttgtggaagacccacgaagtgatgtgctggggcaaagctggagccagacagaaccaggggtggtgtgcagggctgccctgggaccaggtggctgcgtgtagggccccgggccaccttggaggcgggggtgggcatctgtggccggttctgcctctgagtgtggctatgctgggtacggtcccttccttgggaggggactgacgcagccctaccctcggtgccagacgaatctgactaccagacggagtacgaggaggagctgctggacgtccccagggatgcatacgcagacttccagagcacctcagcccagcagggctcagacttggtgaggagctgggcatggtcccacctggtgcccacagctgagccttggtgcctggccctgtgccggccactccctccctgtggtcccaccgggttaccagcgctgcagagcccctgccctgcctggtcctcacctggaacatgcggtctgcttgcaggaggacgagtcctcactgcggcatcgacaccccagtctggctttcccaaaactgtctgagggctcctctgaccaggacgggtagaggcctctgctaaagagcccggatgcagcgtcttccgtgggactgtccccaaggctgaggctcctgccaagtcctaggggcctctgtacctgccctgctggaagccctgacttccccggggccccaggctgtgttagggttctctgggcctcttctttgtaccagcagccctgcatacagggccctgtgagcccccctgcagtcctgtgaggcccctgaagctctgtgaggcccctgaagctctgtgaaccccctgcagccctgtgaggccccccgaagccctgtgaggccccccgaagccctgtgaaccacctgctgccctgtgaggcccccaaagccctgtgaactgcctgctgtcctgtgaactgcctgctgccctgtgaggtgtgggagccctgatgctgccgtgtgatgtttcaataaaggtggatctcactgttggacgtgtctcccgggccgaggtccctgtggcaaagaaacactactggttctccctgatgcgggtggtccctgaggctgggcagtccccagtcctcctcaaaggaccccactgctggggcctgagagccctagggcggcaaatgcaggccaggcaggtagggcgtccagagtctgcatagagctgtggccccccaggaccaggacgggcccctctgtctctctctggcctcgtgcaaactgggtgccccctaaactggcttccccttcggtttccagttcccaaactgcacagggagcccttttgtgtaaggggagggagaaccggcctccctgtgatcctgcaggtctgagcagcagatcgtgagggccgagggcccaggactttgcgaccagggggccgctggcctcagtttccccgctctggaggcctggacgagagggcgcggagccaggccgcccggccccgcccccaactcaacccgggcccggacgtcacggtgggcggggccacatgtcctctccgagctctccggggccctgacgtcacggtaggtggggccgaccgcccctctgggcccgcccgggccctgacgtcacgatgggcggggccggccctcggttcgggcagcgctctcccgggagcggcggcacgcgcggagcgccgggtgcggccatgcggggaccgggcccgaccccgagcccgaccccgagcccaagcccgagccggagcccgagcgagaccccgagcccgagcccgagcgcgacccccggtgcggcgcggctaccccggcggaggcggcgggcgcggggcgcgctc

SEQ ID NO: 43303 - DNA, 2300 bp, Homo sapien
gaatagtaaagagagaccccatgtgcccttcgccagggctccttcacgggcagcgccttagggggtaacatcgaggccgggacgttggcgtttacgccatctgtagaccccttgggccccagcagcccgtccgtgccctcctgggtgtgtgtggtgcagtgtggtgtgggtgccgtttctgtgacctgcaccacacggggccactctgtcacggaggagaccctgcaggtggctgccatgttgtcacccagcaccccggcttgccggcagccctggatctgttctcgatctctataattttgtcattctgagaaagtgatggaaatggaaccacacggtgtagcctctgcagacggccttctcccactcagtcacgtgcacgcaaagttcctcctggccttttcctggcctggagctcagttctttttggtgctgagtcatcgtccgctgcctggacgcaccacagttgatctgttcatctactggagggcatttggctgcttccaggatttggcaattatgagtgaagctgctgtaaacacctgtgtgcgtgcttctgtgtggacagaggttttcagttcctttgggtaaacaccaaggagcatgattgctggatcctgtggtcggagtatgtttagttgtagaagaaaccaccaagctgacttccagtgaggctgcaccaggctgcagtcccacagcagtgagcaggtttcggctgctgcacatcgcaccagcattgggctggattttcagctcagagctgtctcttgagcccagggggcattctagttcagttgtaagaggggcccttattttgtgtgcctctaagaaacaaatgttgctagttaaggcacgagacacattgatctgatctctagttgttgttttttctgagatggagtcttgctctgttgtccaggctggagtgcagtggcgcgatctcagctcactgcaagctccacctcccgagttcatgccattctcctgcctcagcctcccaagtagctgggactacaggcgcccgccaccacacccagctaagttttgtatttttagtagagatggagtttcaccggatctcctgacctcgtgatcccttggcctcccaaagtgctgggattacaggcgtgagccaccgcgcccagccgatctctagcttttaattagaattagacctccctgcttcccacacatggggctctgggtcctttcccacccggcactgccaagcagcaccccctcaggctgagcccctcatcttagcttctcccctgagcctctggtggctgtgatgccagggctgacactggcgcccctggttgagaagggccctgacagccgtgcccatgtggaagatgcatacgaacaggcatgtcaacactggggaccctggcctcttggcgtctggcacctcgatgatctgggttttggaaattacgttatctcccatcgcacagccttccctgccctgcacacgtggcaggacacagagattccactgctgctcgtgctggaggggaccgaggctcagagaggctacccgaggcctccttcagggcagatgggaggtagcatcaggccacaggcccttccccactggcaggtgaagaaggcttggcagttgtgctcaaggggagcagaccttggggttggggagtggactctcactgccttcctcctccttggtgcctggctgggcgtcggtgcctggctcggcgtcggtaccttgctgggtgtcggtgccttgttggcgttggaggtgggctgcccaggcaggctccgttactggtggtggtgttttcaggcccgaccctgctgctgactagtgacaacataaaacggcgccttggctccgctgccctggacaggtgcgtgccgccagccccgactccttcctcccagccggcccaacgcagccctgagatgtgtccccactgtgtccacatccagcatctgcactgcagcgtgctcctcgtccagcacactgtggtgtgagggctgatgacgtgactcccttcactggacacactgggcagcgctgacctgctgggcactgtcaggcctcccaggggaccccagcccccgcttcccgcctgggcagccccgggtctcactctccccagcctgcccctcaacgagcctcagcctctgggcttaactgcagcctctgcgtgactgcctaggccctgaataactcactgcgaactagcgatggcaggaagtgctgggcagggaggggaaggggcagcggctggtgctggcctctgctgcctctttgccccggggacatgtgctaagag

SEQ ID NO: 43304 - DNA, 2300 bp, Homo sapien
ctccatgagtccgaggtccccggccagcctgccttcctctccatcctttggagtcttgcgagagctgcctcgagctctgtccctctctgatcatgactggtgacaggtggcctgtgtctgctccacctcccttctggcccagagccagaacctcaccagtgctttttcccaaggctaaggccatatggaactagcaatggcctcccccattccgcctcaaatgaggactctgacacctcagtccctggagaggcgagaggaaagggattcccaaggaaaagctgcaggaaaaataaaaataaatccacatcagagagccacgttcgggccgaagctcgggacgagacatcagaccgcgagagccgcgttcgggccgaagctcgggacgagacatcagactgcaagtgaagctcgggacgagacatcagaccacgagagcagcgttcaggccgaagctcaggatgaggaggcggttctccgtctttctgtgctcagcagcactttggtgtgtgtgtgcattgtttgtttgctatctgggagttatttcctcctgattatagaagccacctgccttccactcagcgcctagaggcggagacacatcatctgggcctgagtcccccgctcctcccgtgtggccaaggctcagctgcagtgaggggctgaagtgcgtgcggtgaaggtgatgctggggacacctcgcagggcgtgccaggttgtggtggtggcccaggctcctgagatgcccctgacaggcaggtggaggctggatgggacggcctctcgggggccagctggggttgggtagaactggaggctctgtggctggcacagccggttccgtgccggtgtggctggttcccccagaggagcagaggctgccaggaggaacacgtgtggagggttttattttgcttcatttttcttgtctgtcattgtggagttttatcacaaaggctgtgtaggctgcaaaaagacctaagagcccccaggcacgagatgaagacgtgggcgcctccctcttacagctgctcaggtggtgctgaggcgccagtgccccggttcttttcctgcacagacacagctgcacatgcgtcaggcagggtcctttactggggctgccggtttgggtatttactccagggctggggtcccctccaggggtccatgagccccacggcgacacttggccagccctgcactccaggccggcactttgggccactcagctccaagcgcttatcccgaccagggcccggtgtggatgcctctgcacgtctccagcgctgcttggtcacagcccttggcagaagctgggtgcggtctgtgaacagctggggatgcagctgggctttgcaacctccaggcagagatgggcactggacactgagcccttggcagccggtgcgcagcacgcaaccgtccatccctggcttacctgctggggccaaccaagcactgggccctgtcggaagctggcaccgtgctcaggaagccagtcaggaaagaaccttctcctagagctgcagtcgagttgggtcagggatgaaattggaccaagaaggcaaaagagatggctcagaagggcggggggaggggcaggggcacgcaggtggtggggcagcgctccctgaggaggtcaggacccttggggccaggaagagagctgtgtggtgtgggggtcaccagcagctctcagggaccgcagatgggctgaggctgcagactctggcttgttctgagtggggaggggcaccaggggctttgagcaaaaaaggctccgggcagacttgggcgtcgaaggccagctccggccactgtgcacagagcgtcctctcaagcaggcggctgaagccaccccaaggctgggcggtggaggcccagggctcccggtgctgagttggactgagggcggggactgagctttggtgggtcgggtaggagcctggggccggaggtgggggccgagtccgagggaggatctggggctgtgtgagtcttggacactcattcgggatgtgggatgggcagcatcatttatctgtttctgcctgcatacaggtacgggtgtttttcttttgggaggccttgagtatttatttaataatggaatcacatttataaaccactctgcagctttcctgctcagcagcacgtcatcagctattttcctgtgagcacatgattgccggctgtgcgctggttctccgagccatgttccccgttcacaggctcttacccgcagtgctgccacggcgccgtgtgcatcccaggatcttgcaggtgtccgctggccgccg

SEQ ID NO: 43305 - DNA, 2300 bp, Homo sapien
tcagagagttttaaaaaaatgttctgtcatcgtgttttggttcttctgtgtgcctcctgtttctttgctaggacgttctctctttgtctttgtttcaggagtgttcaggattgctggttctagctggtaatgataacagctttatcgtcctggagaaataattccgtctgtgacatgcggtcgtttttatctgtggattgtttttactcctctggttcagatcctccttgctcttggcatactgggtcaccatggatgtggcctggtcactgtggacccatcctggtcactgtggattttgtgtcctgatgttttgagtgttaggctatgagactctggttcccatttaagtcttcaattttcactgttagtgtgcttgtattcacagggcatgtcctggccaacgtttgtggagtgtggtttgaacgtgaactgaccctggtctgcctactaggtgctgcccaggcccagtgtgaaggctgcattctgcgccatcttcagctctcagacccgaacacctgaccctggcacaggctgcgtcttcattacagattcgaggctttcttgatctcctacctctagttggcaggaggtggggcctcctctgctttctctgcaggggtgcacagttggggggatgtctgctggtcagggggtgcacagttgggagggatgtctgctggtcagcgggtgcacagttggggggatgtctgctggtcagtgagtagacagttgggatgtctgctggttagggggtacacagttgggaggcatgtctgctggtcagagggtgcacagttggggggatgtctgctggtcagtgagtagacagttgggatgtctgctggttagggggtacacagttgggagggatgtctgctggtcagggggtgcacagttggagggatgtctgctggtgtgggcggtggacagttggtgaagaggtttcctgctgtgggtggtggacagttgggaggatgctggctggtcggggggtgcacagttggggggggatgtctgctggtgcttgcttggtgccagtcagtgtccctagaggcagctcccatggggagggagggacagacccctccgtctgtggcagccatgtggctgggaagcagactctgcttctttcttggcctgagtcaagtggttcctccatgagtccgaggtccccggccagcctgccttcctctccatcctttggagtcttgcgagagctgcctcgagctctgtccctctctgatcatgactggtgacaggtggcctgtgtctgctccacctcccttctggcccagagccagaacctcaccagtgctttttcccaaggctaaggccatatggaactagcaatggcctcccccattccgcctcaaatgaggactctgacacctcagtccctggagaggcgagaggaaagggattcccaaggaaaagctgcaggaaaaataaaaataaatccacatcagagagccacgttcgggccgaagctcgggacgagacatcagaccgcgagagccgcgttcgggccgaagctcgggacgagacatcagactgcaagtgaagctcgggacgagacatcagaccacgagagcagcgttcaggccgaagctcaggatgaggaggcggttctccgtctttctgtgctcagcagcactttggtgtgtgtgtgcattgtttgtttgctatctgggagttatttcctcctgattatagaagccacctgccttccactcagcgcctagaggcggagacacatcatctgggcctgagtcccccgctcctcccgtgtggccaaggctcagctgcagtgaggggctgaagtgcgtgcggtgaaggtgatgctggggacacctcgcagggcgtgccaggttgtggtggtggcccaggctcctgagatgcccctgacaggcaggtggaggctggatgggacggcctctcgggggccagctggggttgggtagaactggaggctctgtggctggcacagccggttccgtgccggtgtggctggttcccccagaggagcagaggctgccaggaggaacacgtgtggagggttttattttgcttcatttttcttgtctgtcattgtggagttttatcacaaaggctgtgtaggctgcaaaaagacctaagagcccccaggcacgagatgaagacgtgggcgcctccctcttacagctgctcaggtggtgctgaggcgccagtgccccggttcttttcctgcacagacacagctgcacatgcgtcaggcagggtcctttactggggctgccggtttgggtatttactccagg

SEQ ID NO: 43306 - DNA, 2300 bp, Homo sapien
ttgcttctcatgaaggatccaggtatccagatgttctccagtaggtaacgcatcatttctctctagctgtgttcaagaatgttttgaccaggcacagtgtcttacacctcatcccagcactttgggaggccgagacaggaggattatttgagcccaagagttcgagaccagcccgggcaacatagtgagaccctgtctctatgaataaaatttgaaaaatgatccaggcatgttagcacacacctgtcgtcccagctatgcagagggttgaggtgggaggatcgtttgggcctcggagttcgaggttacagtgagctatgatcgcgccaccgcagtccagcctggtcaacagagcaagaccctgcctcaaaacacacacacaaaaaggtgtttttctctgtctttagttttcagaaatgtgatttggaagtgtctgagcatgaatactttggatctgtcctgtttggggtttcttcgtcttggacccgtaggtttatagcttttaacacattttggaagtgttcagtctatatgtcttcaaacgattcttccactcgtgtgcccctccacctcttctggaaataaagtggcacaagtgttagacctcgcgttattgtccccaaggtctctggggcactgctcattttttaaaccttttttttctctctctgatgttaagatggaattgtttcttttgatctatcttcaggatctttggctttttgtcatctcgattctgctttgaggcctatcagagagttttaaaaaaatgttctgtcatcgtgttttggttcttctgtgtgcctcctgtttctttgctaggacgttctctctttgtctttgtttcaggagtgttcaggattgctggttctagctggtaatgataacagctttatcgtcctggagaaataattccgtctgtgacatgcggtcgtttttatctgtggattgtttttactcctctggttcagatcctccttgctcttggcatactgggtcaccatggatgtggcctggtcactgtggacccatcctggtcactgtggattttgtgtcctgatgttttgagtgttaggctatgagactctggttcccatttaagtcttcaattttcactgttagtgtgcttgtattcacagggcatgtcctggccaacgtttgtggagtgtggtttgaacgtgaactgaccctggtctgcctactaggtgctgcccaggcccagtgtgaaggctgcattctgcgccatcttcagctctcagacccgaacacctgaccctggcacaggctgcgtcttcattacagattcgaggctttcttgatctcctacctctagttggcaggaggtggggcctcctctgctttctctgcaggggtgcacagttggggggatgtctgctggtcagggggtgcacagttgggagggatgtctgctggtcagcgggtgcacagttggggggatgtctgctggtcagtgagtagacagttgggatgtctgctggttagggggtacacagttgggaggcatgtctgctggtcagagggtgcacagttggggggatgtctgctggtcagtgagtagacagttgggatgtctgctggttagggggtacacagttgggagggatgtctgctggtcagggggtgcacagttggagggatgtctgctggtgtgggcggtggacagttggtgaagaggtttcctgctgtgggtggtggacagttgggaggatgctggctggtcggggggtgcacagttggggggggatgtctgctggtgcttgcttggtgccagtcagtgtccctagaggcagctcccatggggagggagggacagacccctccgtctgtggcagccatgtggctgggaagcagactctgcttctttcttggcctgagtcaagtggttcctccatgagtccgaggtccccggccagcctgccttcctctccatcctttggagtcttgcgagagctgcctcgagctctgtccctctctgatcatgactggtgacaggtggcctgtgtctgctccacctcccttctggcccagagccagaacctcaccagtgctttttcccaaggctaaggccatatggaactagcaatggcctcccccattccgcctcaaatgaggactctgacacctcagtccctggagaggcgagaggaaagggattcccaaggaaaagctgcaggaaaaataaaaataaatccacatcagagagccacgttcgggccgaagctcgggacgagacatcagaccgcgagagccgcgttcgggccgaagctcgggacgagaca

SEQ ID NO: 43307 - DNA, 2300 bp, Homo sapien
gccccagcagccggctcctgtcctcaggtggagacactgacccaccaggcccgggcgaccacggtgcatgccgttcgggactcagaattggccaagctgccggcaggagccctcacgtccatcaagcgcaggtacccacaggtgagcatggcgtgggtgaggatgcggagcggatgagggtgtggagtggatgagggcatggaacaggtgagggcggagcgggtgagggcacagagcaggtgagggcgcggagcaggtgagagcgcagagcaggtgaaggcgcggagtggatgaggtcacggagcaggtgagggcagggcgcaggtgagggtgcagagtggatgaggtcacggagcaggtgagggcagggcgcaggtgagggtgcggagtggatgaggtcacggagcaggtgagggcagggcgcaggtgagggtgcggagctggtgagggcgcagagcaggtgaaggcacagagtggatgaggtcatggagcaggtgagggcagggcacaggtgagggcgcggagcaggtgagggtgcggagtggatgaggtcacggagcaggtgagggcagggcgcaggtgagggtgcggagcaggtgagggcgcagagcaggtgagggcgcgggtgagggtggtgcgggtgagggtggcacaggccatgtcccaaactgtgccctgagttgtggtgatcattcggtctacctacacatggatggaaaacgacctggaggaggtgaagattagagcccagctgggtgggggcggtgacggtgagcaggaaacctggagaggcgcccaggctgcttcccaggacagtcgtgcagctgccttcttggtggcctctctactcatgagtgatgtgggtgtggcagaggaaagggaagtgactctcactctgagatctggagaaggacagggcgggctgctcggaagtgcagggtcagcggtgaggagagcgcccaggaaggaccggcagaggggcctgaagggcaggtctgcagttgttcatcagccagcacacggatcccaagaagtttttcattctagaacaaatggaaagggggtgcaggtgtggcccacagcatgttgcagggccttttacggccagtgcctctcaccacccctggggctcatcctgagaggccaccactgccctccctccaccgcctcccctcaggtagcgcttctcccactcaaagctcttgggccatggttctcctgcccgcagctcctggatcctggttctcctgcccgcagatcctaggtcctggcgcttgctgtacttgcccacttatggaccaggagagcctggcggagcatgtgagtgcagctcacagggccagcaggctccagggtggcagccacagttgctgggaacagcagggagccaggccactcctccatctttgtcctggcctgcagggtgggcctcgttctcatgagcgcctcggagcaggagccctggcccaccctttagaggccgctgcagggctccatccaaccagcagcttctgggggacagtgcgggtgaagccagtgggtccgctgttgtggggccagctttgctgtacagtcagcccctgggcagggtccctgcaagccagcaacccctggtgtggggaccgtttggtccagtcaggacaaatgtccccaaccgtgccctgaagcaggcttggcacccagaagcaacagccacaatgagccctcagttccagagaagcctgccagcctgcccttgtcctgccttcagggtcgtgggtggcttgcttggagttgtctgcctgccctgaagtgagagtgagaggctggcctgggctcacggtcacagaggacataccccttgtacctgctggcctggcaaccagaaaggcagccgtatggcttacctgggcatcaagaaggctgcaaggcctaaacagccatggcccagcacgtggcttgtgagtcatgtgcaactcagttcatggaggttttgaaaagcagatccagcgccattggctgagtctcgctgttgttgagcatcactgtctttggttcccagtgtttctcagtttaaaacgtgtggctcttggctcctgtgtctgcccgcaggtggtgactcggctgattcatctcttgggtgagaagatcctgggcagcctccagcagggacctgtgacaggtgggtcacctctcccaacccagagcctcctgggagccctcacccagtcctggagccccgcccacccagcccatggccccgccctcccagcccatggccccgccctgtcctggagccctgcccacccagtccatggccc

SEQ ID NO: 43308 - DNA, 2300 bp, Homo sapien
agccttaatgcagctcagtccccccgtgctgtgtgtctatctgtgtgtctgcgtgtgtcgtgtgtctgcgtgtgtctctgtgtgtctccatgtgtctgcatgtgtccgtgtgtctgtctctgtgtctacatgtgtccatgtgtgtctccttgtgtctgtgtgtgtctgtgtgtctgtgtgtgtctcggtgtgcctgtgtgtctgcctgtgtccgtgtgtctccgtgtgtccgtgtgtctgcgagtgtctctgtctccgtgtgtctgtgtgtgtctgtgtgtctgcctgtgtgtccgtgcatggtgtgccttgcagccgtcaccccagccagcatcccagggctcctcctccacccccagggctctaagtgccacgctcacgcccttcacgccctcacccagccactgtcttgccatctccccagcttcccccacctcctgtgcaaagcagatcctgattccacgtttgctcttcctcctgcttttgccttctgaggaaatggcagctccacctgcctgtggctcaggctaggcctggagtcgcccggcgtcactctcacacctggtgcaggttgccccacgtcccacctcgccactgcccagagcccctgggcacgtccctgctgcagccctcaccctcgacagtctgtccacacacgaccaccggggagagaacagtgttccccgggtcagaggccccagccaccctccacccacccaggagagaccctgtgctatccaggccccatgggtctctcagcctctgcctttgcctgctggtgcccttcacggcactcactgccagccacacccacggcccgagtgtgcattatgcagctcctgacggcatgtgcagtcccctgccaggaccgcagcctgacacagggcccgtgtccaaggggcactcgcgggcctgccaggagggggctctctgggctccccaacagctgctggccactgggcacgtggtgggcagtgctgtgccgtggggcaggcagctgactggtgcgtgccccgtcccagcccctgccagtggtctctctactttccgggtggggtgggggttgtgggtcccatccattcccgagcactgcggccctgggcgaagggtagggttggagggatggggcaggattgactctgggctgcccggcagaatcatgcggaagcagccgaccgtcgtcctgggtgtggcgcacactgtggtgaagaggatgtcgtccttcgtgcggcaaatcgactttgccctggactgggtggaggtggaggccgggcgagcaatatacaggtgaggccgtgggtgccacacactccgcatccatgctgccctggcatgcaggagctggggatgggcaaagcacggttaccgtggaaaccacacacggaagttactgtggaaaccacacatggaaggctggatttccccagccccaccccagcttagctcggaaacacacttcgtggcctcctggatttcatgacacccacacacgcttggacatagtccatgttctatgagcatctctccgtgtcattatattcaagtccacaccgtccctttaaaagggccccattagctgggcgtggtggctcacgcgtgtcatcccagcactttgggaggccaaggtgggtggatcacaaggtcaggagtttgagaccagccttgccaacatgggtgaaaccctgtctctgttaaaaatacaaaaattagctgggcgtggtggtgtgcgcctataatcccagctacctgggaggctgaggcaggagaatcacatgaacctgggaggtggaggttgcagtgagccgaggtcgtgccactgcacttcagcctgggcgacagagcgagactccgtctcaaaaaataataataataattaaaaccaagacaattttagaatattcatttaaaacaacccaggcctgttaacataaatattttaaaataaaaaatatgttttccaaaacaaaaataagatagtgagaagcctgcattttctttttctccatcctgagtctgtctggcattgggaagctgggtgtggaggctgaggctgggggcccagggctgcagggcctctgtgtcttccgcaggcagggggacaagtccgactgcacgtacatcatgctcagcggccggctgcgctctgtgatccggaaggatgatgggaagaagcgcctggccggggagtacggccgaggagacctcgtcggcgtggtaggtgctgggccctgctcctgcctcccccacctctgcatccctcccagagcatcctgggttctggcctgggtgtggcctggcca

SEQ ID NO: 43309 - DNA, 2300 bp, Homo sapien
cttgggaaaaaaaaaaacacagaaaaaggttctaagcaaaaccatcaggcaaagtcctaaaggaactggaagtagcaactgtgaccttaggggaagaaaagacaaggcctcaggcaatgcccatgggccaccgctggctgccctcgctgtgaacaatgcccatgggccaccactggctgtctgctgtgacaggcgcgtctaacaagtgctggcagctgtgacaggcagcagagaggggccagatccaccactcccacagtcctcaggcgccaagaagccacggggccaaagagcgcggcagagcagacgccaagaggacccttctctgggtccagaaatgccccccaactgggaaatccaggcatctggtcccccgagttacatacctgtgggctgtcatctttctcttcctccatggccagaaacagaaaaaacagtcaggggcgaaaagcagacagcctgaagcaaacaagggcacacctctacccgctcatgctcacacctggacacttttccctgggttcctttcaagtcaaattatgtttcactgaaaggaaaatcctgctgaaaaagtctgttctccaggaagaaaagctgtcttttgagaagtgtctgtcatctgctaggagccacctccttccctctgtaaacagccctcacgtggctgtcccggaacccagaacagcagccagatggggcgtatccaagcaggtcaagaggagccaggcccagcgcggcggggatgggggcagcgctgccttctggagaagcacggctggaggggaggtgacgctggcggggcgtggatccggggtgtggggatgcagctggggaggagggtgcagctggggagggggtggatccggcgtgtaggggtaccgctggggagtgggtgcagctggggagggggtggatctggggtgtgggggtgccgctggggagtgggtgcagctggggagggggtggatccggcgtgtaggggtaccgctggggagtgggtgcagctggggagggggtggatctggggtgtgggggtactgctggggagagggtgcagctggggagcgcgtggatccggcgagtgggggtaccgctagggagggggtgcagctggggagggggtggatctggggtgtgggggtgccgctggggagggggtgcagctggggagggggtggatctggggcgtgggggtgccgctggggagggggtgcagctggggagggggtggatctggggcgtgggggtgccgctggggagggggtgcagctggggaggggatggatctggggtgtgggggtaccgctggggaagggcgtgcagctggagaggggatggatctgggctgtgggggtgccgctggggacggggtgcagctggggagggggtggatccggattgtgagggtgcggctggggggcgacttccgcgtggggtgagaggtcgcctgcgagggtgaccgggcaggagggctcagtgcgcaagccggacgtgctgggtccaagattattgattaatttgggcaccgcgagggctcgagtccccccacaccactgcccggcctgcgggggagcacagacagcccgggccctcccggctgcaggtcccgggctttccccgcgcggttgccggctccgcccagaggagccgcgcccggcggaggggtaagaaaggcagggtcgcggcgtcaacgcggcggccgtctcgagtccagggcccgcgtcctccccgacctcccgacgccacctcacggcctcagggggactgggctcccgggaaaccgccggccacctggcggacgaacacaggcagtggcgggcagtggagacgccagggaccaccgcgctgagagcgatcactcatccgccagccccgccccgcgagccccgccccgcgagccccgccccgcgagccccgccccgcgagccccgccccgcgagccccgccccgcgagccccgcaccgccggccccgcaccgccagccccgcgagccccgccccgccccgcgcgctcctcgcattggccgagtccccgcggccacaccccctaccagattggggccgctattggacgcggcggccgcggccaatcggagccgctcttgctgcgacgcagcggtcggaagcggagcaaggtcgaggccgggttggcgccggagccggggccgcttggagctcgtgtggggtctccggtccaggtgagtctgtcggattggggcgggcgccgcgcgcggccaggggcggggctggccgggttcccggggccgcgactacccgctctctcctcccgcagggcgcggc

SEQ ID NO: 43310 - DNA, 2300 bp, Homo sapien
agttcctggggtagagctggaagagctttccctcctgtgtgggctcgaagccgtacttttccaggttgtcagggtcgaaggtaccgtccttgaagtccttttcgatggcaggcgccacggcttcgctgaagagctgcgcggccgtcaggggcgtctcctcgctctcaggggcgaggtagctcacgtagggcttgagcttgaagccggtcagatccgggacgacgaactccgggaccatctccttgatctgcacgaacctccagcccgaggtgaggaagccgatgcccttggcgccccggcccttgcggcccctgaagctgcgcgggccccgcttgctcgtccacttgctcattcggtccgcaccccggaccaggcagcgcgccgctgcggccaggacgcccatgccgcgccctgcgggaggagagagcgggtagtcgcggccccgggaacccggccagccccgcccctggccgcgcgcggcgcccgccccaatccgacagactcacctggaccggagaccccacacgagctccaagcggccccggctccggcgccaacccggcctcgaccttgctccgcttccgaccgctgcgtcgcagcaagagcggctccgattggccgcggccgccgcgtccaatagcggccccaatctggtagggggtgtggccgcggggactcggccaatgcgaggagcgcgcggggcggggcggggctcgcggggctggcggtgcggggccggcggtgcggggctcgcggggcggggctcgcggggcggggctcgcggggcggggctcgcggggcggggctcgcggggcggggctcgcggggcggggctggcggatgagtgatcgctctcagcgcggtggtccctggcgtctccactgcccgccactgcctgtgttcgtccgccaggtggccggcggtttcccgggagcccagtccccctgaggccgtgaggtggcgtcgggaggtcggggaggacgcgggccctggactcgagacggccgccgcgttgacgccgcgaccctgcctttcttacccctccgccgggcgcggctcctctgggcggagccggcaaccgcgcggggaaagcccgggacctgcagccgggagggcccgggctgtctgtgctcccccgcaggccgggcagtggtgtggggggactcgagccctcgcggtgcccaaattaatcaataatcttggacccagcacgtccggcttgcgcactgagccctcctgcccggtcaccctcgcaggcgacctctcaccccacgcggaagtcgccccccagccgcaccctcacaatccggatccaccccctccccagctgcaccccgtccccagcggcacccccacagcccagatccatcccctctccagctgcacgcccttccccagcggtacccccacaccccagatccatcccctccccagctgcaccccctccccagcggcacccccacgccccagatccaccccctccccagctgcaccccctccccagcggcacccccacgccccagatccaccccctccccagctgcaccccctccccagcggcacccccacaccccagatccaccccctccccagctgcaccccctccctagcggtacccccactcgccggatccacgcgctccccagctgcaccctctccccagcagtacccccacaccccagatccaccccctccccagctgcacccactccccagcggtacccctacacgccggatccaccccctccccagctgcacccactccccagcggcacccccacaccccagatccaccccctccccagctgcacccactccccagcggtacccctacacgccggatccaccccctccccagctgcaccctcctccccagctgcatccccacaccccggatccacgccccgccagcgtcacctcccctccagccgtgcttctccagaaggcagcgctgcccccatccccgccgcgctgggcctggctcctcttgacctgcttggatacgccccatctggctgctgttctgggttccgggacagccacgtgagggctgtttacagagggaaggaggtggctcctagcagatgacagacacttctcaaaagacagcttttcttcctggagaacagactttttcagcaggattttcctttcagtgaaacataatttgacttgaaaggaacccagggaaaagtgtccaggtgtgagcatgagcgggtagaggtgtgcccttgtttgcttcaggctgtctgcttttcgcccctgactgttttttctgtttctggccatggaggaagaga

SEQ ID NO: 43311 - DNA, 2300 bp, Homo sapien
ggggagcttcctcacagacagtcacccaggggagcttcctcacagacagagtcaccccggggagcttcctcacagacagagtcacccaggggagcttcctcacagacagagtcacccaggggagcttcctcacagacagagtcacccaggggagcttcctcacagacagagtcacccaggggagcttcctcacagacagtcacccaggggagcttcctcacagacagtcaccccggggagcttcctcacagacagagtcaccccggggagcttcctcacagacagagtcaccccggggagcttcctcacagacagagtcacccaggggagcttcctcacagacagagtcacccaggggagcttcctcacagacagagtcatccaggggagcttcctcacagacagagtcacccaggggagcttcctcacagacagagtcacccaggggagcttcctcacagacagagtcacccaggggagcttcctcacagacagagtcatccaggggagcttcctcacagacagagtcaccccggggagcttcctcacagacagagtcaccccggggagcttcctcacagacagagtcaccccggggagcttcctcacagacagagtcaccccggggagcttcctcacagacagagtcacccaggggagcttcctcacagacagagtcacccaggggagcttcctcacagacagtcacccaggggagcttcctcacagacagagtcacccaggggagcttcctcacagacagagtcacccaggggagcttcctcacagacagtcacccaggggagcttcctcacagacagagtcacccaggggagcttcctcacagacagtcaccccggggagcttcctcacagacagagtcacccaggggagcttcctcacagacagagtcacccaggggagcttcctcacagacagtcacccaggggagcttcctcacagacagagtcacccaggggagcttcctcacagacagagtcacccaggggagcttcctcacagacagtcacccaggggagcttcctcacagacagagtcacccaggggagcttcctcacagacagtcacccaggggagcttcctcacagacagagtcacccaggggagcttcctcacagacagtcaccccggggagcttcctcacagacagagtcacccaggggagcttcctcacagacagagtcacccaggggagcttcctcacagacagtcacccaggggagcttcctcacagacagtcaccccggggagcttcctcacagacagagtcaccccggggagcttcctcacagacagagtcaccccggggagcttcctcacagacagagtcacccaggggagcttcctcacagacagagtcacccaggggagcttcctcacagacagagtcatccaggggagcttcctcacagacagagtcacccaggggagcttcctcacagacagagtcacccaggggagcttcctcacagacagagtcacccaggggagcttcctcacagacagagtcacccaggggagcttcctcacagacagagtcacccaggggagcttcctcacagacagagtcaccccggggagcttcctcacagacagtcacccaggggagcttcctcacagacagtcacccaggggagcttcctcacagacagagtcatccaggggagcttcctcacagacagagtcacccaggggagcttcctcacagacagagtcacccaggggagcttcctcacagacagtcaccccggggagcttcctcacagacagtcacccaggggagcttcctcacagacagagtcaccccggggagcttcctcacagacagtcaccccggggagcttcctcacagacatcaacggcctaactgagaacactcatttcctgtcattagtggtgttgatgcttctctttctccacacagggggcgacgatggccttctgaggggctgggacaccagggtacccggcaaatttctcttcaccagcaaaaggtaactgcccaagggccagcactcggtgcccacaccagcccccgcgttccctgggtcaccagccctcccgttccctgggtgggtctgtgtgctggacactggttcagaagccgcctctgcttgcagacacaccatgggtgtgtgcagcatccagagcagccctcatcgggagcacatcctggccacgggaaggtgagtccccaggaggctctcgggcccttctcgtctctttcgctgtccccggggggctcctgggcccttcttccctctttcgctgcctttcct

SEQ ID NO: 43312 - DNA, 2300 bp, Homo sapien
gagtgccctcaggcagcctgctttcagatagagtctgaggatgagcacggagtgcaggggtcccctttacctgcatccaggggtgtggccatgttgcccctgaccagcagggctgctttgtttggcagtcattcatcagaaaagtgcactgaaagaagcgcccagggcctcccacctgtgagacaccacgctggggaagggggcggtgcaggttctaggtttgcatgtggcagctcctccaggcctcaccccagcaggtggcaccgtgagggtgggacgggccccaccactgcttccctctcacctgatacccaatcctctggtcatctttcccgttccgtggccccgacttcttggtcttcgtagccaggtatctaagacgtcctgtgaggacatccagatggctgcaatgtggggctgcttctaaagcttgtttggagtgtggtgtgttgggatgcgcacctggtcactctccctcccccgcagaggtgtgtggttgaggcccttttggaatgccctgctgccttcctggccagccttttctgcgcctctgtctctgtggtggtctgagctgttggctctctgccatgtctttagccacagccctgcttgaagccctgaggctgaatacccaggcacccgtatatttcagtcaagtccgccttagcttcctggagctgccgcaacaaagcagcgcgagctgtgcagcctgaagcagcgggaattcacagtctaggctctggaggccggagtctcagatgaaggcgcaggcaagggccctcaggtgcggacgcctcctccctgccaggtgccttgcctgcctccctgtgctctgcacagcaatggccctgcaagtcttctgcatcagctttctcttctgcggactcctgctcctctgggtcagggcccacgcctgctgcttctgagagcccctgtttgttaaggatgctctctgaggtgctggggtcttcagtccattgttttttggggggcacagttcaacctgtaacggcccaaggggttcttcctgcccgctgcacacattcagaccgtggattgcaataaagaaaaaaagtttagggccgggcgcagtggctcacacctgtaaccccagcactttgggaggccgaggcgggtggatcacgaggtcagaagatcgagaccatcctggctaacacggtgaaaccccgtctctactaaaaatacaaaaaattagctgggcgtggtgatgcgcgcctgtagtcccagctactggggaggctgaggcaggagaatggcttaaacccgggaggcggagcttgcagtgaactgagatcgcgccactgcactccagcctgggtgacagagcaagactccgtctcaaaaaaaaaaaacaaaaaaattaatagacacgggccggccaggccacatgtgagatggagttcgtcctcagatcatcttgtccaaagctcctaggttaggggttttttcaaaggcagttttgggggaggggggcggcggccaggcgactggtgctgataatcataggggtcggagccgtccacctgctgagccgcttctggggggtcctgatgcagccacgggtgtcagacaagcaaagaccctggaaggcggtctctgaggggcagctccgccatggcgggttcacaggaggcaggcagagcgcgcctgcggcctcggggtgctgggcttagtggggcgcgggctcctcatcagctttacgaaggcgttgattccggggcaaggcctgtcatggaaactgcagcctaaatgttaagtcagcgcggcccgatggccaggagtaaccgggagggcgccacggggtgcgctaccgcagctcgctgttggggtttttctcagtgatagaaattttgcagaggcggcttcaaacctacggctctgtcactaacttgccgtctccaaacctgctttgtggaggagcggatttcccgaagccttcggtctctacggccccgcagggagcagcgcgtctgacgcctgaagcccgccgcggtcagccggccgacagggggcgtgggagcctggcttcccaggggcgtccacggaggccaaggccctgccggatgtcccgccccggcaccccggaaggagtcgcgagagaggcggcccgcgctgacggtgtccctggggctctgcgctcgtccggccggccccggcctcgccgccccgcgcagtacccagcccggccccgccgacccgcctctactgccggctccgcgcccttccccgagggctggatgatgggctgtttcgccctgcaaacggtggacaccgagctg

SEQ ID NO: 43313 - DNA, 2300 bp, Homo sapien
gacggagtttcactctgttgcccagactggagtgtggtggcacaatcttggctcactgcaacctctgcctcctgggttcacgcgatgttcctgcctcagcctcccaagtagctgggaatacaagtgtgtgccaccacatccgctaatttttgtatttttagtagaaacgggatttcaccctgttggccaagctggtcttgaactcctgacctcaggtgatccacttgcctcggcctcccaaagtgctgggattacaggtatgagccaccaggcccggacaaaatttggactcgaatccatttcaagtcaacctctgggggaacctggactatgacaccagtgcttttcaactaccctagggagcacccaccaagctccacttcttttcacaaagcagttgctcataatctcatcacacccttgcaactccatgaggttgagattggtagggcaggtacttttttttttttttttgagacggagtctcgctctgtcgcccaacctggagtgcagtggcacgatctcggctcactgcaagctctgcctcccgggttcaagccattctcttgcctcagcctcccaagtagctgggactacaggcacccgccaccacgcccggcttttttttttgtatttttagtagaggtggggtttcaccgtgttagccaggatggtctccagctcctgacctcgtgatctgcccgcctcggcctcccaaagtgctaggattacaggcatgagccaccgcgcgcggtcggacaggcatgttttgagcaaggcccagcctgaaccccaatgtgtgtctcaggcaggccaggactcatcagccccttcagtcctctagggtgtctggggtactggcaagtaccaggggacccagagatggaacgtctgggctcactcatgtacaccctttgcaggctggggcacggtggctcatgcctgtaatcccagcactttgggaggccgaggtgggccgatcacctcaggttgggagttcgagaccatcctggccaatatggaaaaacctcacttctactaaaaatacaaaaattagccggacatggtggcgcgtgcctgtagtcccagctactcgggaggctgaggcaggagagtcgcttgaacccgagaggcagaggctgcagtgagccgagatcgtgccactgcactctagcctgggtgacagagcaaaactctgactcaaaaaaaaaaaaaaaaaaagcaagaaaagaaaacggaacccagcaagccagaaaggagcctgtgcagctcctcaggtgcaggagtcgcccttgaggcagggtgaggcctcctcacgggcgactggacaccggcggagcaggacgcaggacctagccccgttcgctccaggctgcaggggagccacgctgcccaccacggcgtacccagtccctccctgagcgggtctcggctttcccgcggagcctaatgggcctcactggagttccgtttccagacgccttggaccaggctgctctggaggtcagccgcccccgaggctgaagagccggcggctcggagaaggctgcgcgggaggccgcgccctccgggtcgcgtgggccgggcgtccgctgtctctccagaaacacccgcgtcccgcggcaacggcctcttcctagcccgcctcgcccgctccccgcccgcccagagggccccgcacgagctccgtccacctcctccttccgcgctcggggccaggacggcggcgggaaacagcttacggaggctaccgcaagggaggcgaaaagcagccagctcgcagagctccacggacccggcgcgagtccccagccacactccgcactgcccctctaggcgcggcgccgctgcccgcacaaagcttcccgcgaaactgacgtcggcgcgcgcaggcaccgcccccggcctcgcccctcccccgcgctcgccccgctccccagagcgccggcgcactcgccctcctcctattggttgttgcggggcggcgcgcgccggtcggcgccgtgcgcgcctagccattggccgagcggcggcgggccggggggtgtgtccggggctgcgccccgcccctccgctccgctcgctgtggtgcgcgcggtggcggtggcggcggcggcggcggcgcgtggcaggtccggcgggcgcgaggcggcggcggaggcccgagcccggcccagcctcgtcccgcccggagcccgcctggctgctaccccgaccccggctccggtcccgtcctgtcccggcgcgccgcggcctcgccccggcccccgctcggcgcctcccgagggagcggcgctgcc

SEQ ID NO: 43314 - DNA, 2300 bp, Homo sapien
aaggccacctgtgttctgtgtccattgtcttccatctcagtagcttgcaatacagtctgtctgtcccttgcttgaaacactttcttttttttctttttctgttttttttttttgaaatggagtctcactctgttgcccaggctggagtgcagtggcgtgatcttggctcactgcaagctccgcctcctggattcacgccattctcctgcctcagcctcccaagtagctgggaccacggcgcctgtcaccacgcccggctaatttttttttttctttttgtatttttagtagagacggggtttcaccatgttagccaggatggactcgatctcctgacctcgtgatccgtccacctcggcctcccaaagtgctgggattagaggtgcgagccaccgcgcccggtgaaacaccttctttctgacttctggcatggccgactgccattcgggagggctgtccacaatccttgccatcccatggcacccttctctcttgttcgggaattctgcctgtgcatagccttggcaggaaagtgtctggagcatggccagttagacccacctccggaaacatcggaatcctaagggagtgagctgggcctggggcttcagggcctctcccagcctggcccgggggcccctccagcctgtgagcccctttctctttgctggggtgccagactcctcctccctgacctgttaccttctaccaactagggatggcaacattttagtgcttgactcccaggctcatgcacggaagtacttggtccattggggatcagtggcacctcagactctgcatgtgatgaccctcccacccccaaaccatgtgtatctaggtccgtcctccccatcagagaaggccaccctcttcaccggctgtcctagaaaaactcgcagcactggggcccgcacacccactccgtggtgagctggtccttgtcgagcgacgccttccctctccaggactacccaaccggtctctcccgccttaggtcccctgggtatttgagtcccaccccccgcggctcactctctacaaagggaccctttaaaaaagataaatgggagtgtgttcctcctggtttcaagtgatccaagtcctcgccccacctggcccccgacccttctgctgcggacccctgcccaagggcctccgcccaagtgtggctcccttgggcccacaccccatcaggccagcaaggagggggatagcggggggcggggcaggtgctgggactccgggcaggtgcggggaaggcagggggcggggggggaaggggttgggcgatgcaggtgttgggggccgggacagttgcgggggtaggcaggtaccgggaaggcgggagggcgggcaggttccggaggggcgcgacaggtgctgggacgcgaggtaggtgcggagaaggttgggggtgcggggcaggagccgggggtgggggttgaggcggggcaggtcctacgcggcggagcatccccgcccaggacgcccgcgcggccccgtgacgtttttccgcgactcggggtgagggagacccctgggcgggacgggcggagggtgggggcggaggagtgggttctgcccgcagcagagtgcagcggggagaccttcccagtctcagagctcgcctcggccccgcccccagccctgccccccgacggagacgcggcggtgactccctccgtgggggacgcacgggacgcttgcgcctcaagtcccttaagcggcgcccgacgcagcgcagcacctacccagccgggacagggccagggccggggatggatgagcgcggccggggggcggggcaggggtggggcggccgaggcaggggcggagctgggaaggcgaggcaggggcgaagggcgggggcggggcgaggaggctgtcagaggggcggggaataacgagggggcggggccacacggacggatggggcggggaataggggctgggccgggcctccgagcggcagtccgcgggctacggggcggccggggggctgggcggggccgtggggcggggcagggcctgggaggggccggatgggggtggaggccgggattgggacggatgggggcggggcataggagggggcggggccgggcctcggagccgggactcgcgggcggcgggcgggggcgtcgctgcgcggctggccggtgaggccgcggcatggggcgagtgcagctcttcgagatcagcctgagccacggccgcgtcgtctacagccccggggagccgttggctgggaccgtgcgcgtgcgcctgggggcaccgctgccgttccgaggtgggcg

SEQ ID NO: 43315 - DNA, 2300 bp, Homo sapien
ccgcgactcggggtgagggagacccctgggcgggacgggcggagggtgggggcggaggagtgggttctgcccgcagcagagtgcagcggggagaccttcccagtctcagagctcgcctcggccccgcccccagccctgccccccgacggagacgcggcggtgactccctccgtgggggacgcacgggacgcttgcgcctcaagtcccttaagcggcgcccgacgcagcgcagcacctacccagccgggacagggccagggccggggatggatgagcgcggccggggggcggggcaggggtggggcggccgaggcaggggcggagctgggaaggcgaggcaggggcgaagggcgggggcggggcgaggaggctgtcagaggggcggggaataacgagggggcggggccacacggacggatggggcggggaataggggctgggccgggcctccgagcggcagtccgcgggctacggggcggccggggggctgggcggggccgtggggcggggcagggcctgggaggggccggatgggggtggaggccgggattgggacggatgggggcggggcataggagggggcggggccgggcctcggagccgggactcgcgggcggcgggcgggggcgtcgctgcgcggctggccggtgaggccgcggcatggggcgagtgcagctcttcgagatcagcctgagccacggccgcgtcgtctacagccccggggagccgttggctgggaccgtgcgcgtgcgcctgggggcaccgctgccgttccgaggtgggcgcgggtcctcggggagggcctttggccgcacctgcgcggggccagggctcccggaagcggctgccgtcgcctggccccgggttgggcccgcggagtcgctgtcttcgccgcccgggactgctgggaagcgggctcggcggcgccggggaggtccgggcggcgccgcccttccgcgtctgcccttcctgccctctcgccgaggggcggcggggtcccggcggggcctgaagcgggtccactgtggaggacgccctgagcgcgggcgcacgcaggcctgcgaccctccccgtccgcgctcgcacctgctgggctccttcccgcaccctggctcccggcgcaggcgctcccgctgcagagccgctcctggcgcgggcgtgcggtcccggcggggtgcagacacctgctgcggctccctgcgccccctgccacccgccagcaggcctcgccggccccccgccgaggtggacgcctgggcctcggggactgggtatcgggttgctgcagtggccgctggcagggcgccctggaggtgagggccggcccgcgaggtgaggctgcctctgcccggcccttggctgtgagtgccgcgtccctgccggggacttctctaccttggcctcctgtgggaaccacctgggctgcttggcctgtgccacagcccctggacttgccgctggaccttgaccgctgggcccgcgcgtgggtaacagcaccgattttgtgcctgctgagaacccacagtctctgttctgtcctctcagcctcctgggacaggtgatggtgctgtggccctgaccctgcaccgcctgaggctgtggggcctcggaagaagccgggtggtaggtgcttctgtcaggctcctggccccactgggcctcctgggatgaccccacagcctcccttcctctgtcccaaccttgagtttggggtctgggtgggggcaggtgtggccgtggcagggcagagatagcacacacatctcttgggtacaggtgtggtgtgtggtgaggccggctggatcctggttgagggctgtgcaggaccctgtcgtccttcccctggcgtggcctggggtgagcaggccattgcttaccacagggaagggacggccccgcggtgcgtgactggcctgggtgtgcaggctcccctggcctccgggtggacgtggtgggtgggttgaatgctcacgcctgtaatcccagcactttgggcagctggcccaagagccgagggagcactggctgatggtcctacctcacagaggctggtctgaatgagggagaaaaaggagggtcgtgagctaaggagtaggagatgggccctgatgggccagagagcacatgattcaggctgctgcaagtgaggtgggagggtgtaccggggcccccgggggtttcccccagccctgcctgggatgggaacagaaggaccatggtttcttttcctcattcagaggatgcttgtcaatcctgctaggagccagtagggaggccctcagcccccaggaggacagcag

SEQ ID NO: 43316 - DNA, 2300 bp, Homo sapien
ggcctgtgccacagcccctggacttgccgctggaccttgaccgctgggcccgcgcgtgggtaacagcaccgattttgtgcctgctgagaacccacagtctctgttctgtcctctcagcctcctgggacaggtgatggtgctgtggccctgaccctgcaccgcctgaggctgtggggcctcggaagaagccgggtggtaggtgcttctgtcaggctcctggccccactgggcctcctgggatgaccccacagcctcccttcctctgtcccaaccttgagtttggggtctgggtgggggcaggtgtggccgtggcagggcagagatagcacacacatctcttgggtacaggtgtggtgtgtggtgaggccggctggatcctggttgagggctgtgcaggaccctgtcgtccttcccctggcgtggcctggggtgagcaggccattgcttaccacagggaagggacggccccgcggtgcgtgactggcctgggtgtgcaggctcccctggcctccgggtggacgtggtgggtgggttgaatgctcacgcctgtaatcccagcactttgggcagctggcccaagagccgagggagcactggctgatggtcctacctcacagaggctggtctgaatgagggagaaaaaggagggtcgtgagctaaggagtaggagatgggccctgatgggccagagagcacatgattcaggctgctgcaagtgaggtgggagggtgtaccggggcccccgggggtttcccccagccctgcctgggatgggaacagaaggaccatggtttcttttcctcattcagaggatgcttgtcaatcctgctaggagccagtagggaggccctcagcccccaggaggacagcagccctgcctgggccccagagcttgctcacttactctgccgatgagtgtcggtgacagtcagcacccagccgtgaggacaccggctgtctaaagggctgacgcggagggaggcctgggagggagcagttttctggagctcaggctggcccagtccagggctggggttcaggcaggaccacttcttgttctgctgttactgggatgggcgaccagggccgacagtggttctcggagcactcatggtgggcccgatgcaattctctccacgtgccacgggccagcctcagttaaccctcagcgccctggcaagtggcacggttgttactctcatgatacagatttggaaacaggactgggggagtggcttacaggtcacagcttctgtggcaggcgtgagtcctttgggatgaggatgaggagtgggtgggtcttcatggtccaagtgcaggtggtgcaagggaggggctgctgaacaggtgggagccccagctggagaagaaagttccagtggtcacttgagaacgcagcccagtcatgatcttccttagagtcagagaggcctgcagcctccagcagcttgtccttgcttgtgcatctgaacacaggaaacattttttatttttatttttttaatttattttttcgagacggagtctccctctgtcgcccaggctggagtgtgccggcgcgatctcggctcactgcaagctccgcctccccggttcacgccattctcctgcctcagcctccttaagagctgggactacaggcgcccgccaccacacccggctaatttgtgtatttttagtagagacggggtttcaccgtgttagccaggagggtctggatctcctgacctcgtgatccgcccgcctcggcctcccaaagtgctgggattacaggcgtgagccaccgtgcctggccaggaaacattttttaaacctgcatgggggaggagggacagggcttgcagggcccctgcaaagaggtgcaacgttcaagtccagaaggcggaagaagtcacactctgactaggggactgccactgagccactcagtcctgcagccaagccctgcctggtggctttcctgttgcgaaaggctcggttcccttcagcgtgttctgccatcacaagcagtctgcaagctggaaagaagagggagcggggtcgtatgccgccagcagcagggagacccctcacaatggaccccatgtattgctctggcttctccgtgggcagaactgcatcctgtggtcctgcctgattcgatgatttgaaaaggcagaaacatggccgctgccattggcctggccagtgaaaacgggctccctgggaaattcacccagcctgacctgaagcagttgctgagaggcagaggagcagctccaggtgttttggcagggaagcagctggcagctgtgcgggag

SEQ ID NO: 43317 - DNA, 2300 bp, Homo sapien
acagcttctgtggcaggcgtgagtcctttgggatgaggatgaggagtgggtgggtcttcatggtccaagtgcaggtggtgcaagggaggggctgctgaacaggtgggagccccagctggagaagaaagttccagtggtcacttgagaacgcagcccagtcatgatcttccttagagtcagagaggcctgcagcctccagcagcttgtccttgcttgtgcatctgaacacaggaaacattttttatttttatttttttaatttattttttcgagacggagtctccctctgtcgcccaggctggagtgtgccggcgcgatctcggctcactgcaagctccgcctccccggttcacgccattctcctgcctcagcctccttaagagctgggactacaggcgcccgccaccacacccggctaatttgtgtatttttagtagagacggggtttcaccgtgttagccaggagggtctggatctcctgacctcgtgatccgcccgcctcggcctcccaaagtgctgggattacaggcgtgagccaccgtgcctggccaggaaacattttttaaacctgcatgggggaggagggacagggcttgcagggcccctgcaaagaggtgcaacgttcaagtccagaaggcggaagaagtcacactctgactaggggactgccactgagccactcagtcctgcagccaagccctgcctggtggctttcctgttgcgaaaggctcggttcccttcagcgtgttctgccatcacaagcagtctgcaagctggaaagaagagggagcggggtcgtatgccgccagcagcagggagacccctcacaatggaccccatgtattgctctggcttctccgtgggcagaactgcatcctgtggtcctgcctgattcgatgatttgaaaaggcagaaacatggccgctgccattggcctggccagtgaaaacgggctccctgggaaattcacccagcctgacctgaagcagttgctgagaggcagaggagcagctccaggtgttttggcagggaagcagctggcagctgtgcgggagccccttgcctcccgtgttcttactgaggagtgtgtggggcagctcgggacaggtttcactttggacagtggttggaggctgcttactctggcagagtcatctcaaagagccttggtgtatgtgcaaaacggggccatctgcatgggcgttgggaagatcacagaacctggacccttaggatgacccaagggtcagttgcatactgtttgtttttgtggagtcaatgtcccatgacggttttcgcgatgctttgctagtaggagcagtggcgtgtgaggctcccggttaaataccatgagattctaagcggaattctgggtctcctggtatgcacaggtaaaattacagtagacctgtcccactctttgccagaacctcgtacttgtctgcagtttgactggaataaggggtgtttgtgttccacctccctccaacgtgtgttgagacatttatttatttatttatttatttacgttgctcttgttacccaggctggagtgcagtggtgcaatctcagctgctcaccgcaacctctgcctccctggttcaagtgattcttctgcctcagactcccgagtagctgggactacaggcacgcgccaccaggcctggctaattttgtatttttagtagagacggggtttctccgtgttggtcaggcgggcctggaactccgaacctcaggtgatccgcccgcctcagcctcttaaagtgctgggattacaggcgtgagccactgtgcctggccccaagacattgattttatttgagatgaggtctcactttgtcacccagactggagtgcagtggtacaatcttggctcactgcaactccttcctccggggctcccaccacagcctcctgagtgactgggaccaggggcacgcgccaccacacccagctaatctttggtagttttggtagagatggggtttcaccgtgttacctaggctgctgtcacacttctggcctcaagcaatccgctcgccttggccccccaaagtgttgggattacaggcgtgagccactgcgcccagctgtgtcgagacatttaatatttgtcaatctgatggattgaaatggtaggtcatttgggctttccctgcaagctccaccttccgggttcacgccattctcctgcctcagcctcctgagtagctgggactacaggcgcccgccaccacacccggctaattttttgtatttttagtagagacgggggtttcaccgtgtcagccaggatg

SEQ ID NO: 43318 - DNA, 2300 bp, Homo sapien
gagaggcagaggagcagctccaggtgttttggcagggaagcagctggcagctgtgcgggagccccttgcctcccgtgttcttactgaggagtgtgtggggcagctcgggacaggtttcactttggacagtggttggaggctgcttactctggcagagtcatctcaaagagccttggtgtatgtgcaaaacggggccatctgcatgggcgttgggaagatcacagaacctggacccttaggatgacccaagggtcagttgcatactgtttgtttttgtggagtcaatgtcccatgacggttttcgcgatgctttgctagtaggagcagtggcgtgtgaggctcccggttaaataccatgagattctaagcggaattctgggtctcctggtatgcacaggtaaaattacagtagacctgtcccactctttgccagaacctcgtacttgtctgcagtttgactggaataaggggtgtttgtgttccacctccctccaacgtgtgttgagacatttatttatttatttatttatttacgttgctcttgttacccaggctggagtgcagtggtgcaatctcagctgctcaccgcaacctctgcctccctggttcaagtgattcttctgcctcagactcccgagtagctgggactacaggcacgcgccaccaggcctggctaattttgtatttttagtagagacggggtttctccgtgttggtcaggcgggcctggaactccgaacctcaggtgatccgcccgcctcagcctcttaaagtgctgggattacaggcgtgagccactgtgcctggccccaagacattgattttatttgagatgaggtctcactttgtcacccagactggagtgcagtggtacaatcttggctcactgcaactccttcctccggggctcccaccacagcctcctgagtgactgggaccaggggcacgcgccaccacacccagctaatctttggtagttttggtagagatggggtttcaccgtgttacctaggctgctgtcacacttctggcctcaagcaatccgctcgccttggccccccaaagtgttgggattacaggcgtgagccactgcgcccagctgtgtcgagacatttaatatttgtcaatctgatggattgaaatggtaggtcatttgggctttccctgcaagctccaccttccgggttcacgccattctcctgcctcagcctcctgagtagctgggactacaggcgcccgccaccacacccggctaattttttgtatttttagtagagacgggggtttcaccgtgtcagccaggatgatctcgatctcctgacctcgtgatctgcccgcctcggcctcccacagtgctgggattacaggctgagccactgcgcccggccgggttttctgtaatttctagtgaggttggacatctgttccagttacctactgctacgtaaaagtcgcggtcacctcaagtcagacaccattcttaaaacagttaacacaaccattttattatatctcacagcgttgtgggttaggaatctggacagtgagggcagggttaatcttcagttctgtgccaccagctgggatcacttgagggtgcttggctggcatacgggttagtctggggaccactgccccctttccggcatcctctgtgggttccagcatttttcttttttttttctttttgagatgaagtctcgctctgtcacccaggctaaagtgcatttgtgcgatctcagctcactgcaacctctgcctcctgggtttaagtgatcctcatgcctcagcctcccaagtagctgggattacaggcgtgtgccaccatgcctggctaatttttgtattttttttttgagatggagtttcactcttgttgctcaggctggagtgcagtggcgcgatctcggctcactgcaacctccgcctcccaggttcaagcgattctcctgcctcagcctccctggtagctgggattacaggcatgtgccaccatgcccagctaatttcgtatttctagtagagatggggtttctccatgtcggtcaggctggtctggaactcctgacctcaggtgatctgcctgccttggcctcccgaagtgctgggattacaggcatgagccaccgtgcccggccttttttgtatttttagtagagatggggtttcaccatgtcagccaggctggtcttgaactcctgacctcaagtgatccacccgccttggcctcccacagtgctgggattacaggtgtgagccactgcacccagctgggtcccagcatttgcgggattcaaggt

SEQ ID NO: 43319 - DNA, 2300 bp, Homo sapien
gttagtctggggaccactgccccctttccggcatcctctgtgggttccagcatttttcttttttttttctttttgagatgaagtctcgctctgtcacccaggctaaagtgcatttgtgcgatctcagctcactgcaacctctgcctcctgggtttaagtgatcctcatgcctcagcctcccaagtagctgggattacaggcgtgtgccaccatgcctggctaatttttgtattttttttttgagatggagtttcactcttgttgctcaggctggagtgcagtggcgcgatctcggctcactgcaacctccgcctcccaggttcaagcgattctcctgcctcagcctccctggtagctgggattacaggcatgtgccaccatgcccagctaatttcgtatttctagtagagatggggtttctccatgtcggtcaggctggtctggaactcctgacctcaggtgatctgcctgccttggcctcccgaagtgctgggattacaggcatgagccaccgtgcccggccttttttgtatttttagtagagatggggtttcaccatgtcagccaggctggtcttgaactcctgacctcaagtgatccacccgccttggcctcccacagtgctgggattacaggtgtgagccactgcacccagctgggtcccagcatttgcgggattcaaggtggggatgtgcagtctgtcaggagtgttaaaagcacggcagcatttccagtccccaggcctcctctccttgcttcagccacgcccaccctcctctgtgcctgctcatgcccatgtgcttctgttgggctgtctgctggtccacaggaggattactggtgttccggattttcagcatgaacacagtatggggtctggcccgaggagggcctggctaacagagcatggattcaaaatcagagcagagctgggtaccgtggctcatgcctgtaatcccaacactttgggaggctgaggcaggtggattgcttgagcttaggagtttgagaccagcctggacagcatggcaaaaccctgtctctataagaaaaacaaaaaacaaaaaacaaaacccaggtgtggtggcacgtgcctgtagtcctagctacttgcggggctgagatgggtggatcgcttgaacacaggaggttaaggctgcagtgagccgagatcgtgccactgcacactagcctgggcggcgggagtgagaccgtgtctcaaaaacaacaacaacaacaacaacaacaaaaaaacaaaaaatggaccgaggttggggtggcaaggctgggctggaatggaggctgaggacaggccctggcagcgcccgggggtagagggcgtgcagcaggaagcaagggccaccctcagggatgggggactgggcctggcagctgccgaggggtaggcaggatgcatgtggagagccacgtggggctgcggctgagccaaggattgtgagaggaatcctgctgctctgggtggcaggcagaaggcctgggccacaggtggggcctgctggggagaccacaggtgaggcaggtatggctgaccctgggcgctcggcacaccggtactcctcctgcctggctgctccctcagcaggtgtcagagtctgagtcaccttttcctcacgtgacccccaccaggaccaggcagggaggtggccatctttggccctgactcagccctgcagggagaagaggggctggaggtgcaggtggcctgccactgtctcccccaacccctgcccacctgggtcttgtgctgtgtgtacttctgctgcgtctgtcctcccttgtgaccagcttctgctggacctgattgtccagccatgatcttctgatcatcatggtttctggacacacatctgttggactaaggaatttgtgttcctggccacagaacagtgccacctctgcctcaagcagttcctggtctgggcactcccccagggaggccggagaggactgagccgtctcctgatgcagaaagtcagccccgctgggcagtgctcgcccaggaagtagggccccacccaacggtgtgctgactgtggaacactgtgtctgcctaggcgggtctggccacattcctgcagcatgatggttggcagttagcttcctggagtgtggacgggtccttccctgcctgactgacttgtccacagggcagcaagaagatgcgccccttggtgtgtcccgagtgtctcctgtaggcagctgagctttcgcaggtctggctgggagccaaggttaccaatctggggggtaacccagccatcatctggatgagcgttggg

SEQ ID NO: 43320 - DNA, 2300 bp, Homo sapien
gcctgcctctcaggactgacctgaagtctgcagtgttagcatgtcacgtgctgagagcagcatcttgacataagtgctgaggggcacacaagggtagcagctgatggaaaaatggagtgaaaaagctgcctgcagctgcttcccacaccttcacttagggtggatgtttgcttggtgaaggatttttcttcacattctaactccctttattcagtcaacaatttttttgttgttgttgttgagacagagtcttgctctgttgcccaggctggagtgcagtggcacaatctcagctcattgcaagctctgcctcccgggttcatgccattctcctgcctcagcctcccgagtagctgggactacaggcgcccagcaccactcccggctattttttgtatttttagtagagatggggtttcaccatgttagccaggctggtctccatctcctgacctcatgatctgcccacctcggcctcccaaagtgctgggattacaggcgtgagccaccgcacccggcccagtcaacaaatattttgtctcctgtacaccaggtattgttctaggcaccatggacttacattctagtagggagacaatattccaaatcaggatgtgggagagtcacatgacacacactgtgatggagccaagtaagtcaacgaagacaggtatgggggggcagtatcattttaactagggaggagagggaaggcttcccttaagaggtgatatttcaactcaaggatggtaaagagggaagccacaaagacactcgaaataaaggtttcagggaagggacagacagcaggggtggcggagaggtgggtgcggggcaggagggccatgaaggcgctcgtgtctcctgcgagggctcagggtgctcggcctgtcataaatggacttaggctttgacagagcagtttagctgccctaaagaaacctgggaaggttcccttggcacttgggattgtccgtttccttttctgtctatgtgcgctgtctatgctggacttgagataattctccggagtccgactcaccaggagactcgggtgtcacccagattgaccttcaaggctcatttcttgtcagtccagtacccgtcccctcggttcacacgaccatccagaaacctcaaattcagtccatgcttcttgttttgggtctcggggctgggataaggcgggctgaccaccgcggggcatgtaggtagtttccgtggtgctgggggcgctctccagggaaggctacttggtctgcagaaaaggccttgacttgtgcatacctgggcagcgggcctatgagtggcagcgagagcggggtaaccagagagggcacaccccccaaccggagcgccccccaggttggcatctccacaactgtagaacctcccccatcagggcaaccctcccgattgggacaccgcccccagccagacacatcctcctagcagaacacccatgcttagccggagccgctcccccgccagacacctccccaccgggaaaccctccccagtgggacaccccagccagtccaggtattcccgccgttagggacaccccctccagccggagcataccctcggcaggggcattcctcccaaccgagggaaccccgccgcaacgggaacctgcctgaaccagagcaccctcccgcgccggggacaccccacaggcggctcccgcgccaggccgcggcccagggagtcagccttccgcgcaagccggcgaaatcaaagtgcgtccggggttagaggtcagaggtcggagccgcgggtctttctccttcttcggccagcccaccaaaacgtcaatttagaatgagacatgtgttgaaaatgggacggctactccccatccactactacgactctggcgggcgggttctccagctccaggtctcctaccccgcgggcgcgcgttccggttccggccgccgcaggcccggcgcctggggcgccgcacgcctggttccagtgcgcaggcgccgcaccggtcgagctccaacgcgcaggcgcgggcgcaggcgcaggcgcagacgtaggcgatcggccccgccccgactctgggccgcgaggcgcgggcggggcgatggcgcgcgggaggggcggggccacgctgcgggcccgggccatggccgccgccgatgccgaggtgagcagcggggccggcggggggcggcgcgggggcggcgggcagcggcggaggcggcgcgggggcgaagaaccgggcggggcggcggcaggcggccggcgggcgggcggggccccgggtccccccgccgccgccgccgccg

SEQ ID NO: 43321 - DNA, 2300 bp, Homo sapien
gggaggtaacagtacctacctcttaaggttgctgctaggctcaaattattgaattcatgcaaggcactggcactatggcagggttggacacaagtcagggctcagtcaacacaggctgtcattctcatcaggtgtgtaaagccctattcaaggctgcctatggaaccagagacatctggagccatttgctcatcggtcatgtattaaacacctactacgtgcccaacactgtactagtgctggtcctacaaccgactggccaagttatctaacccttcctcctcagctaaacaggaaacaacaggacgggcacaatggctcatgtctgtaatcctagcacttagggaggcggaggcaggcagatcgctggagtccaaaagttcaagaccagcctgggcaacatggtgaaaccccggtctctaccaaaaaaatacaaaaaaattggccaggtgtggcagcacccgaggtgggagactcctttgagcctgggtggtcgaagctgcagtgagcagtgatcatgcctctgcattccagcctgagtgacaaagggagatcctgtctcaaaaaataataataataaataataatttaaaaaaggaaataacagcacctgctgcacagggtgaagaaaaccgagggaggcgcctgatctaaaggtcttgcacagtgtgtgggatccagtgggtacttcataaatgatagaattcatcactacacgtcttctcccctacaagcctagaagtgacttgaaattttctaatttcgctttttgttctcagtgactaatattaattccttgaatgctgcagatactcagcaaaaactccttgcattgaatttaagaattcccctgcaccttcccagtttacttatttcaacaccccccaaaaatgcaggaaaaaaataaacaaaaaggccatacattacctgagttaaaatacagtgttaagtctatgcaccaggatactgtacggcttcttactacaccttaactttctaagctttagaagtctcaactgttactagacagttaatttcaaagaaatacttctacgctgacagttttctccaaaccggtcccttatctcagccctaggaccacactatttctgcatctccacggacacaccacctcctgcttgcttttccttcagagggacgccagtggtccactcgcaagactttaatctctacgctgcttcctttcctaagcaaggaaacaaactatccttgagaatgagcacggggaaggccgagaccattaacaaaagaatgtgaactttttacatcgagagccctttaaagctgctggtttggaaataaacttgagtccgcaagcttcccaccgagcgtgctttcctgcttctgacagccagcagggctggagcagcattgtctggggagaaacacgccgggactggccaacttttcgttaaagatggtgccatcctactcagaacaaagtgaaaggtcaacgaagcgaaggaagagctccgagaggagggacagcctcgcctcggccggcgctccaaagttggccggccccgctacttttccttttgtcctccgcacctccccggcaccctggccgaggccctccccgcagatccggcttgcgggcggcggcggcggcacggggtccgtggggggcgcgggcacaggtacgcggtcgcctccctcacctgcgcccccgcccgctcccccagccgccgcccggcccgcgccgcgcacaaagcgcgcccggcgggagcgcgggccggacgcccggcggcctcggcccggcctcggcctgaggcggcggcagcggcggcggcggcggcggggggacccggggccccgcccgcccgccggccgcctgccgccgccccgcccggttcttcgcccccgcgccgcctccgccgctgcccgccgcccccgcgccgccccccgccggccccgctgctcacctcggcatcggcggcggccatggcccgggcccgcagcgtggccccgcccctcccgcgcgccatcgccccgcccgcgcctcgcggcccagagtcggggcggggccgatcgcctacgtctgcgcctgcgcctgcgcccgcgcctgcgcgttggagctcgaccggtgcggcgcctgcgcactggaaccaggcgtgcggcgccccaggcgccgggcctgcggcggccggaaccggaacgcgcgcccgcggggtaggagacctggagctggagaacccgcccgccagagtcgtagtagtggatggggagtagccgtcccattttcaacacatgtctcattctaaattgacgttttggtg

SEQ ID NO: 43322 - DNA, 2300 bp, Homo sapien
aagtgaagatgctctgtgagtgaggaaagcttcgggttccacgcagccactgtgcctggcctgctgcctgcccccttcctctgatgtggaacgctggagagctgtgctcacaggccatcatctcactgcctcatccagggcactctcaggcgagccccccaagtgcctgctggtcaagagttcagttgctggagtacacttcggtgtcctgacctggtcgatgcaaaggggctgacaccaccgcttgggcaccgtctgtgcaaatatcagcacagtgaaaaaggcaattgaggtcctagtattaccatgaaaatagttttgacctcctggactcctggaaggattgcagggaccccggagagctcctgttggggggtaggtgtgaagggtgcaggctgagctggctggcgtacagctgtgatggaccaggaaaggtagcgtgctctgcatgttcgagggctggccatgagcagctgggctgctggccctggcttggcagtgggagatcagggggtgggaggtggaaacctgggcccccctgccttaccgtggtggggtgggctgtgcacagttgctaagaccagctcctggggagggtgatgcagttaggtccggtgttaccaagtcagcccagaaggcagcgagaccatatggatgtgagccctggaaagcagtaggcacatccgggctcaggtaggggctggcctggcgtctgctttgtggggaggaggggttctgttgagaggccccattgttgacatgttttctcatccagacgctggacacccgggtttttgcagcctcttcttacctgttgatagtcaattaaagatggaatcagtgcgtggctggcctcctgcagctgtctgactggctgctcctagtgacctcgggcaagtctgtgcctctcctcttctggttgtggactcggagcaccaagtgtgcctccctcagttgttcctattttatcactctgacccggaggcttcctgcccacttccagcttccagtggcctcaccagagggctttctccagtatcacatcaccaggtgtgggtgtcagcctgacagctcccacttgcagtctggcatctccaactgcccagagtggtcagcagccctcttccccggcccccagctgtgggtggggcatttgcagactccctgctgcctccttatggactccatggtcctgctgctgcgtcgggagaggcctggctaggagtgttttatgtgtttatgttcacttctccaaccagactctaagcttcttgaaggcaaggatttttgtgtaaaaaaaaaaaaaaaaattctgtccaagtgccacccaagtgcagtggctcacacctctaatcccagcactttgggaggctgaggcgggcggatcacttgaggccaggagtttgagaccagcctggccaacatggcgaaacccccatctctactgaaaacacaaaaagcatctgggtgtggtggtgtgcacctgtagtcccagctactcaggtgggtgaggcctgagaatcgcttgaactgtggaagcagaggttgcagtgagccgagatcgcgccactgtactccagcctgggcgagagagtgaactctgtctcaacaaaaaaattgtaagaggccttgtataatacatacctctatagatgcttaatctcaaagatttagtgatttaagttccttattgaattttcttgatttatctatttctataattttttgtaggaggttggacatttgaaatatatgaattattgtcagcagtagaatgcattttgaaataaattgtaacactcctgtaacagagcccaaagatttcagatatctaattatataaatgatacatgaatgcgttcttattgttaagaaactgtcttcaaaaatagaaatacaggagaagtttccttggactgtgttctgaatgccagttcttctgctggaggcgactgtaaccagctggcaggagtaaatctgactgtccagcagctcatggtgaatgttgtaactacgattttttgactttttccaaatgatgtccatttggaaaagcggcctcccactgaacccggctgacggctgttgtttctctctaacaggcagttccggcgaggggggagcctcagcaggattgctgtgtgaaaaccgagctgctgggagaaggtgagggcggtgtgcaccgagggacaggagcagcgcctccctccagactagaaaacctgctgctcttcctctcttattagtccccgtcttctgactttctttgcttcacctaggtttatggtatagtttctaat

SEQ ID NO: 43323 - DNA, 2300 bp, Homo sapien
tctcacactcacccctcccagacttctcacactcaccccctcccagacttctcacactcacccctcccagacttctcacactcacccctcccagacttctcacactcgccccctcccagacttctcacactcacccctcccagacttctcacactcaccccctcccagacttctcacactcacccctcccagacttctcacactcaccccctcccctctcaccccctcccacgcctcaccccctcccacgcctctcaccccctcccacgcctctcaccctctcccacgcctctcaccctctcccacgcctctcaccctctcccacgcctctcaccctctcccacgcctctcaccttctcacacgcctctcaccctctcccacgcctctcaccctctcccacgcctctcaccttctcccacgcctctcatcctctccctctcccacgcctctcaccgtcaccctctcctacatctctcaccctcatcctctcccacgcctctcactcttgttccctccacgcctctcacgctcatccccttgcacattgctttgctgtcggtgtgtcatctttggtgaaatgtctttcagacttctgctcgttttatgattgcattgttttgttagctttgagagttctgtatatgagtgtttgtcagctatgtggtttccagtattttctgctggtctgaagcttctcttctttctctcaaaaggtctttcacagagcaaaggtgtttcattttgatgaagtccggtttatcagttttctcctgtggattgtgctgttggtgttgtgtgtgataactcttcacctagccctagatctcaatttctctaattttttttttttttcagtcttacgtgaactttaaatctgtgatccattttgagttaatgtttgtataaagtctgaggcttgggctgaggttgaatttatttttgcctgtggatggcgccccagtcacagttttaaaactcacgttagaaactgtacatcattcgtctctctgaagttatgcttttattacagtcctacttccaggattttattctcatatatttttattcgtgaggatcttttattgtcatcctattacattcctttagggaaaaaaagcaatttgaaatttttagaaaattctctgaccatgaggcttatttaagtgatcgcttttttctggattgagtaattaaagtgtaattgattacagcacatcatttggttgaaaattagtgaacattcacaggctggtctgttgtaggaaaagagaacttgagtgttttgaggcttcggaacctggtttcctgaagactctccactgcctctccgcaccctggagaacttgctgtgctcctgggggagtctgcaggagaaggagggggtggactgagccagggcagggctgtgtgtgtgggccccacggaggtggtgcggcagagactatgggtgggagggtgcctgccctgcacctgcggtgtgctctgtgtctctgggccccacggaggtggtgcggcagagactgtgggtgggtgggtgcccccctgtgcccccggtatgctctgtgtgggccccacagaggtggtgcggcagagactgtggcggtagggtgcctgccctgcacccggagtgtgctctgtatctgtgggccccacggaggtggtgtggcagagactatgggaaggtgggtgcccccctgtgcccagggtgtgctctgtgtctgtggttctgggcctgagcccggggtgtgtctgtgtctgtggttctgggcctgagcccggggtgtgtctgtgtctgtggttctgggcctgagccgggggtgtgtctgtgtctgtggttctaggcctgagcccggggtgtgtctgtgtctgtggttctgggcctgagcccggggtgtgtctgtgtctgtggttctgggcctgagccgggggtgtgtctgtgtctgtggttctgggcctgagcccggggtgtgtctgtgtccgtggttctgggcctgtgcccggggtgtgtctgtgtccgtggttctgggcctgagtccggggtgtgcctgtgtctgtggttctgggcctgagcccggggtgtgcctgtgtccgtggttctgggcctgagcccggggtgtgcctgtgtctgtggttctgggcctgagcccggggtgtgtctgtgtccgtggttctgggcctgagcccggggtgtgtctgtgtccgtggttctgggcctgagcccggggtgtgtctgtgtccgtggttctgggcctgagcccggggtgtgccctgtgtctgtggttctgggcctgagcccggg

SEQ ID NO: 43324 - DNA, 2300 bp, Homo sapien
ggcttgaacctgggggcagagcttgcagtgagctgagatcgcaccactgcactccagcctgggcgacagagcgagactctggctcagaaaaaataaaaagatgcactaaggcacagtgcagcttttaaagggtttccttgagcagcgattcatgaacgaggcagctccaaaccagaagcacgttgggagctgcactgaggaaacacgaggggaaggatttttagggtgaacgtgggagtaaagccaggaaaacaccccactggttcatgacgcagtttcctcgtttgttctgtccctgctggaaagtccctagttctagagattggttggctgcttctgaatggtagagcttaagttttatttttctttactataggcatttgccaaaagtagcccaagatatcctttgttttcaaatcaagcaaggtcaagatggcctccttggctcaactggctttgtctgttcaaggattctttagtcttggtctccattttaatttactttaacactatatttttagatgtgaaaacaagagttaatgtttttttttgagacggagtctcactctgttgccagactggagtgcagtggcacaatctcagctcactacaacctccgactccctggttcaagtgattctcctgcctcagcctcctgagtagctgggattacaggcatgtgccccatgcccagctaatttttgtatttttttttttagtagagacggggtttcaccatgttgtccaggagggtctcgatctcctgacctcgtgatctgcccgccttggcctcccaaagtgctgggattacaggcgtgagccaccgcgcccagccaagagttaattatttttaattaagagaggtaatagtgagtatttgagacaatgattcatcttctatttctgctttgactgtttaacaaaaaagaaaacgtgaaatgcgatctggcttcctttgggagcggcacccactgtagccacttgccaagcttaagggtcttcctggcggtgccctccacccccgcccctgctgctcaacagccttggccttgcccgtctctcccatccggggctggggcagggcatgggggcaccagccctggctgtgctgggacgggcccaaggccgcctgcctgaccatggccctgctgcagccttccctatggactatgctgtcattgtcagctgcatattgagctctaattctcctctagtttatctttccttgtttttctggtgctttcctctttcagcctaataaatgggctctttggactattgtagtaggtgagtgagattctagataatagatgaaccgttattaaaaccttccaaactgatttttttttttttgtggctgccattctaaaaccaagtaggaaaacaaggtcttaaagggcagtgaatgctcttttgtttgaaagcaaaagatttaggagctactgccagaggtaccagcctctggctttggaacttgtgtcctgggtcctgagaacctgagaacacaggttaataggtgcctcttgagaccctgtcagggggtttgttagctggggaggcacaggccaccccttcatgttgcccaggtggtggccatccccgccccacgcagggctgtttgtgctgggtaatcaaccgcattgctttcatttcctggcgtgtgagatcactgttgagactataatcgatcactttctagatgttcttttgaggtcaggattgcatgagctgacatgtgtctgtgtgacgttagggttggccaacggtccagatgtgctggagacagacggcctccaggaagtgcctctctgcagctgccggatggaaacaccgaagagtcgagagatcaccacactggccaacaaccagtgcatggctacagagagcgtggaccatgaagtaagcacgtttgttttcatttaaagcagccacgaggagtgagtgagaaagcccagcccagcaggggccccgacagcccctcgagtgagttgtgctgcgtgaccagggcgggagcctgagtggattctgcgcagaaccaatcgagcagatcccaacagtgaaatcacggcagatgatgaaacacaggtctagagcttgttaaaaaggaggactgtgtagacaaagtctttgaatgaaaatggcctgttgtatttcttttttatgatcatggttttgtcaaggtttttcctaccttgctataaacaaagtgagtagattgaggcaggatagtcacaccaaggtgagtccagaactgcccagaactgtggtttcctgcagggcaggccccgcaagggccgggc

SEQ ID NO: 43325 - DNA, 2300 bp, Homo sapien
aagtaaaatcacttcttattccaaaactgagggaatcattcttagtacttttgtatgttctcctagacttctatgtgtataaccacattgaatttttgaaaataacttgtttttcctttaatgtaaacatttttcaaagtcagtaggtacaagtgccctgcagccgctggtcctgaaccagggagtcactgcagaagcatttggtggtggtggtgtggagggggcattttttcaggatgtacatgccctggttctacgcctttcaggtcttgttccataggtttggggtggggcccagactgtcttttaaaaaagttgcctgggtgattctaatgcagcctcatttgggcatcgagaagtctcttgctggcttcagggtagatcatttatgccacctgggcgtgccctgcagccactcttctgcaggtagacaggttggttgttcctacttttctgttattgcaaaagctgggtccttctagatacatgtttgtgcacttaattatatcttcaagtggagtcttaagaatatgtatttgtaattgattcatgtctccaagttgcttgctgtgaagtttggacagaactcacagtgatggtgtgtcatctctgcagaccccacagataccagctttgcagtgtgccagaccgaatacgaagaatgtcagaggcttatgttgaatttctttgtgtaatttcctttggggggcatttgtagttcttctttagtgaaatgccactcaattatttgcttatttttgggggggctacttcttgttttcttattggctatcagagaactttccgtagcaaacctgtaaggctttgtctggtgtgctgcagagtgcctggcatcctgggtgccctcattgcttccacctccacaggcgccttcaagtcctggtcctctcagaatcctccagtgaccatgttccccagtcaggccccagactctgtgtcctgctccttgccttgtgtgcaggttcctctggctgccccagaatccttggggctcccacagattcattgtaccgctgcccactgctggcctgtgatggcctggactgtcctgccaggtatacgttcatgtttcctggatacccagcccagaacccctctcaccccagaaccttccttgacttctgccagagttgagcagccggccctctggtaggcgcatgtgagtggatgtgggcacatgtggcccactggatctggtggatgtggtcgcgtctggccccctggatctggtgggtgtgggcacgcctggctccctggatctggtgagtgtggtcgcgtctgaccccctggatctggtgggtgtgggcacgcctggccccctggatctggtgggtgtgggcacgcctgccccctggatctggtgggtatggtcgcgcctggccccctggatctggtggatgtggtcgcgtctggccccctggatctggtgggtgtgggcacgcctgccccctggatctggtgggtatggtcgcgcctggccccctggatctggtggatgtggtcgcgtctggccccctggatctggtggatgtggtcgcgcctggccccctggatctggtgggtgtgggcacgcctgccccctggatctggtgggtatggtcgcgcctggccccctggatctggtggatgtggtcgcgtctggccccctggatctggtgggtgtgggcacgcctggccccctggatctggtgggtgtggtcgcgcctggcccactggacctgctcatgtgccgctgcctcctgcagtttgtgcagatgatgggcgtttccttctctgggctccctgtttgtcccccgtgctgaggcgtgtagcaggtgctcgataagtgcttgcaaagccaagctggccttgcagggctcggctcagtcagcccacacctgctgagcagctcttgtgtgcctgcactgcccagcgcctggtgggagggaatgccggcctctcgtgactctgacattgaccaccagtcttgtctgattgcagttgggccggtgcacaaacagcgtggtcaagtatgagctgatgcgcccctccaacaaggccccgctcctcgtgctgtgtgaagaccaccggggccgcatggtgaagcaccagtgctgtcctggctgtggctacttctgcacagcggtaagagcccagtccggcagcctctgagtcctccgcaggctttgctgtctgctcactggtgctggttcctgtcctgtgtccacctgctgtcgggtggtccagcagctggcccaggtctggtgtccgtctggaggtctccagtgttcacaagcccc

SEQ ID NO: 43326 - DNA, 2300 bp, Homo sapien
gagaggaggcaggagggaggtgccggttcaccctgccaggccacacagcatcctctcactgatttagtactcgccaaaataagtggaaaatcctgatttccagtagcatgcattccggaacagtttccatttttccaaacaaacggagaaacttgaaagaccaattaactggcaggtaaatttttcttggtctgaaacttaagaagccctcgactttaaaattggttgtgtgctaaaagccaatcagctgtttggctgttgaaaccttttctccatgaggaaaaacttcttagatgacaaagacctagtatttaatttataacataaacattatgaaaaaacgttgaaaatagtattgtttttactattagtaattaaaaaccaaaagtaacacaattaaataaggaatgtttaaacagccctagaatggtctatatggaaaatgaggctaactcataacggctaagggggtggagaggccgggcacggcagctcacgcctgtcatcccagcactttgggaggccaaggcaggtggatcacctgaggtcaggcgttcgagaccagcctggccaacatggtgaaaccccatctctactaaaaatacaaaaattaaccaggcgtggtgcctggcgcctgtaatcccagctacgcaggaggctgaggcaggagagttgcttgaacctgggaggcagaggttgcagtgagcccagattgcaccactgcactccagcctgggcaacaaaagtgaactctgttacaaaaacaaaacaaaacaaaacaaaaaaccacaaaacagaggggcaagtgagaggctcaggagactttgaccggaaggagctgggcttccccaaagagaacgcagggtccacagaccaagggtcagaggtcagaaggctgaggcctggaggcgcacagtgacccatggctgacttcaaacaccaaagctcaaagccaaggtccggctgccaaacctgaaggtaaagtagcgtcagaagtctacgacagctaatttttaacgaatagtaagcttaaaaaaacacaaaacgaggtagagagcgaggcccgtgctgtgcagaggagctgtggctctgcccgcacgctcagcacacagaggctgctcccccagaccccaaaaatcctggtgaaagaagagagggtgcgcccacaatggagagggtggcaccgaacgcccctgcgccagcaccaggccggcagcgcaggcggaagcgcagacagacccgagtgtgcaagggcaggaggggctgacggcttcgggcggagcataggggacgatgggtgtccttccccggggaggagggctcgggcagctctcggcggcccacaggaaacgggaggctgcggctccccagggcgttgccctcagacccacaccgcgcccaggacccgggtaagcagaaggaaatgaccccgcccatgagaacacagggcactgagacaaagtccaagaaagctctaagagtggagggaagcagcggagcaaaaggaagagtcagagcgacacccgcgcggcggcatttccaaacagacctgccagcgccaagaaacaggtcgcgccccccatccagctgcatcctggaccccacgcagacgcggagcaggacccacctcccacgcgctccccaaaccctcaccgcaagcggagcggctgacactgaccaagtcccacacagcctgggactccaaggtcgaagccgccggccgctcaccctccgcgaggctctgacggacggcgcccttcccaggctcgcgagcactccccgccaacggctacccatcgcggtccgcctcccaggcattgggcccgcagcgactcccgcctgcaggcccagaggcacagtcgctctcccagtccccgaggggacaagagacacctgcagcacggcaatcccctacacctgtgaggccctctaagcccgcaaggccccctacacctgcaacctcccttcacctacaagatccctgcacctgcaaggacccctacacctgcaacttccctacacctgcaatctccctacacctgcaacctccgtacgcctgcaacctcctttcacctacaagatccctaaacctgcaacctccttacacctgcgtgagcgtcaccccggctgaggcgctggcagaaggcggtgcgggtggagccttcgccaacgtcctgggccccctgagtgctgcatgccagtcctaccagccgctcggtcatctgccaccgcccagcaatggcttcagcatgcagtccctgctaggggactccagggaggagcatcctggccagggctgg

SEQ ID NO: 43327 - DNA, 2300 bp, Homo sapien
tgtgaacagaggcagttttacttcttcctttccaatgtgaacgcctttgatttctttttcttgcctaattgctctgggctgaagacagggtgagacgatgtactgtaaggcgaacaccttctgcacagcaaacccgtcattcgctcacctgtctgttgtcaggctctgtagagagtgagcactcactagtagtttttaataataaaccaggtaaccaaagtgagatgaaggaactatttctggacaactgggtcagtgtgtgaaggccccaagtcctggagatgtcagtaaggatgtcccttgctcagctttctgagaaacgtctacacacacactaggacgttgattctgacaggggaacataccttgggatccaccagggccccagccttgatgaggtacttcactgcttccagatggttgttttcggctgcttccatcaacggggtcctctggtcttctgagcaggtgtcaatattagcgcccgcctagtgaaacaacagttcaggtgtatgggagggctgtgacggtagccaccgcctggggagaagtgacttacaagcttccacactcaaaaaaagagagctgcactgtttcagtgaccaacaatgtctgagttttctaaacacgtattcaaagacataattattctattattatcaaacctttagtctaagcagaatatttctgctagatttcattccacttctaaggtaatttgatagtaaatgtttatagctcaggagtgtgacaacacctttagaaatgaggaggacagtgacaaccttctaaagcagacaaagaagggggagggaggggcccctcagcagagaggaggcaggagggaggtgccggttcaccctgccaggccacacagcatcctctcactgatttagtactcgccaaaataagtggaaaatcctgatttccagtagcatgcattccggaacagtttccatttttccaaacaaacggagaaacttgaaagaccaattaactggcaggtaaatttttcttggtctgaaacttaagaagccctcgactttaaaattggttgtgtgctaaaagccaatcagctgtttggctgttgaaaccttttctccatgaggaaaaacttcttagatgacaaagacctagtatttaatttataacataaacattatgaaaaaacgttgaaaatagtattgtttttactattagtaattaaaaaccaaaagtaacacaattaaataaggaatgtttaaacagccctagaatggtctatatggaaaatgaggctaactcataacggctaagggggtggagaggccgggcacggcagctcacgcctgtcatcccagcactttgggaggccaaggcaggtggatcacctgaggtcaggcgttcgagaccagcctggccaacatggtgaaaccccatctctactaaaaatacaaaaattaaccaggcgtggtgcctggcgcctgtaatcccagctacgcaggaggctgaggcaggagagttgcttgaacctgggaggcagaggttgcagtgagcccagattgcaccactgcactccagcctgggcaacaaaagtgaactctgttacaaaaacaaaacaaaacaaaacaaaaaaccacaaaacagaggggcaagtgagaggctcaggagactttgaccggaaggagctgggcttccccaaagagaacgcagggtccacagaccaagggtcagaggtcagaaggctgaggcctggaggcgcacagtgacccatggctgacttcaaacaccaaagctcaaagccaaggtccggctgccaaacctgaaggtaaagtagcgtcagaagtctacgacagctaatttttaacgaatagtaagcttaaaaaaacacaaaacgaggtagagagcgaggcccgtgctgtgcagaggagctgtggctctgcccgcacgctcagcacacagaggctgctcccccagaccccaaaaatcctggtgaaagaagagagggtgcgcccacaatggagagggtggcaccgaacgcccctgcgccagcaccaggccggcagcgcaggcggaagcgcagacagacccgagtgtgcaagggcaggaggggctgacggcttcgggcggagcataggggacgatgggtgtccttccccggggaggagggctcgggcagctctcggcggcccacaggaaacgggaggctgcggctccccagggcgttgccctcagacccacaccgcgcccaggacccgggtaagcagaaggaaatgaccccgcccatgagaacacagggcactgagacaaagtccaagaaa

SEQ ID NO: 43328 - DNA, 2300 bp, Homo sapien
agagaaaggagagtggtgggtgcctgacagggccggagcttcaattgaggtgcacagccaaccctcggtgacctggcaggaggaagtcaggggaatagtagacaccttggccttgctctttccttccctcaagggcctttggtgctcctgttgggctagcataaccagaaaccacaggtcaaggaacaggctgatgtggctttcaaaggccagctccagcgtcacgcagcacggagggaagggcagagcagatgtggcgagcccagcctccaggcgcagggctgcagcagtggcctctcgtcttggcatccctcgagaaactccacccctgcatagcatctccacttctgtccccagtaggcaattcttaatttccaccctgtgactaacaagctcttccctctgtcttccccatctcggcaaagggcatccccctcgactcagtcactcagaccaaaaatgaagagcctgtgtttctatctctccttcacatttacactggacgcactctctctaagagaaagaggcactgctcatggcccccatgttcaaaccacatcatctctctctgtgctgctgtcaaaacccctccctgggctctgatttttctctgtgacaggccagttggcagcctccccgacagccttagcacctgcttcccagctaagcgaaccctgattttgtttggggcaactatgtgctcgcctagtgggggctggccatcctggtccactttgacacatgttcactttcccaccctgttaaagtcagggccggccacatggcccatggcctaacggggttaaagagacacttgcagggggagcctctgagaagcttttcctttgttagaaaagaaaatcgtaacctgattcacaaagtggtcatcctttgtacacctgccacttccttcccgtttgagatgctggtgtagcggtgtgatgccctgtgctatgacagccaccctggggcatgaggcaacaggcaggaaggcagaaagtgtatgtggggattttggagggaggagagatggtggcttcgtattcagtgagatcacaatggcatcgtgcaagctgctgctagctgggaagcgggttgttcgcctctgaatgcatcctaagtgattcagcaccccagcctcctgcagtccacactccacacggcagcccgagggacccttcagaggcctacgcgcctctgctcggaactgtgcggactgcctccctctcagaaggcgcagcccgcacccggcctcactctgcactcagcgccttgcgagcgagcttcaggtccgagagggtcccttgttcccgaaggtctccccgaccccggggccgcctttttggaggttgtgaggacccacgggcctgcacgaagtgagcgctgtgtaaatggttgctgtgctttgtacaaaacggtcagctccgtgagggcagagctgggagcccaggacaggcccggcccgcggtgggcgctcaaggaggcctggggaatggcagtgaccgtgacaggttccctaacggggcgtggcctgcaaggcggtcagaggcttctctgagctgagatcccggagccagccccgtgcgtggaaacagcaggtcccgcacccgggctgggggcccccgacagaagcgtccgcgtggcaccaaggccgcgagccgagcgcacccggagggttgggaaggccggggacccggcggggacggggcgggccggcccaggcctggcgcccagctctgggctgcagccccagggctggtggcgcctccgggcggagcgaggggtccgtctgggccgagtttgaggagccgagggcacccaggggcggtgcggccggcagagtgggctccggggacggcccgggctggcgctgagcggccgtcgaggacccacaggctcgtccgctcctgggcccggcccagccccggggtgggaggcgcggggcgagggaggcgcagccggaggggccggggcggggcgggggcggccgcggggcggggccggcgcggcagggtgggcggggccggcgcggattggccgggccccgccacgtgaccggccccttatagggcgtggcgcggggccgcggagtcgggtgaggcggcggcggctgcggcggtggggccgggcgaggtccgctgcggtcccggcggctccgtggctgctccgctctgagcgcctggcgcgccccgcgccctccctgccggggccgctgggccggggatgcacgcggggcccgggagccatggtccgcttcggggacgagctgggcggccgctatgggggccccggcggcggag

SEQ ID NO: 43329 - DNA, 2300 bp, Homo sapien
tttgggaggccgaggtgggcggatcacgaggtcaggagatcgagatcatcctggctcacacggtgaaaccccgtctctactaaaaatacaaaaaatgagccgggcgtggtggcgggcgcctgcagtcccagctactcgggaggctgaggcaggagaatggcgtgaacccaggggcttgcagtgacctgagatagagccactgcactccagcctggatgacagagcgagactccatctgaaaaaaaataaaaggatatgcagatggcagagaaccacatgaaaagacgtccaatatcatggaaatgcagatcaaagccacaacgatcacgacatatctatcagaatcaaaaaaaaaaaaaaaaaaaaaatacagagacaacccccgtgccggcgaggctgtggagaagggacggctcctgtgctgctggaaatgtgaaacgggacatccactctggctgagagtttggcagtttcttaaaaaactaaaaatgtgactacagcatggcctaatgattgtactctttgtactcttggtcatttatcccagagaagtgagaacttatatttacacaaaaacctgtacatgaatgtgtatacagctttgttcatagtatttcatgaagcaaatgggtgaaaaaggcaaatccaaaggtatgacttcatttatctaagatcatcgaaatgacaaaattatacaaatgcacagatgagtggttgccagcgagtaaagggaaggtgggtgaggtaagtaggaggaaggtgggtgcagccatagaagggcagcatgaggggccctcccgggacgggctgttctgggccctgtgtcaatctcagcacctagtcatgagaccgtggccctgctattacagtttcctaagaggtttcctttgggggaactgggtaaagagtacactgctctctctataccatttattacaactgcctattatgaatctataattagctcaaaataaaacctttattttattttattttattttgtttcatttttttttttttgagacagagtctcactctgtcgcccaggctggagtgcaatggcgcgatctcagctcactgcaagcttcgcctcctgggttcaagcgatcctcctgcctcagccccctgagtaagtgggattacaggcgcgtgccaccttgcccggctcattcttttgtatttttagtagagatggggtttcaccatgttggtcaggctggtctcgaactcctgacctcgtgatctgcccacctcagcctcccaaagtgctgggattacaggcatgagccaccgcacccagtgttttttttttttttaaaggggggagttgttaatatcagcgtctagttcttggatttataaaattattgttattaaaacagcagccagcacataataaacctcacaaaagagtcagctttaaaaaaaaaaaaaaaaaagggccagcttttattttttcttttaccttttcatgtctcaggagctgtgctgctcacttctagcagctgtgcaccgggccttcacccacatgcccacggtcccaggctgtggatcctggcaagtccgtggagtaaaggcacctcctgggagggtggggggcctttgccctcctggagagagcccctcactggagatggcacagagcccagcaccaggcgagacacggagtgccatggcggcccccctcccgtgtgtccctgtatctgtgtgtctgggcgtttcaggcctgtcgggctctgggagcccacgcacctctgatgcatgccaatggaaacacggcggccaccccacctgctgctcctggtctctagtctctgcctgtctgcctgcagtgtcgaattccacccagtgctgagtaggcccgtgatgggaacagggacaccattccctccccacacgctgtactcccagagcaaggctttaagacagcaggtgctggggtgggaccggcaggcagagcaggaggtggtgctcaggagcccccacccttggacgggaggctgccctgtgctgggggacgtccctcctgcctgcagtctcacagtgcccctcctcctcacctggtcccacccttggccccttcggggtgcctgtggctccagtgcagctgtgttgtcaggcccagaggctgatgacagagaagcgtgagaaaggacccacagtcagaggaaagggggagaactatggcggattctgcagacatcaaaccatctaaccatttcacgatgcaatgatgcaccagcaacagccacatggccacagtggaccccgcaggcctggccctgcatcccgcctgcccc

SEQ ID NO: 43330 - DNA, 2300 bp, Homo sapien
aggcacacagacagaggaaggaggggtgccctgtgagacgacaggacctcagccccaccccagccccttgggcccctgggaaggcacccagctcccccgccacagcctggcggggacccggccatccgggccactcacgttgttcctgggcgagtctgtgcgcactgggtcctcagcagccagggcgatgctgctcaaggcgatgaccacgagaatgaccacctcgaagtacctcatggtcacgatgtagtggcagaagcggcggagcctgtgagggaaggcacggatcaccacaaggccccccagccgggcgcgccaccccttgccacagggcaggctcagcccgtcccgcagaaagggctctgggctgcctcaggaagctgtggccccagagcttcgctttgctaatggtccctgtggttggtggtggcagccaggtgacggacagtggctgagattcctgagagggcctcccgggacggggggtggggaaggctgcagaacctcatggcaggggtcaacaaaccaaagctcacaggccagatagggagacctgtttgtgtgaataaaacttcactggagtacagctacatccattcactaccaactgtccatgcagccaacagcagtccaaagccaacagcatcaactacccagccctttcacagaagaggtcagctgtgggcagcagggagggagttgctcagagaggaagaatttcagcgtcaacattctcacggagagcaggcctctcttgccctaggaaagttctctggggcctgtgcggggtgtgtgccctgtccaggctcccagggtgcatgtgaacacgctccacgtgaacacgctgcacggggacacactccacacactgccacgtgctcgccttttgctccagtcccatttgcccgactcgcttgttcaacattactgagcacctaccctgccaggcatgtgctggacactgggggacacaggggtgaccagaacaggcctgatgaagctccattcagcagtcaaaacaccaggaagcagcgaggaaatcaacaagcaggggcctccctgctactggcagagccacaacgtgagagtgcacagtaaccaggaggctgggaagcccatctacgggtgggggaccagaagaggcagccgtggacggagcaggtggggcagacggcccccatcacgagggctgtgctctggagatgcctcccctgcctcgcaggcgtgtccaccgcccccagcccctctaagctcttcctctcacccacacctgcgaacccccaagggccattcatcttaagcggctgcccacatctccctcttccttgaagggaactcagccatctagctcctgcccctgtgtccacagagctgttcatccctggcccaccgccagcctgctgctgcctcaacccttgccacttcccctgcctttccttctaattcagccgtcatccactccaacttgtgtctgggtttctggcactcagctctagcccccagctcagatcctaagtccacctggccatgagacatccccagccaccccaggctttgcagggtctgcaggcgggaccccagcagcactgctggtctcagtgaacgcagtgccttccgccactgtcaggcagaaactgggtttcagtcagacatcctcgatgtctccttccccttccacatctaatttatcaccaaattctgtagattctgcctctaaaattcctccatacgcacctgacttccaaacctcaacactatgagtaccctggtcaaaccaccactctctctgcctgaaacccttaccatctactcagtggcctccatctgtagtctccccataaaagggccctgctgggctgcaatccgagtacccccactgtgcacacgtcccacgcttctcagtgtgctccgggatggtgcaaccccccaaccccacaacagaacaaccagccagctctgcctacccttttgtgttctgacccagttctgtccttggctgtgtgccaactgctggcttctacttctgggctactgtgaatgctccgctagttcctcccctctcccctcttcaccttaactcttattcatccttcaggtttcaaccaagatgtcacttccaccagaaaacctccctggccttctatcacctgctcccagaatgccagtgccttcctgtgtttccatttccacaccgggttaccacccctcacctgccactgcactgtcagtcctgacatggcagggtccacgtctgtctccattaccgctttactcctaaccgcagcgtagcagggtaagct

SEQ ID NO: 43331 - DNA, 2300 bp, Homo sapien
ttcaaaagaatgaaagtaagtgagcagaaggctgataacagccaccaccatggacaaacatgctccctcccgagtctctcaaccagtcagttttcagatccagggtccacagcttagaggagagactgggcccccttgcagaagaatcctacaacacaagaaggagtccagacagcagccatttctctgccctccccaaggagatcgggctcgtttacttgagaaattgcacactggatccagacagcaaccatttctctgcccctccccaaggagatctggttcgtttacttgagaaattgcacactggagaaagaatacccggaggttttgaaggctgttggatacaaggtccaagataacattgataccaaggaactaaaatgagattgcggctccatctcagagtgtgcgcaggggccaggacaccaatgaatccctggcccaggcccatctctcagtggtctcgtgtgcccaggcacagctggtgttcatttggctagtcctaactaactggccgaacccaccacactggctcctcgacatgtgaagtagacataacaataggaaagtcctcaacaccgacaccccccagccaaaacggtacattataacactgcatccagtatggaatggagaggttagtgccacctcgaataattaaaagataaaggggtggttggtctacacctcattcccatttaattcaccagtatggactgtgcaagaaaactggatcacaatggatgacactggactactccccagataacccaggctcagtacccactgctgtgggagatttggtatctttaatagaacagatctactcagcctctgggacttggcacacaggtgccaacctggtgagcacactcttcagcagtcactgctaagcagggtcagaagcagtttgtatccacagcagacattcacagtctgaccctatgtcacaacatggtccaaaggtactcttaatcatttggaattcttatttttattttttagagacagggactcactttgtggcccaggctggagtgcagtggtgcgatcatagctcactgcagccttgacttcctgggctcaagtgattctcctgcctcagcctcctgggtagctgggactacgggcgtgtgccactatgcctggctaaatttttaaattttttacagagacagggtctcgccgtcttgcctaggctagtctccaactcctaggctgaagtgatctttctaccttggcctcccaaatccctgagatcacaggtgtggccactgtgcctgcccaagacgttccctgccttggcctcccaaagccctgagatcacaggtgtggccactgtgcctgccaagacattcttcagaacaccacactggtccaccacactgatgatgttatgttacttagatcagatgccctgacgcactccagagcacaggtgataaatcttacaaggattcatggaccttccacgtcagtgaagtttttaggggtccagtggtctgggctatgccaggacaaggactccaaggtaagagacaagttagtgattgcacctcacacttctactgcgggtaggctgctttgcgttttggagatggcataggccacttaggaaatactgctgtgactcaagacgctgccatgcttgagaggtttcagagcacaagtgaggtctccaacagacccaggatgtgatagcagtggccctgccacttgggccacaaaacccagcaacccccagggtccttgatgtgtatgtggtaggtaaggatactgggtaaagtcctgggaaagcctccacagagaagtcagtgcagacacccagcatttgggagcaggccatgccatctacagaacggaagcataatgagaggggccaacctacttcctggccctggtggcagctgtgtgtgtcaccaagagacatcgctgtctatgacaccaaagcatctccccatagtgatgtgctgtcagacccaccacaggcccagtgaacaatggaaggggtacctctacgaccgaacccaagcatgtctagaggacacagcacacaacatgtggcccaatcccccatgacacgcacctctgttgaccaatgacgtcctcacctcactcccgccatcacttcatggggattcactacaacttagggggaaacgcagacctgatttgtggatgggttgcttggtatactggtgcaggcctcactacagcctcacataggaacagcctgaaagacagaggtggagcagagccctgggcagggtatctggtcagctctgtgtgggggggaa

SEQ ID NO: 43332 - DNA, 2300 bp, Homo sapien
cctttctggcatacaggctgtattagtctgttctcacgctgctaataaagacatatctgaggctgggtaatttataaaaaaagaggtttaattgactcacagttccacatggtcggagaggcctcacactcatggcagaaggcaggtgaggaacaaagtcacatctcttacgtggcagcaggcaaaagagcttgtgtagggaaactcccctttataaaaccatcagctgtaatcccagcactttgggaggccaaggcagtggatgacctgaggtgaggagattgaggccagcctggccgacatggtgaaacctcgtctatactaaaagtacaaaaattagacagtcatggtggtgggcgcctgtaatcccagctactcgggaggctgagacaggagaatcgcttgaacccgggaatcagaggttgcagtgagccaagatcatgataatgcactccagcctgagcaacagagcaagactctgtctcaaaaataaataaataaataaaccatcagatctcatgaggcttattcactgtcacgagaacagcatgggaaagacccatcccccgattcaattacctcccactgggcccctcccacgatatataggaattatgggagctataattcaagataagatttgactggggacacagccaaagcatgtcacaggttatgaaacaaattgattctagcaggccagacttaagagagatgagccccttgaccatcccaaggcagagtggttaacagatgcaagttgttttatgcatcaggaaaacaggagggctagatatgctattattagcacaagagaatcaaggcacaagccttgctggcctcgacctcagctcaaaaagctgagttaattgaacttactaggtccctgcagttggaaaggatttaaaagttaacatttacactgattccaagtatgattttttagtgcttcatgcttatgctgcaatttggaatgggtggggactcctgacccccaagggcttttccatacaacatcattcagattttgagcttgttagagtgctgctttgctgccaaaaagtgactataattaattgcagaggacatcaaaagagagactgaccatgtaaaaggaaatgcccttgtagatgccacagccaaggcccctgcactgaaagggccaatgaagcttgtgggcgtgctggtcagcatacatagaactgggccggaataccctgaagaagaacgaaaatgggccagggattgcatttcagtccagggcccctcgggctgaatgatggtaataaattactaacgccaagtaccaatcacaggagtataactcagcactttcatgattcttttcaccctagaagggattctttgtttctgttaatgtctcatttgtttataggggtaaatcttttcaagacactaaaacaggtgactcagccctgtgagctctgtgcctgacatgacccaaacggccagcaattttctccttctccagttaaacctgtccaacattgaggaaccaatctacatgagaactggcaactctaatttaccccgaagcctttctgcaggagattcaaatatttgctaatgcttactgataccttcactggttagattgaggcattccccaccccatctgaaaaatgtttaccagaagaaataactcctcagtttgggtaatctaaaagcctgcaaagtgacaatggcccatctttcacagcaggcgtaacccaacacctatctcagctttaagaatccaatattaccttcactctgtgtggagactgcagtcctctggaaaggtgaaagggctaatcctactctacagaagactccagctaaatcagacgcctgactatctccaacacccatagcttactgcgggtttgaactgctccaaagtaaaacgtataattaagtcctgttgagttaacatgtggaaggcctttcctaacgacagatctcctaatagatgaaaagactcatcaattacaaaaatatgtcatcaatctgggacaggtgcaaaggcactccgtgcatatggaaacaagagtcttcccctcccacatgggaggaaaattcagtttcagctcagctagggatttagtcttactaaagacgtgggaggaagttctccagctgagcagctttccccaacgtggaagggaccacgcaaggacacctgagttctccaacagacgttcaacgccaagggattcacaggtgggtgcacctgtgtggaagtaaagctgttgcttattctgggagcccaatcggaggctgagggaggtgggcgcggg

SEQ ID NO: 43333 - DNA, 2300 bp, Homo sapien
tatgtcagtctttgagggtaaatgtagagtatttaaaatagcttatatttggaaaactgaacagtgtttgttgtcatgattttactttgttcttgaccacattggtcccagagaaagtcaaggtcttcacccacggattcaagattcttgtggcagctgctgaattcttttccaacaatgcttgggcctcatcagcgtcatgtttatgcactaccccagccccaaccacagacatgggcaggaggaacagagctctaccgtgtagcgtcactgccagtaagagtctggctctcccatgaagcattactcttcctctgcatgtattttagaatttcaaaagccatttggcttccatttctttagattgtggataagatccataaacttgtactggggtcactgttcctccagcctctttagcacgtatctgcagtctcatttccaggctgtttcctctatgggccactgcctgcagaattcccagatgaatccactgcccattccctgtagccacatctccaaatccacagccgttctcggcagctgcctgcacactcacatcccagaggtcaagttgccacagctggtgtgtgtttccagccactaggcaaccccaggtcttcatctgagcacccagggccagaagtctcaccctgtcccccgtaccatcccttcccagccagccacagtttccttccttctgttgcccacacagtgctctcagccccagatgcccttcctgacacttcctcccaaggaaacccaagtcctccgtcagggtccacccaaatgtccacaccctctggtagcctgcccagccccagaggctcccctgagctcccttcccccattagagcctacagaggcagtgctgcccagcagacatctcagctgggagtcaaacagagcaaggctattttggtccctctctccactctatgtgaccctgaaatgtgccctggccttaggaaacattcagctacatcagacaatgtgagtatgcatgtggtttgtataacacaggcaagacatggtttttagatacgttcagaatagatagttacagagaacaggtatgttacatgtgggaaggaagagacacaagggccaagagatacttaatatgcatgaggctcctgggcactaaatgttcaattcacaatgtgcctttatacaagagacacctaaacatgcagaaccatggggcctttgttcaccaccattcctggtgcccattctggtcccatgcgtcctctgcccaagaaacacgtagaacccatggcagtgcgacagctgcttcttggcaactccaccatgatcaggcacacttgtcccatgtctgtcccgttgagccggtgtgtgtcataagcccttcagctgtgagcactcttgcccagacctcggctctggtcctcgtggtcacacctgagtgggtgaggttgactagcagagaaagaagagaaccgatgaatgttgacagcacaggaatcaggtcatacggccctcccatctccttccctcagcttcttgctgtgttttacgaatggattttataaacctgtgattcgagcatcctcagttgcttctcgagcctttccgctccatgaactctgggacagcttgcctggtactgcaactggaggacatcattgcatccagagagcttcccacatgacagtctgtgagcaagggacttcgcctccctggatgctggttttcttttatgtaaaagatgtgatcgtagtctctatttctcaagggtgctgtgagaaacacacagaataaggccacgtgaaagtgtgtggcaggtagcggatgctcagtaacgtgaagcctgcccttcccgtagcctttctcttcctccactaggtctagacttcacattgtcccatggttcgagatccttggttcatcccaagtcttatcatcatcccagaaggttggagggagctcctggggaaatccagcttcacggtcccacactgatcacttcccctgggcatggcctggtaaatgcagctcagatccgctccccaggcaagtcaaggaagttgctgcccagaaaccaagtgaggacatttacaagaaccggcagcggcggcagcagcagcagcagcagcagcagcagcagcagcaactggatttgctttttcaccagaggatccagatttccctgtggcctcgcaaacaaaaaagaaggaagacggagcagcacagtcatccctttgtgaaaaaggcattcaggtaactgagtgactcagcaagcctgggtcttggggaaattacgaatacctggttga

SEQ ID NO: 43334 - DNA, 2300 bp, Homo sapien
gctcacatggttttgggcattgtctctaactaccttgcttccccaataggttgacccattctaactaactccatttctctttaaaaaagcaaacttcatttgtatgacttgcaattgtaaacgacaccaattggccagttatcattcaaattctctgttacttaatcctgccttttcctgacgtatgcaactttcgcctaaaaaattggacactttgttgcttactcattgtctttacacattttaaaatgttgctttgtgccctcaatccctaactacattttcaatgttttgcaagtggggtccatgtgttcttgatttacatgaagctcaaaataatggttatagtaactagtacttcataattaagcaaaaagctcttattgaaaaatgacagaactatacatagggatgagaacatggagagatatttcgtgagatcacaaagttatggtatggcagaaatagaacgctgagtagagactctgtgttcccaatcattatttctaccaccagctttctattttgatgttaataatgttcttaggtgggaaaccctacatatttgccaatgtttagttcattgacaaagaaatagaaagagcttcaagaacactctaatctttaaaaattaaaatacctataattggccatacgaaaaaattggtacttgacatatactgagatcgttttattttgtgctagacaaatgaagtcatagaacagaatgtgctttaaatattatgaatagtgcttacatgtgtgtgtgtctatagatgcatattaggccgctgaaaagttttattattctttccaggagagagactgccaacttttgaacctaactagaacaagtaaattgcttcttcatatttttattaaggcaaagagagtctagttaaaaataattcaaattgtcgtggaaatgctataaattgctgtgaagtgagttgctggctatggcttgtcagagcaaatatattgtacaaatcttaggggagagttagtgcttgtgcattaaaatcaaatcatcttgcagcacaccgagaaaaaggttagatttgtaaaataatttcaaagtcatgaaaagagcaaatatgctccacaaagagcctagcaaccctcaatgacaaatgccccttttatatagtttggtatctgaattagaatcccagaatctacaaattcctctgcgtgtgggtgctgcattttgaggattttataacactgccatcaccaagctctcttttgatattcactttaaggagataatttacgggcaaccagagagcataaaccaaagtagatatctatctagatagctagatacatctccatatgattgacaggatacattctggccgagtgtgagtacaacctatggatgtggttggagagaacaactgttccacctgaatggcagatcaggattattccttctcatctgctgcaatggcttaatgtgttaaggagaggagcgagacggcaagaaccgcattcattcagtcatacagaccaaaaggaggaatgtcgcccagccctctaaactgacccagaacccagctcatgtctcaactgctacctctcctacttagaaagaaataactccaccaaagcagggttgtggacaaacatatttttattgatcatatacaaatagatgaagatggacttggatgttaagaaaaataatactatacaaaatcgagagtagacagtcgcccctagacttaaattaagggtgtgtacattagataatttaatccaatgtatccggtaaaaacttgaaccaaccttttggcctcttccttaaaattcagggaagcatgtcctccaaaaaacagaatcaaaatataaataaaagactggcttaagatgaaaggaaaccttacaaatgaaaagaagccagatgagaggcacttaactgagaatgaaaagaaactgagtggacaaaataattatgagaagatgaaccttcaaatcagaaagagggcaaaaagcttatttgatactatgggaactcaaaagagagtgaacaaaaatgtgaaaattccaggagtaaagaaaagtagcatagctaaatgaagagcatgagaaaatgtatacaattttgagtaataagaacagaaatcaaaagtaactattgtatgttatattttagtagagcaacactgaagaagaatgaaaacaagaaataatgttaaatatgaacatatggagaacagaataatatttttaaaatttttagtttctaagcttatctgaaattttaatttttttcttatgtaataccagagtta

SEQ ID NO: 43335 - DNA, 2300 bp, Homo sapien
ccagctggccctcggtagcctggagtggctcgtcctggacagactcaccgctatgacgcagggggaactgccaggagtccctgagcgaggtgatctgagaaatgccatggcagtgttctaagccagcagcctggcttacccacaacctctccgctgtgtgaccttgagcaagtgccttaacctctctgagcctcagcttgcccctctgttaaagaatgatcatatatgacacctagcaaggttatgtggagtatcagcaacaaggaatccactgcagccagtgttgcaggtgcaactggctggggctggtgtcacgggtggtaaaagaatttaccgagacagtcatgggtaaagaaagtctgaagacaccttgcaagagaacagcaggcagcatggcagagagaaggccacctccccaggggcagaggccagggggaagtttgatagggtcacactggagaggcgacatgcagacagggtcatgctggagaggccacatgcaaacagagtcacgctggagaggccacatgcagacagggtcatgctggagaggctacatgtggaaacggtcacactggagaggcggcatgcaaacagggtcatgctggagaggccacatgcagacagggtcacgctggagaggcaacaggcagacagggtcacgctggagaggccccatgcagacagggtcacgctggagaggccccatgcagacagggtcatgctgctggagctaacgtgcagagctaggtatttggtaacaggagattgtgcaagtgggctgcttgtggttatccatttcttagaacaatggctctcccccaccctagttcatgttcttgccagctagggcctgtggtgccatggagttgtgcagaggagggaaccccttcctcatttctatcagctgatcgggactccacagtttggtttcgctgcatatgacaatcccagcaaaagaagcataaacaagaaagaagctgatttctttctgaagggagaatctggggatgactgattgagggtgaggtggcagctcctcgatgtcctcagggacccagatcctggctgttctgctcctcatcctccacgcatggtgtctagcctcaaagccactccatggtccaaggtggctgctggtgctccagccatcaagaccacaggacaggtggaaggaagctggaaaagtacagggcagaaaagagcccctcccagaagtcccagctgagtcagcttgtttttagccatcttcctggaagtcttctacagcacttctgcctttaacccactggccacgacttagcagctcagctccacttagcgtcagggaggaagctgggagatgcaggttttcattccggccagctacatgccccgccacgcatcagggttctgcttccacggaggaagggaagaggaccatgtctgtacaagaggagctagacccacgataaacatgagccacgctaatgttgtcagcatccccagaacagccagcaacacagccttacatcacacccaacctcccaccagcctccagccctgggcagcgtcctcactgcaccgcagcctagagagggagccagggtgcaaaagggacagaaagggagagaaccggaggccaggctgacccgagcagccagggacagaggacagaccggggaggcagatgggagttcagggcaaggaaagtcttgggggctgcctggggcggggggagggagatgtggggggcagaggtaggggtgagctgcatctgggagggaacatgcaccctgttcctaaggagaccctgagaggcttaggggagacggtagcatgcaacagcacctgctgctcccctctgcaggaggccgactccacggaggaccatgctctggcagaggaacccaaatacgcatttctcccacacctcagcctctcctggccccaaggcaggtacaggctcagagctggggaaccggctggagactttcctctttttgctgactctgccctggcatattctgagatacaggggtcaagacttcaacatatgaatttgggggtcacagttcaacccagcaagctatacagatctcaagggtgtcactcagggagttgacaaaggcagactccaccaagataagaacctgaccacccccgagatatgtgctcatcagtccccactgcaccccctccagaggcgacttttcattgcagatcagcatgacctgttctagagcttcctacaggcagagtcaggccgcactggcctgccccagctctcagaggcccgccatcactgtgcacccacacac

SEQ ID NO: 43336 - DNA, 2300 bp, Homo sapien; identical to SEQ ID NO: 41883

SEQ ID NO: 43337 - DNA, 454 bp, Homo sapien
cagatgccctttagggcccaggccatgccccggatgtgaggggctgagtcactggtttggcagtgcccctcagagcccaggcctgggctgccacccacctgaggacgagggctgggccagctgtcgtgctccagttgctggggcctcttgggatcttgggaaccccatctctgagccccgccccatggccccgcccctcccaaggagggaaaaggcggctgccagtcgctcaactcaggcactgggacctagagctcagaagaccgagaggacagactgccgtgttgccaccacaggtaagcccttggccgccgggactgccctgaactcaggggcactgcagggtcagcccccttctctcccatctctcagcctccccgaccccattcccagctccatcccaggaccaatgccaccaggggagggggaggatccctggcaggggtggcagctg

SEQ ID NO: 43338 - DNA, 2300 bp, Homo sapien
acatcacaccaggacacagaggaagggccgggccccgtgaccacagtccacatcacaccaggacacagaggaagggccaggcctcatgaccacagtccacatcacaccaggacacagaggaagggccgggccctgtgaccacagtccacatcacaccaggacacggaggaagggccgggccctgtgaccacagtccacatcacaccaggacacagaggaagggccgggcctcatgaccacagtccacatcacaccaggacacggaggaagggccgggccctgtgaccacagtccacatcacaccaggacacagaggaagggccgggccctgtgaccacagtccacatcacaccaggacacagaggaagggccaggcctcatgaccacagtccacatcacaccaggacacagaggaagggccgggccccgtgaccacagtccacatcacaccaggacacagaggaagggccgggccctgtgaccacagtccacatcacaccaggacacagaggaagggccgggcctcatgaccacagtccacatcacaccaggacacggaggaagggccgggccctgtgaccacagtccacatcacaccaggacacagaggaagggccgggccctgtgaccacagtccacatcacaccaggacacagaggaagggccgggccctgtgacctctggtcctcatgactctggggcacagcgggaggaagggccgggccctgtgactgtgggaggaggcgtggaagccgcttcctgctcccgtgccacaccagggcacaggtcattttatagactctcccagggctgtggaaggaggcgggaaccaggaggctggtgtccccgcagggcctcagtgaagggaggagggaggaggaggagggaggagggggagggaggaaacagatgggccaagaggaagccacagggggctttgggcagagagggggagtctcaatggacaggaagaaggagggagaggatggagaaggagcagggggaggaaggaggagggggaggaggagcaggggggagggcggagtgtggggaggtgacggggcctgagttaggatggaaagaggcggagaggccggtggcctgtggcttgtaggccgaccagatgtccctgtgccaggacagcagccgccctcaaggtaccccacagctggggtgagggaggaaacagggagccgggacagaaatggggtgcagggagagaagccccagccgtggctatgcgggagaattccacccgggaacatgggatcccaaggcagccctttgagccgtccactgcggcccccaaacgttccgtgcactctctgaagcccacactggccctgtcctggagtccagcccggggtgggagacagcggggtgcgtggggagcacctgcggggtggaccggaagcagccaggaggaggcaggaacggggccctggacagacccctgacctgggctcctggtcagctccaggttggctcggggggggagatcgcaggcgtgggctgcgctgggaggagccacttccaccgacggaggcggcacgggctgcccagggtccgggccacgcggggcgggagaggtcggaacctgcagggggaagatcccggtgggtttgctggccaaggcgctcagagcctgcaggcttgggactgccggccccatgcgttgaccccagggccgagatgaaagcacctgttcaccccgtcctgggggctccgggagacccaccgcagccgcggccagtggcccgagtggggcccgtcagtcagacacctcaatgtcccctgcaagggcccctctgaccacagagaacccgtgggcacacacctctgggacgtccttgctgtctctaagcccctgaccgggggaccccggggacaccttgttgggacacaccgtggggtcccctgggaggggtcttccggtccccagtcctggtctgtggggtccccgtgggagttcagggcggtgtttgcagcccagccggtcccgctcctgcggtggggacagatccgtggcgggggcgggctgtccctcctcctggtggcaggagtgtccgcgccacagccaatcgcagcggactgggtgtgttttaggaagagtgtcccgcagagacccggcgggagctgccaggagctctgggattccagcggctggaaggtgagtgtgtctaccccgttctcctgatggcaagtcccctacgggggacgtggcgggtgccgtctgtgcctgttgtgggctgggaatcaggaacccgcgcttccgtcattgaggctccttctcctcctcc

SEQ ID NO: 43339 - DNA, 2300 bp, Homo sapien
ccacctggacgtatatgtgcaagtcacaggggtgataatggctgagcttcggctcagaggcctgacaggttcaatcggtgaaggtgggactgctccactggtggtgaggcgggcttccaggtcataaggtagattttaaaattttctgactggcaattggttgaaagagttattattaggccgggcacggtggctcacgcctgtcatcccagcactttgggaagccaaggcgggcggatcacctgaagtcaggagttcgagaccagcctggccaacatggtgagacccccgttgctaccaaaaatacaaaaaattagctgggaatggtggcaagtgcttgtaatcccagctgtgctggaggctgaggcaggcgaatagcttgaatccaggaggcggaggctgcagtaagctgagatcatgacactgcacaccagtctgcgcaacagagcgagaccctgtctctgaaaaaaaaaaaaagaagaaaaaaagagttattagtagaaaggaatatctgcattaagataagaggatgtggagacgaaggttttttgtttttgaacgggagtctcactctgtctcccaggctggagtgcaatggcgcgatctcggctcactgcaacctccgcctcccgggttcaagcgattctcctgcctcagcctcccagtagctgggactacaggcgcgcgccagcacggctaaatgatttttgtatttttaccagtgatggggttttgccatgttggccaggccggtttcgaactcctgacctcaggtgatccgcccgcctcggcctcccaaagtgttgaagtgctcgaattacaggcgtgagccagcgggccccgcccagacctgcattttaacctcccctccaccccgcggccccgggaccctgggcatccggaggctcacagcggccctgctgggatgctccaggcagatcactgcacagccctgcaggcagaggggaggccgtgcaggaggaggggaggccgtgcagggggaagggaggccgtgcagggggaggggaggccgtgcagggggaaggggggccgtgcagggggaagggaggccgtgcagggggaagggaggccgtgcaggcagaggggaagacgtgcagggggaggggaggccgtgcaggaggaggggaggccgtgcagggggaagggaggccgtgcaggcggaggggggtacgtgcagggggcagcggaggccgtgcagggggaggggaggccgtgcagggggaaggggggccgtgcagggggaagggaggccgtgcagggggaagggaggccgtgcaggcggaggggggtacgtgcagggggcagcggaggccgtgcagggggaagggaggccgtgcagggggaggggaggccgtgcagggggaaggggggccgtgcagggggaagggaggccgtgcagggggaagggaggccgtgcaggcggaggggaagacgtgcagggggaggggaggccgtgcagggggaggggaggccgtgcagggggaggggaggccgtgcagggggaggggaggccgtgcagggggaagggaggccgtgcagggggaagggaggccgtgcaggcggaggggggtacgtgcagggggcagcggaggccgtgcagggggaggggaggccgtgcagggggaaggggggccgtgcagggggaggggaggccgtgcagggggaggggaggccgtgcagggggaggggaggccgtgcagggggaggggggccgtgcagggggaagggaggccgtgcagggggaggggaggccgtgcagggggagggggggccgtgcaggcggaggggggccgtgcagggggagggggggccgtgcaggcggagcggggggcgtgcagggggaggggaagccgtcctgggccttttccagctggctgcagagaaggggccagctccctcctggggacccggagccgcggtacaggtgtggttgcttctcttggagaaagaggctgagctgacatcccccgggctgataaagaatgggctcctcctcctgggcccagcaggctcccgggaccctccctccctccctccctccctccctccttccgggcagcagggaagatctgagttcatgtagctggtgttggcttagggtctgggaggaaggcttttgggaagatgtaaataagaacaaaatctgcagccacctgggaagcctggcctcagtgtggaagagaaggcagcaggattattacagaaccttgtgaagccaacgcgggcagccgccaggagctgcagaccgagaggatctcgtcctttcttgcggcccaggg

SEQ ID NO: 43340 - DNA, 2300 bp, Homo sapien
ctgtgtctgtgtctcctcttctgtctcttacaaggacacatgtcattgcatttatggcccgccctaatccagaatcgtcgcatctctagatacttcagttatgacaaacaccttattttcaaataaggtcccattgaccagttctgggaattaggatgtggacagatcttttaggaggaccacagttcaatccgctacacttgtatccacttccctctggaggctctagggcagggtccttcctgcctctcccagctcctgggggctccaggcgtcccaggcttgtggcctcgtcactccggtctctgcttcttagaaggacacaggtcgttgccttagggcccaccctaacctagggtgatattttgagaccctacaaagaccatatttccaaatcaggtcccattcccaggttctgggacttcggatgtgaaaggggccccactgagcccgctcacgatgacgtcctgggccgtgtcccgctcggaggcctccgtagtgatctggcctttactttctccccgagtcacgggaagccctcgttgacctcacagggtggacacccggaggcgagatcccgttccgccgagcagagccctttctcatggaacaggacgtgtcggggccgctgctggggaaagcagccgggcccccagatgctggagcgggagcaggccccgggcccccgcagaccctccgcggcaccgcccgcacttgtgcctttcccggcgtggctcaccgcctcaccatctcgggtgtcttttaggagaatccttcatgcagctgcagcagcgtctcctgagagagaaggaggccaagatcaggaaggccttggacaggcttcgcaagaagaggcacctgctccgccggcagcggacgaggcgggagttccccgtgatctccgtggtggggtacaccaactgcggtgagcacgcgcccaggggaggggccttccgcggtctccgtgtcaccggtgaggactcgcccgggggagggcagggggtccctgtcgtctcagtggtgccgtacgacagctgcggtgagcacgtgcccaggagagggggttcccatggtcgccgtgtggggtacaccagctgctgtgagagctcacccaggagacgggtttcctgtggtctctgtgtggggtacagcagccaaggtgaggatgtcatctaccccatcctcccatccagagctttaccaccctgtctataccacaatctcccctccatctacaccatcctcctgtctagaccatccccactgccctatctataccaccaccctgtctacacaatccacccatctacaccatcacctctcctctgtctataccatcctcctgtctacaccagcaccactaccccatctataccaccaccccgtctacataatccacccgtgtacaccacaatgttccctttgtctgcaccgtcctcctgtctacactggcaccactgccccagctataccaccaccccgtctacataatccacccgtgtacaccacaatgtccccttcgtctgcaccgtcctcctgtctacactggcaccactgccccatctataccaccacccgtctatacaatccacccatctgtctacaccatcgcctctcctctgtctacaccatccttctgtcaacaccggcaccactgccgtatctatatccacccatctacaccatcacctcccctgtgtctacaccatcctcccatccacaccagcaccaccaccccacctacaccatcccaccatctacgccattgccaaatctacacagacgacctcactcccatccacgccttcacacgcacacccgtccacaccaccatctcccccgtgtccgcacggcggccccgctccatcggcccgagaacagcgacggtggctttgtcccacgcgtcgggtctggcccggggtgcccgaggagctcagggaccgtgtagcccggggtgcggccccccagagggtgccgtggtctccatttggagggcctggctgcggcgctaggagttgggacgcagggatctctgcagcgccctgacctccacgccctcctaggaaagaccacgctgatcaaggcactgacgggcgatgccgccatccagccacgggaccagctgtttgccacgctggacgtcacggcccacgcgggcacgctgccctcacgcatgaccgtcctgtacgtggacaccatcggcttcctctcccagctgccgcacggcctcatcgagtccttctccgccaccctggaagacgtggcccactcggtgagcgtgggacggccggggatcgggt

SEQ ID NO: 43341 - DNA, 2068 bp, Homo sapien
gatcacgaggtcacgagatcgagaccatcctggccaacacggtgaaaccccgtctgtactaaaaatacaagaaaaaaattagccgggcgtggtggcgggcgcctgaaatcccagctactcaggaggctgaggcaggagaatggcgtgaaccccagaggtggagcttgcagtgagccgagatcacgccactgcactccagcctgggtgacagagcgagactccgtctaaaaaaaaaaaaaaagaagaaaagcaccgtgtgggctctctctccggggcccgttgcccccactgcctgcccccggctccccactaggcaggtcccctcggcccgggacacgcgtcactcacagtgtgtgagctacacgcggagcggggccgcaacagcggctcctcccttcggcccagaggcccagctcagtgcccccttcaccttcacctcgacctctgccgggagggagacagcgtccgcagagaccgagccactcccgttcccacaccaggtcgaacttgaaaagggacgtcgcccacctgtaccgaggagtcggctcgcgctacatcatggggtcaggtaactcgggccgggcgcggcgtcccagagggtcctcggaatgcggttgtcagcggcagccacccttctcagccctggaagattccaacagggtggggtccagctggggtctccgtctcctggtagcatttgaggacataggagaccctcagccctggaagattccaacagggtgggggctggctgggggctccgtctggtagcatttgaggagataggagatgctggtggtttttggaggttttgcctaaatcagtagccacaaactggggatttaaacagcagagatctatgctctcccctcctggacaccaaaactctgagatcaaggtgaggacagggctgcgctccctccaggggctccttctgcctctcccagctcctgggggctccaggcatccctgggtttgtggccgcgtcactccagtctctgcctccgtctccacgtggcctcctcctctgtgtctgtgtctcctcttctgtctcttacaaggacacatgtcattgcatttatggcccgccctaatccagaatcgtcgcatctctagatacttcagttatgacaaacaccttattttcaaataaggtcccattgaccagttctgggaattaggatgtggacagatcttttaggaggaccacagttcaatccgctacacttgtatccacttccctctggaggctctagggcagggtccttcctgcctctcccagctcctgggggctccaggcgtcccaggcttgtggcctcgtcactccggtctctgcttcttagaaggacacaggtcgttgccttagggcccaccctaacctagggtgatattttgagaccctacaaagaccatatttccaaatcaggtcccattcccaggttctgggacttcggatgtgaaaggggccccactgagcccgctcacgatgacgtcctgggccgtgtcccgctcggaggcctccgtagtgatctggcctttactttctccccgagtcacgggaagccctcgttgacctcacagggtggacacccggaggcgagatcccgttccgccgagcagagccctttctcatggaacaggacgtgtcggggccgctgctggggaaagcagccgggcccccagatgctggagcgggagcaggccccgggcccccgcagaccctccgcggcaccgcccgcacttgtgcctttcccggcgtggctcaccgcctcaccatctcgggtgtcttttaggagaatccttcatgcagctgcagcagcgtctcctgagagagaaggaggccaagatcaggaaggccttggacaggcttcgcaagaagaggcacctgctccgccggcagcggacgaggcgggagttccccgtgatctccgtggtggggtacaccaactgcggtgagcacgcgcccaggggaggggccttccgcggtctccgtgtcaccggtgaggactcgcccgggggagggcagggggtccctgtcgtctcagtggtgccgtacgacagctgcggt

SEQ ID NO: 43342 - DNA, 697 bp, Homo sapien
gatcacgaggtcacgagatcgagaccatcctggccaacacggtgaaaccccgtctgtactaaaaatacaagaaaaaaattagccgggcgtggtggcgggcgcctgaaatcccagctactcaggaggctgaggcaggagaatggcgtgaaccccagaggtggagcttgcagtgagccgagatcacgccactgcactccagcctgggtgacagagcgagactccgtctaaaaaaaaaaaaaaagaagaaaagcaccgtgtgggctctctctccggggcccgttgcccccactgcctgcccccggctccccactaggcaggtcccctcggcccgggacacgcgtcactcacagtgtgtgagctacacgcggagcggggccgcaacagcggctcctcccttcggcccagaggcccagctcagtgcccccttcaccttcacctcgacctctgccgggagggagacagcgtccgcagagaccgagccactcccgttcccacaccaggtcgaacttgaaaagggacgtcgcccacctgtaccgaggagtcggctcgcgctacatcatggggtcaggtaactcgggccgggcgcggcgtcccagagggtcctcggaatgcggttgtcagcggcagccacccttctcagccctggaagattccaacagggtggggtccagctggggtctccgtctcctggtagcat

SEQ ID NO: 43343 - DNA, 2300 bp, Homo sapien
aggtctccctcccgcctcccgttgctgaggtctccctcccgcctctccttggtgaggtctccctcccgcctcccgttgctgaggtctcactcccgcgtctccttggtgaggtctccctaccgcctcccgttgctgaggtctcactcccgcgtctccttggtgaggtctccctccccccctcccgttgctgaggtctcactcccgcgtctccttggtgaggtctcactcccgcctcccgttgctgaggtctcactcccgcctcccgttggcgaggtctccctcccgcctcccgttggcgaggtctcactcccgcctcccgttggcgaggtctcactcccgcctcccgttggcgaggtctcactcccgcctcccgttggcgaggtctcactcccgcctcccgttggcgaggtctcactcccgcctcccgttggcgaggtctccctcccgcctcccgttggcgaggtctccctcccgcctcccgttggcgaggtctccctcccgcctcccgttggcgaggtctccctcccgcctcccgttggcgaggtctccctcccgcctcccgttggcgaggtctccctcccgcctcccgttggcgaggtctccctcccgcctcccgttggcgaggtctccctcccgcctcccgttggcgaggtctccctcccgcctcccgttggcgaggtctccctcccgcctcccgttggcgaggtctccctcccgcctcccgttggcgaggtctccctcccgcctcccgttggcgaggtctccctcccgcctcccgttggcgaggtctccctcccgcctcccgttggcgaggtctccctcccgcctcccgttggcgaggtctccctcccgcctcccgttggcgaggtctcactcccgcctctccttggcgaggtctcactcccgcctcccgttgctgaggtctcactcccgcctcccgttgctgaggtctcactcccgcctcccgttggcgaggtctcactcccgcctcccgttggcgaggtctcactcccgcctctccttggcgaggtctccctcccgcctcccgttgctgaggtctccctcccgcctcccgttgctgaggtctccctcccgcctcccgttgctgaggtctccctcccgcctcccgttgctgaggtctccctcccgcctcccgttgctgaggtctccctcccgcctcccgttggcgaggtctcactcccgcctcccgttggcgaggtctcactcccgcctcccgttggcgaggtctcactcccgcctcccgttggcgaggtctcactcccgcctcccgttggcgaggtctcactcccgcctcccgttggcgaggtctcactcccgcctcccgttggcgaggtctcactcccgcctcccgttggcgaggtctcactcccgcctcccgttggcgaggtctccctcccgcctcccgttggcgaggtctccctcccgcctcccgttggcgaggtctccctcccgcctcccgttgctgaggtctccctcccgcctcccgttgctgaggtctccctcccgcctcccgttgctgaggtctcactcccgcctcccgttgctgaggtctcactcccgcctcccgttgctgaggtctcactcccgcctcccgttgctgaggtctcactcccgcctcccgttgctgaggtctcactcccgtctcccgttggtgaacctttggttgaaacgtgtttgtttccgtgatcacactcgaggtctctctctccgtctgaaagctgtacctttgaggcctgaatattctgctctttacaagtcggtcttggagccgcggtcagctttgcgctctgtggatttcatgctggacttggctctgctcgacgggaaagcgtggtgggcccctaggatgggccgtgcaggggcatcggggccccggggctctcccagacccaggcgtcctctcagcttttcggtccccaccgcatccagtctcggctccggggggtggtgacgtcggggccgaggcacggtgcgggctgcccatcaaccgcattcctttccagccctttctaccaagatgatagacaggatcttctcaggagcagtcacacggtacgtacggctcaggcgcctgacggcagccattgcccctgcgaggaccccggtccctctcctcatcgttgcctgacgtgagctttttgtgccccgacagcgagtggttgtcaccccaggccctggcgaggggggcacgtgtctctgtcacgtgaatccctagtgggggggggtggcacaagactgtcacgcgaagtctgaggaagggggtggcccaggccccaggt

SEQ ID NO: 43344 - DNA, 2300 bp, Homo sapien
cctgcggctgccccctctactggaaggggccgctcttctatggcgccggcggggagcgcacgggctccgtgtccgtccacaagttcgtcgccatgtggagaaagtgagtcctgggctgggcagggggctgtgtcgggagggcggaggcgtccccgggtccccgtggtgccaggacgggtgccccctgaggctgccgcagtgagaggagaaacccttgtacgggcacaggcctggccgtcgtgtgtggccacctgccacgcaccacgtggaacaccacacacgtgttccaccctgcgtctgcggggtcgaaagccacccccctgtgagggtggtgcccagtcatcctgtccttccagaatcctccagaactgccacgacgacgcggccaagttcgtccatctgctcatgagccccggctgcaactacctggtgcaggaggactttgtccccttcttgcaggtgagagcctgcgtctacaccacaggccttatccttcacgggagggcccgcgtctacaccgcatgcctcatgggagggccggcgtctacaccacacgcctcatccctcacgggagggtccgcgtctacaccgcacacctcatgggagggcccgcgtctacaccacatgcctcatccctcatgggagggtccgcgtctacaccgcacacctcatcgctcacgggagggtccgcgtctacactgcacacctcacgggagggcccgcgtctacaccacatgcctcatccctcacgggagggccggcgtctacaccatacgcctcatccctcacgggagggccggcgtctacaccgcacacctcatcgctcacgggagggtccgcgtctgcagcgtccacaccgcacacctcacgggagggccggcgtctacaccacgcgcctcgtgtcttcccacccgcaggacgtggtgaacacgcacccggggctgtcgttcctgaaggaggcgtccgagttccactcgcgctacatcaccacggtgggtccccagcggaggggccgtcggttccagcgcggggcgcgggtgtttctgcagcggccgccgcggggcttctgcggacggggcgggcggggcccggggttcctgagcttccggaggaggcggccgcgctctgggagagtctccacccgcccgggagcccggtgttggggggactctggttttccggggtggccgcacccccttcccacctgtcctgggcccgtgtagctccggggcgtccccggccagaccctccccgctttccgcggcctggggcggcgcctcccgcagggcccttccctctgcccccgcctgtgccctggcggccccgtgcggctgagaccaagggcgcgcccctctcccggctcccggtctccgtgcggggcgaggctcctgggggtctctgcgcacccaccgcactgacagcgcccccgcaggtcatccagcggatcttctacgccgtgaaccggtcctggtccggcaggatcacctgcgccgagctgcggaggagctccttcctgcaggtgcggagcggccccctgtcccctgccccctgccttgtccctacccctcctacctccactcccttcccttccctcctcccccctccctcctcccctcccaccccctctcccacccccacccccacccccacctccaccgcgctcccagcccacccccaggcctgtgagcactggaaccccgccgcctgcggttgggggtccacggttgatctaggaggcgggtggggccgtactgggcaccaccctgagggggagccgagccctgactcccccagagctgcccccacccccacacccgcctagggagccacccccatgctggagctccccccaccgcagagttgcccccactcggagtgccccccggccccagctgcccagtcccccccacccacggagcggccccgaccctcccagccttccctgccccgcccgcagccaggcggacttggggcatccccgcagaggccccgcgctcaggccgcctgggtcctttggcagaatgtggcgctgctggaggaggaggcggacatcaaccagctgaccgaattcttctcgtacgagcatttctacgtcatctactgcaagttctgggagctggacacggaccacgacctgctcatcgacgcggacgacctggcgcggcacaatgaccacggtgcgtgggggcacaggggcgggcgggccgcgcggacaccgagcacacccttctctcagggcctgcgggtctgcagctgcctctccttccgcactcccagctctgtgtctgcagctgcctctc

SEQ ID NO: 43345 - DNA, 2300 bp, Homo sapien
gcacacacacacaaacggttgcttcccaattaggaaaaataacttcacagaattcctgcgtgatggcgctcttctgaccaagtacactcggatttttatatccaatcacgaaacacaaactgaaattcaaatcattatgtacacaacacaaaactatcgtttatgagtgatttaaatcgggtgcggtggctcacgcctgtaatcccaacgctttgggaggcagagacagaggcaaaggcaggaagattgcttgaggccaggagtgtgagaccagcaacacctcgtctctataaacaataaaattaaaaatgagccaggcatggtggcgcatgcctgttgtcccagctgcttggaaggctgaggtgggaggatcgcttgagccaggagatcaaggctgcactcagctaagatcgcagcctgggtgacggagcaaaaccctgtctcatacgaacaaaaagagttatttaggccgggcgtggtagctcacgcctgtaatcccagcactttgggaggccgaggcgggtggatcacttgaggtcaggagttcgagaccatcctggctaatacggtgaaaccctgtctctaccaaaaatacaaaaattagccaggcgtggtggcgggcgcctgtaatcccagctactcgggaggctgaggcaggaggatcccttgaacccgggaggcggaggttacagtgagctgagatcttgccatcgcactccagcctgggcgacagagcgagactccaactcaaaaaaaaaataaaactaaaaaaagagttattttttttttttttgagacaaagtctggctctgtcgcccaggctggagtgcaatggtgtgatctcagctcactgcaacctccacctcctgggttcaagcaattctcccgccacagcctcccgagtagctgggactacaggcacacgctactatgcccggctaatttttctatttttagtagagatggtgggggcggtttcactatgctggccaggctggtctcgaactcctgacttcgtgatctgcccgcttcagcctcccaaagtgccgggattacagacttgagccaccgcgcccggccaagggttacttattgagtctggctcgatttatgcagctcagaagtaggagaacctggctcataaaagaccttgaaattactctctaacagggtgcaacaccaggtgaaaccctattttgataaaaaatgaataaaaagcggggcaagatgtaaaggaaacaggtgcatgtgtgccagacagatgataatgcagtgtttttatggatactgttaaaagcagaaacaaaaacgaccattgggtaaagttatttaactaatgtcacctccctggacgtggatgatttttgcaattttcaacgcacttcacgctcatccctgaacaccaacgtttaaaggggtccaactcctccaacctgtctctactgtttgataagcaaagctaaagtaaacggggccctttgggtcccaggtagcccgctgttattgaaaagtttgatcttttcctcgcgcgctcccgtaggacgcacgctcgctcccgagctcggcgggcgcgcaccccgcatgctcgctcgttcccggtgcctcccactgcgcaggcgcactcccgtcctccagccccacccgctcacacacctcccagcctctggcttgcgccccgcgggcagccattgcgcacgctcacccgaccggcctcccgaactccgctcctccaccgctatgcacggcgcatgctccatgcggaggttccaccctctcctcgctctggcaggcacgcattgcgcatgctcgcatttccgcagctctaggactgccacgccgccatgggccgcgcctctaaaaatcctaaacgcagaaagagctcgggcggtacggccgccacagcccctccctcgtcctcaccgcagccgctcggccccaccaaagcctcctgcaaaagctccgagggccgcggggcgcgcgtggctagcggcggcgtcgcctcgtgatgacatcgtcgcgatgacgcgacgcagtgacgtgaacgcgggcgcccttgtttgggagcgcggccggcgcgcccgttttgaagctgccctgagcagcgcgggccggaccgcgccccctcctcggtccccgcgccccgcgagtccgcgcagttcccgaggcgcgggccctgttccctgcgccgcgccccctcagcgggccgtgctcgcatcaccgaggtcggtccggggcggaccgaagcccccggggcggggcggggcgcgggcgtccgggggcgccgcgggcccagcccccgc

SEQ ID NO: 43346 - DNA, 2300 bp, Homo sapien
acagaaagacagagacagagaagagagagaaaagacagagagaagagagaggacagagagaaagagagagagagaaagacagagagagagagagaagacagagagagaaagaaaagagaagagagagagaaagaagacagaaagacagagagagagaagagagaaagagagaggagagaagagagagaggagagagagaagacagacagagaagagagagaaaagagagagagaagagagagaagagagaggacagagagaaagagagagaggagagagagaaagacagagacagaagagagagaaagagagaagacagagagaaagagagagaggagagagagaaagacagagaaagagaagatagagagagagaagacagagagaagacagagagagagagagaaagacagagagagagaagagagagaaagacagagagaagacagagagagagagaaagacagagagaagacagagagagaaagacagagagagagaagatagagagagaagacagagaagacagagagagagagaaagacagagagagagaagagagagaaagacagagagaagacagagagagaaagacagagagaagacagagagagagagaaagagagagagagaagacagagagagaagagagagagaaagagaaagacagagagagagaggacagagatagaaagagagacagagaagacagagagagagagaaagacagagagagaagagagagaaagagagagagagaaagacagagagagaagagagagaaagacagagagcgagagaaagacagagagagaagagagagagaaagacagagagagagaagacagagagagagaaagagagcgagaagagagagagaaagacagagagagagaagacagagagagagaaagagagcgagaagagagagagaaagacagagagagagagaaagagagagaagacagagagagaagagagagagaagacagaaagacacagagagagagaagacagagagagagaaaaagtcagagagagaagacagagagagagaaaaagacagacagagaagacagagagagagaaaaagacagacagagaagacagagagagagaaaaagacagagagaagacagagagaaagagagagaagagagagagaagacagagacagaaagcgagagaaagacagagagagaaagtcagagagaagagagagagagagcaaatgacttattccttaaaacgtacctaattcacatagaaaaagccagattatttgataaagtgggccagtctcagagttccttcctcttcgcagccatcctaagcgcgttcctcgagtttccccccagcaggtgcgttctagaaagcgctggtcaggacgcatggctgccccatagatttcttggggacgggagtgagagacgcctggacgcccaagcgcaagcctccagcctccaaggtcctacaacagatacagcagctactgagtctcctctctggtttcttttccgcccctggggagagaaaagagaaggggagaaacgtcaccaccagcaactgctcccagccagcaagacgcacggcggggaggccggggctggccgcgtcctgcagctcctgagctgcgtgtctgagcttttcccagccccgcctgcgtctccaggggcgaaataagaagcaaatcttgctgggaccgagttcaggtcgaggaactccgggaccctctgcagcctcagccctgccgcgctccccgcagcttcgggcctgttgcggggagttggggaggaattcagggaaggggggaaccaggccgggataagaggctccggcttgctgtgggctgcatgacggggtgcaaaggcgaggagaagcccctgggatcctggctcgtctgctgcgggacccccagccccggcgggcggaccgcggagagcgctgtcccggatccggagattcgcttttcctttgcgactgcggggctggcgcgcgcgcgcgaggggtcagcaccctgggcattggggtcaatgcaaccagggcaggtccctggggggcccccaggagccaataggggtcttcgagtcaccctgcggccgcctgcttttgcccgggtcctgagaacaggggctccccacactttttttttttttggttttgttttatttcgtttccgcgcgtctctttctactgcaaacagaaatgggagggtggacaggcgggtaggagcggatcagacgcccaggacgcagcagcccgagtccgcacagggtttgcgggaggtggtgaccgcgctg

SEQ ID NO: 43347 - DNA, 2300 bp, Homo sapien
cattttctggttgacaattggttgagtttgtagctcctcctccttctcttcttcctcctccttctccccccttcctcctcttcctcctcttcctcctcctccttcttcttctcttctttcttcttcttctctttccccttcttcttcttcttcctcctccttctcctcctcctttttcttcttcttccttatgggcttggatagaagtatattgacatggatccaccatttgtagaatcataccgagtagcttcttttctcctccttcctctccttctcctcctcctcctcctccttctcctgctccttctcctcctcctcctcctgctccttctcctcctcctcctccttctcctcctcctcctcctgcttctcctcctcctccttctcctcctcctgcttctcctcctcctccttctcctcctcctccttctcctcctcctccttctcctcctcctcattctcctcctgctccccttctcctcctccttctcctcctcctccttctcctcctgctccccttctcctcctccttctcctcctcctcctcctcctgctcctcctcctccagctccccttctcctcctactcctccttctcctccttctccttctcctccttctcctactcctccttctcctactcctccttctcctactcctccttctcctcttccttcttctcctcctcctgctccttctcctcctcttcctcctactcctccttctcttccttctcctcctcctccttctcctcctcctccttctcctcttcctccttctcctcctcctccttctcctcctcctccctctcctcctcctccgccttctcctactcctccttctcctcctccttcttctcctcctcctgctccttctcctcctcctccttctcctcctgctccttctcctcctcttcctcctactcctccttctcttccttctcctcctcctccttctcctcctcctgcacctttcctcctcctccttctttttccttttttgcataaagaagtatcaaataagagtagtttcactgccctaaacatcctctgaggtccatgtattcatccctccatctgcccaacgccaaccaactccggatctttttactgtttccatgattttgtcttttccacagtgtccaagtgttagaatgactcagtctgcagccatctcaaagtggattctttcccttagtcataagtatttaaacttcattcatgtcgttttatgtactcaccctttttttcttcctcttcttttttttttttttttcactttccttttatagctgttgcaaaagtcaagattttttaaaaaatataaaagagcagggccgggcacggtggctcacgcctgtaatcccagcactttgggaggccgaggcaggtggatcacgaggtcaggagatggagaccatcctggctaacacggtgaaagcctgtttctactaaaaaaaaaaaaaaaaaaaaaaaattagctgggtgtggtggcaggcgcctgtagtcccagctacttgggaagctgaggcaggagaatggtgtgaacctgggatgtggaggttgcagtgagccgagatcgcgccactgcactccagcctgggtgacagagcgtgactttgtctcaaaaaagaaaaaaaaagtacaaaagagcaaaacaaaacaaaagttatgaaaatgaaaacctgagccatcgtttatcttatttccccaaatccactaattattaacagaaagtaaaagctatgaaaaatgaatgaaagtgactgcaatttccttgaagtgtgttagaacctgcctttagtgtcagctatgggttccctcatgaaggtcagctgagccatgacccatgaaccatggaagcttgactctagattgaccatcttgagatgccaaagatgtccacgtcctaatcccatgtgggagacagaataatggccctgcagaccttcccagctggccatgacccctcatttgaccaggtcagcggctgaccaccatcctgggtttgtttccccaaatcacctccctggggtcccctgccaggaatgtcctgggagaggcaaccttctcactgtgtgatattttctctcctgcagctcttcccttctctctgaccagcaccatgcttctcctggtgacaagccttctgctctgtgagttaccacacccagcattcctcctgatcccagagaaatcgggtaagtatggaaacctggctgaaccttctccgcggcccctgtttagatgtcctgcatctggagacccatctggatacctgggtccatctgcatttcat

SEQ ID NO: 43348 - DNA, 2300 bp, Homo sapien
gcatctgtatttgtgtgtgtgcaagtgtctgtgcaggtgtgtgtacaccaatatgcttgtgcagaggcgtgtgcagatgtgtgtgtagttgtgtgtatggataggtgcactgtgtgcaggtgtgtggggatgtgtgtgtgcaggtctgtgtgtgcagacatgcacgtgtatgcaggtgtgtgtgtgtgtacagatgtgtgtgcaggtgtgtgtgcagatgtgtgtgtagttgtgtgtatgcacatgtgcattgtgtgcaggtgtgtggggatgtgtgtgtgcaggtctgtgtgtgcagacatgcatgtgtatggaggtgtgtgtacagacgtgcgtgtaggtgtgtgtgcatgtgtgtgtgtgcagatgtgtgtatgcacatgtgcactgtgtgcaggtgtgtgaggatgtgtgtgtgcaggtctgtgtgtgcagacatgcgtgtgtgtgcaggtctgtgtgtgcagacatgcatgtgtatgcaggtgtgtgtgtgtacagatgtgtgtgcaggtgtgtgtttgcagatgtgtgtgcagatgtgcatgtgtccttgtgtatatgcacatgtgcactgtgtgcaggtgtgtgtgtgtacagatatgtgtgcaggtgtgtgtgcagatgtgcttgtgtacagatgtgtgtgtgtagttctatgtacgcccatgtgcactgtgtgcaggtgtgtggggatgtgtgtgtgcaggtctgtgtgtgcagttgtgtgtgcagacatgcatgtgtgtgcaggtgtgtgtgcaggtgtgcgtgtgtagacaagtgtgtgtgtgccattgtgcttgtttgtgcagacgtacgtgcaggtgtgtgtgcagatgtgtgtgtgtagctgtgtgtacacacatgtgccctgtgtgcaggtgtgtggggatgtgtgcgcacgtctgtgtgtgcagacatgcatgtgcctgcaggaaagtggggatgtgtgagtgtgcaggtctgtgtgtgcagatgtgtttgcagacgtatgtgtgtgcaggtgtgtgtgcaggactgtgccagtgtgcttgtttgtgcagatgtgtgtgcagatgtgtgtgtagctgtgtgtacgcccgtgtgcactgtgtgcaggtgtgtggggatgtgtgtgcagttgtgtgtgcagacatgcatgtgtgtgcaggtgtgtgcgcagatgtgtgtgtagttgtgtgtatgcacatgtgcattgtgtgcaggtgtgtggggatgtgtgtgcaggtctgtgtgtgcagatgtgtgtgcaaacatgcatgtgtgtgcaggtgtgtgtgcagatgtgcgtgtgtagacaagtgtgtgtgccattgtgcttgtttgtgcagacgtacgtgcaggtgtgtgtgcagatgtgtgtgtgtagctgtgtgtacacacatgtgccctgtgtgcaggtgtgtggggatgtgtgcgcacgtctgtgtgtgcagacatgcatgtgcctgcaggaaagtggggatgtgtgagtgtgcaggtctgtgtgtgcagatgtgtgtgcagacatgtatgtgtgtgcaggtgtgtgtgcaggactgtgccagtgtgcttgtttgtgcagatgtgtgtgcagatatgtgtgtagctgtgtgtatgcccatgtgcactgtgtgcaggtgtgtggggatgtgtgtgtgcaggtctgtgtgtgcagttgtgtgtgcagacatgcatatgtgtgcaggtgtgtgtgcagatgtgtgtgtagctgtgtgtacgcccgtgcgcactgtgtgcaggtgtgtggagatgtgtgtgtgtgcaggtctgtgtgtgcaggtgtgtgtgcaaacatgcacacgcgtgcaagcatgtgtgcaggagtgtgtgtgcacgtgtgtgcgggcgtgtgggaatgtgtgcgtgtgcaggtctgtgtgtgcagatgtgtgtgcagacatacatgtgtgtgcaggtgtgtgtgtgtagatgtgtgtgggactcacacttgagctgttccacgggccagtctttggagacgaggtcaggagccaatgaactcacggagcaattacaggtttcccaatcctatgaaatgaggaagcaggggagggaggggcagggagtgtatgatgacacagaggaactctgaagggagctactcagaagcgggagtctccgagagaagaaaagcaggtggaaggagaggaagcggatgccgtgggggtaagctaagttctttccttctgtggtctttgagcatgtcgagtcacccgggtacatgtttctgctgtgtctgtcgatagaaaagaaagagactgaactggaacataagatttcaaacgttggctcga

SEQ ID NO: 43349 - DNA, 2300 bp, Homo sapien
tagagcaagactccatctcagaaaaaaaaaaaaaaaaaaaaaaaaaaagatatcttagtggtcaggtgcggtggctcacgcctgtcatcccaccactttgggaggccaacgagggtggatcacctgaggtcaggagttcgaggccatctggccaacatggtgaaaccccgtctctagtaaaaatttaaaaattagccgggcgtggtggcaggtgcccgtaatcccagctacttgggaggccgaggcaggagaatcgcttgaacctggggcagaggttgcaggcagccgagatcgcaccattgcactccagcctggatgacagagcaagcaaagcgagactccgtctcaaagaaaaaaaaaaaaaaaacaggagccgggctgcaaggtggaggctctggggaagggctgaggttggggtggaatttgggaagggtgccgagaaccagagaagagttgatacattcagagggaagggaagggctgtctgggagtgcgcgtgctgagtaaacagaaataacagatttcagcgttggaaagagaagcccgggacaggttggtgagtgccccattcagggctggactttactaagggtttttgtttgtttgttttctgttgagacagagtttgctcttgtcaccaggctggagtgcagtggtgtgatctcggctcactgtaacctccgcctgccgggtttaagtgattctcctgcctcagccttgggagaagctgggattacaggcacctgccaccacgcctggctaatttttaaatttttactagagacggggtttcaccatgttgtccaggctgatcttgaactcctgccctcaggtgatctacccgcctcagcctcccaaagtgctgggatgacaggtgcgagccaccgcgcctgaccactaagatttttttttttttttttgagacggagtctcgttctatttcccaggctggagtgcagtggcgccatcctggctcactgtaacctccatctcccaggttcaaatgattctcctgcctcagcctccggagaagctgggattataggcacccaccaccacgcctggctaacttttttctttttactagagacggggtttcaccatgttggtcagaatggtctcgaactcctgacctcagggtgatccaccctcctcggcctcccaaagtgctgggatgacaggtgtgaaccaccgcacctgaccactaagatatctttttttttttttttttgagacggagtcttgctctatcacccaggctggagggcactggcgccatcctggctcactgtaacctctctcccaggttcaaactattctcctgcctcagcctccagagaagctgggattacaggcacctgccaccacgcctggctaatttttaaatttttactagagacgggcttccaccatgttggccagatggtctcaaactcctgacctcaggtgatccgccctcatcggcctcccaaagtgctgggatgacaggtgtgagccaccacccctgaccactaagatatcttttttttttttttgagaccgagtcttgctctgtcgcccaggctggagtgcagtggcgcgatctcggttcactgtaacctcctccgcctcccaggttcaagcgattctcctgtctcagcctcccgagtagctgggattacaggtgctcaccaccacgctgggctaatttttgtatttttaatagagacggggtttcaccatgttggccaggctggtctcaatctcttgacctcaagtgatctgcccgcctcggcctcccaaagtgctgggatgacaggcgtgagccaccgcacccggccactaacatatctttaataagatctgtcatctgagaccgggggccacctccctgtctgggtgctgtttcccacgagacggggaggaaacacaggcaggagcccctggacaccagcattcacgcctccaaggctgaatttactatgtcaggaagttgcccaaccctgcctgtatagccagcaagaattctaattatagcaaacagaaacacttgcagaaaaaaaaaaaaatgagaacgggaacatgataattttcaaagaaagagtctttctttcaaggaaagtcaggttcatggttacgaagctgctgaccccaggatcccagcccgtgggagagaagggggtctctgacagcccccacccctccccactgccagatccttattgggtctgagtttcaggggtggggccccagctggaggttataaaacagctcaatcggggagtacaaccttcggtttctcttcggggaaagctgctttc

SEQ ID NO: 43350 - DNA, 2300 bp, Homo sapien
gggaggagagaggaaagaggcagggaggtaggatagaaaaagacggaggagagaagaaaaaagaaaaggaggcgggacgcagtggcgcacgactgtaatccagcactttgggaggccgaggtgggcggatcacctgaggtcaggagttcaagaccagcctggccaacatggtgaaacgccatctgtccttaaaaaaaaaaatagccgggtggggtggctggcacctgtaatcccagctacttgggaagttgaggcacaagaatctctagaacctgagaggcagaggttgcagtgagctgagatcacgccactgcactccagcctcggtgacagaacaagtctccatctcaaaaaaaaaaaaggaaaacagggagaaagggagaaacagagaggaaggaaagaacaagacaggaaagaataaaaggaagaagaaaaagagaggcaaagggagagaggaaaaatgaaaaaaaaattaaaaaatggaaaagagacagctaggcgtggtggctcacacacctgtcatcccagcactttgggaagccgaagtgggcggatcccctgaagtccggagttcgagaccagcctgaccaacatggcgaaaccccgtctctactaaaaatataaaattagctgggcgcggtggcgcatgcctgtcattccagctacttgggaggctgaggcaggagaatcgcttgaacccgggaggcggagcttgcactccagcttgggcaacaagagcgaaactctgtctcaaaagaaaaaaaaaacggaaaagagagaggggagaaagggacgagaggaagggagacaggaaataaagaggaaaaggaaaagagagggaaggagggaaaggcagaaaagggaggaagggaaggaaagaggaaaagggaaggagagacggaaagagggagaaaaaagagggagggagcaaagaaaaaacagaggaagggcggagggagaaaagcagaaaaaggaaggaaaaaaatgaaaaagagggaagaaacgtagcaagaaaggaaggagaaagggagagagaaatgaaagaaaaagggagggagggaaacgaaggcagagacggaaagacggagaaaaaggagggaggcgggaaagcagcaaaaagcaaaggcaagcagggaaggaagagacggggagaaaagggcgggcgggagagagccgggaagggagaggaggcgggaggagggaggagggaggcgggagggagggaggagggaggcgggagggagggagggagggagggaggaagggcggagtgggaggtcgcgaaggaggaccccggccgcagcccccgccgggcagacacgggcacagacacggggaaataggggagcccgggcgggtgggcgcggcccacggaacccccagccccggcgcggagggcaccgcggggtcaaagaacggaggcccagagagatcccccccccaccaacctaggccgggcgcggagggcggcgcggagtcacggatcggcagcgggactgagccgcgcccacgtggaagccgccgcaggcttcgcgcggggccccccgggtgcacgcgggcaggggccggggtctcccgacgcacgaccccggagagtgttgaaagggtcggagctgcccggaggtcaagggtcaagggtcgggggtcggggcaccacatgtcgcacatcccggcggggtcgccgcggcctccgggagaaagcggacgacgcactcggagcgaactgggcatcagggtgggcttctgactccgcagctgccctcccgcccgctcgggtactggcagcggcctgaccttcacaaggtcaaggctgccgcggaacccccagcggcccctacggcgcatgggcggggcctggctcccggcatacctaggggtgcggggcgggacgtctccggggagcgcagccaatgggcgcggttcgctggagtgcggggcgggacgcagcgggattcccggcagccctcagaggcgaggcacgcaggctggtgtggggcggggcctggcggcgcagccaatgagcgcggcgcgaggaggcgcgggggcggagagtgggcgtggcgtcggcgtcttagcggctgcgcggtggctgctccgtcctttcggtccaggcggcggcagggctgagccagcgacgccctccattcactctccgcgcccgttctccggctgtcctcccgttccgctgcccgccctgccaccatgacggaacaggccatctccttcgccaaagacttcttggccggaggcatcgccgccgccatctccaagacggccgtggctccgatcgagcgggtcaa

SEQ ID NO: 43351 - DNA, 2300 bp, Homo sapien
aattaggcgggcatggtggtgggtgcctgtaatcccagctactcaggaggctgagacaggataactacttgatcccgggaggtggaggttgtagtgagccaagatcgtgccattgcactccagcctgggcaacagagtgagattctgtctcaaaaaagaaaaaaacagaccaaaaaaaaaacggagtctgtccagaattatacacagtcacctgtgccaggtaacaacccttcagtcaacaacggccttcctagacagcggaggtcccaggagatggtaatacagtagttttcgtgtgcctttatttgtagacacacaaatccctaccattgtattacagcagcctgcagcactgggcacactcacctgctgtccaggtttgtagcccgggagcctggggccctgccgcacagcccaggtgagtagcaggctgtatgtgccacggcggtatgtgtgagtgcaccccgtgatgggcacacaaagagaattgcctaaggatgcatttcccgaaacaggtccctgtcattcagtgacacacgtgactgtgtgtgtgtgtgtgtgtgtgtgcgcacagatgggtgtgtatgtgtatgtatacacacctgaacactcacacctctacacacgtgcctgtacacggatagaacacataatttacagaatttatggaacacataatttatattacataaaatatatagagatcagttttgttttcttttatttatttatttagacggagtctcactctgtcgcccaggctggagtgcagtggcacaatctcggctcactgcaacctccacctactgggttcaagccatcctcctgtctcagcctcccccctgtagctgggattataggctcctgccactatgcccggctagtgtttgtattttgtgtagagacaggatttcactctgttggccaggctggtctcgaattcctgaccacaggtgatccgcccacctcagcctcccaaagtgctgggatgacaggcgtgagccactgcacccagcctatttcagctgttttcttaaagcacaaagcaacctacacattcttttgtgataccaggccactgtaagggtggagcagcatgtgactttggtgttattgagatcatccgtgaccattgcagaaaaccactcccatctgtgcagtgagcaccttgaaataggccgcccaggaggcagagggtgcaccttgaaattgggctaggaggcggagcttgcgccttgaaataggccgcccgggaggcggggcttgcaccttgaaataggccgcccagaaggcggggttgcaccttgaaataggccacccaggaggcggggcttgccccttgaaataggccgcccaggaggcggggttgcaccttgaaataggctgcctgggaggcagagctcgcaccttgatataggccgcccaggaggcagggcttgccccttgaaataggccgcccgggaggtggggttgcaccttgaaacaggccgcctgggaggcggagcttgcaccttgtaataggccgcccgggaggcggggcttgcaccttgaaataggcctagaaggtggggcttccaccttgaaataggccgcccaggaggcggagtttgcaccttgaaatagactgcccaggaggcggaggttgcagtgagccgagattgcattattgtactccagtctgggtaagaagagctaaactccagagtctgtctcagaaaaaggaaaacagctgaaatataggagactgacgcccagcccaggaacaggtaagctgggtgcacgcgccgtgaaaacagcacctaggcctgctccggttctcgctttgcagatgcctcctgaacctcagtgcctcctaaggtcaaggctgtgagttaaagggctccaccccagcccagccccaggttggcccagccattccctggtggaggggccagggaggaaagggggctgtgtgggcaccagagggtgaactgaggtctgagggtcgggacacaggccgggaacagcagctgggagcggagcacgggggaaacgtggatgcgctgagctccctacaaccgcagtgagcatgtgcccaggagggcctcacggggtgggtgtgagtctggcctgcctgggctcggggtggggggtgtttacagacgcatttcagccccgcagcaggggctggggaggtcccgctcgtgacagtctctgcaccaaggcaggagagatggaagccgcccagagaactgccactccatagcctgtgggcatccaggggtgagcggcagcgatggcgccccatggaggaaacacac

SEQ ID NO: 43352 - DNA, 2300 bp, Homo sapien
actcaggaggctgaggcaggagaatcgcttgaacctgggaggcggaggttgcagtgagccgagattgcaccattgcactccagcctgggcgacacagtgagactcggtctcaaaaaacaaagaaagaaacaaacagaaaagaaagaaacaaacaaacaaaaaccttcacctgcatggagtttatgttatatgcagtacagtttataaacttatgattccttctatcgcttcaaaacgaagaaagttacttctccaaaattctgaaatgtgaatctatgtgctttttaaaattttttttcaaaaactcacaatattgaaaatcagacatcacatggtttagatgcttttttcctctcttttatttggctcttctgtgacttctctgactacagtttttcgttttctccgtaatgtgttggacaccctcggatgtcattccacagttaacaaaattaactgtaggattccattttctgcatctacacatcactggcataggctctgggtatattattatttttgacattttattttaaaatcttttgagtcacaaaggctggggaaacagtgcccggagtctccacgccacgctgggtttatgtggagcaggtgcggctgggctctggggtttaagaaaaatcctcgcacagctcacgcgcgccccctgcagcctgcggcgcgcaagggacccgctgccctggaggtgggctccgtttagggagggaaggcacagccgggcgtcccccacctcacagcgcccgccctggtcccatccctgcgcccccagcaccgcgcccccagggggtccccacgccgcgcccatcaccacgcccgcgcggatccccagtgtccacgcccctcccacaaggacccccaccttctccacgcccctcccaccaggcacgcggggaccccccccccacccatctccccgcccttcccacccggcccgcggggacccccatatccatacccctccgagcattctcgcggggaccctcatctccaaacccctcccaccatccccgcggggatccccatctccacgcccctcccaccaggcccgtggacacccccatctccacgcccctcccaccaggcccgtggacacccccatctccacgcccctcccaccaggcccgtggacacccccatctccacgcccctcccaccaggcccgtggacacccccatctccacgcccctcccaccaggcccgtggacacccccatctccacgcccctcccaccaggcccgtggacacccccatctccactcccctcccaccaggcacgaggacatccccatccccacgccactcgcaccgggtccgcggggaaccccctatctctaccttccccgacgcggctcccacaagacccccatctctgcgccgggcccctccacgtgcgggtaagaaccccccacccccacaactgcccacaaccgcagctgcggaaacccagcatttccactccccacgccgcgcctgcaaggaaccccaagtatccacgccagcctttcctccccgggaccccgcagctgcctgcgccattgcaggtcttggcgccgcaggcggggtggggaggggcggggcgagcgccgggggcggggacggggcccgggaggcggagctgggggcggtgcttcaccaagcggccggggcggtgcccgggggggaggcgggcgggggtgtggcctgggcgtggcctcacggggagctcaatggcggcgtggcatgggcgtggcctggcggagagggcaaggaggtgtggcctgggcgtggcctggcggagcggtcaatggcggcgtgacatgggcgtggcctggcggagagggcaatggaggtgtggcctgggcgtggcctgacggagagggcaatggaggcgtggtctgggcgtggtctcaggggagatcaatggggcgtgacatgggcgtggcctggtggagagggcaatggaggtgtggcctgggcgaggcctgacggagtgttcaatggaggcgtggcctgggcgcggtctcgcggggaggccactgaaggcgcggactgggcgtggcctcgcggaggcgggcgggggcgtggcctcgcggaggcgggactctggccgcctgttttttttgcagccgcgctgcgcgcaccgcgggctccgggctcagaagtgcggacgcccggctcccggcgtggacgccatggtgctgtgcccggtgattgggaagctgctgcacaagcgcgtggtgctggccagcgcctccccacgccgtcaggagatcctcagcaacgcggtacggcctgggcctggg

SEQ ID NO: 43353 - DNA, 2300 bp, Homo sapien
attttctttatccgatgcatggtggataagcacctgggttgactctgtgtctttgctatggtgaatagtgctgtgatgaactgtgagtgtggatgtccttttacagaacgatttccttaataaggtgttttcaaacagaaacacacataatataaagctacttattgatctgttgaagaaaacactgtgaccaggggcctgaaggattcttttgattttttttttttttttttttgagacagggtctctctctgttgcccaggctggagtgcagtggcatgatctcggctctctgcaacctctgcctctctggttcaagtcattctcttgcctcagcctccccagtagctggaactacaggcccccaccatcacacccagctaatttttgtatttttagtagagacagggtttcgccatgttggccaggctagtcttgaactgctgatctcaagtgatccacccgccttggcctcccaaagtgctgggattataggcgtgagccaccaggcctggcctttttttttttttttttttgagacagtctcactctgtcacccaggctggggtacaatggcccaatctgggctcactgccacctccacctcctaggttcacatgcttctcctgcctcagcctccccagtagctgggattacaggcgtccaccaccacgcctagctaatttttgtatttttaagggacaggtttcgctatgttggccaggctggtctcgaactcctgacctcaagtgatccggcccaccttggcacctcaaagtgctgggaatacaggtgtgagccaccaggcctcgactttttttttttttttgagacagtctcactctgttacccaggctggagtgcaatggcctgatcttggctcactgcaacctccagctcccgggttcaagtgattctcctgcctcagcctccccagtagctaggattacaggcatccaccaccatgcccagctaatttttgtatttttagtagggacgggatttcgctatgttggccaggctggtctcgaactcctgacctcaagtgatccacccgccttggcctcccaaagtgctgggattataggcgtgagccagcaggcctggtctttttgtttgtttgtttgttttttgggacagtctcactgtcacccagactggagtgcaatggcctgatcttggctcactgcaacctccacctcccaggttcaagtgattctcctgcctcagcctccccagtagctgggactacaggtgtccaccaccacacccagctaatttttgtgtttttagtagggacgggatttcgccatgttggccaggctggtctcaaactcctgacctgaagtgatccacccgccttggcctcccaaagtgctgggactacaggcgtgagccaccacacccagcctggcttgagggattgattctaccatgtcttttccctgagcagtggttcaatattcattcattctttctcagtgacagatccttccctctcaacctcctcccacgagtgacaagaaccaaccgttgctcctcacaagcaaggataccagagctcggaaacctggttctcattcctgaaactggccgatcccccatgggatgttgaggatatgagcctgcagcgcccgtgaccaactgtgagagccggaatgatcagtgcccaaggtctgttcgcttgtcacagtctggctgtgtaccaagagatgtcgcaatgagcacagctttagagtctaaaaggaaacgtgttctgttctttctttgttttgttttgttatttcagaagaaacaggaatcggttctggagcatgccacggctcttcactgctggttacaaaatttagaaaaatcattctccctcttttcctcactctcagggttctcttaagagtagggccccctgcgagccagtgatagggaggtgggcggttaacggtgctgcccagagacacagcgacgttactccagtgggctcagccctgcacatgagtgttcagacagttacagaggaaatgtcacaacacacttcctttccacctaagcctgagtcgcaaccgtggtggtgcgctgggaggtggagtttgcagaatttgcattcggagacagtcgtgccagccggtgggccacccagcgaagcggccgcctttgcaaggttgctggacagatggaactggaagggcagccgtctgccgcccacgaacaccttctcaagcactttgagtgaccacggcttgcaagctggtggctggccccccgagtcccgggctctgaggcacggccgtcgacttaagcgt

SEQ ID NO: 43354 - DNA, 2300 bp, Homo sapien
tgacctcaggtgatccacccgcctcggcttcccaaagtgctgggattacaggcatgagccactgtacccggcctaaatcacagacttttatgtctcacggttctggaggctgagagtccaagatcaatgagtgggaggttcagtgtctagtgaggacccgcttgctggttcacaggtggttccttctggctgtgtcctcacatggtggaaggggtgagagagctctctggggcctgtcttctaagagcacaaatcccactcatgacctaaccacctcctaaaagcaccacctctaatactcttgcagtgggaactgagtttgaacttgagttttggaaggacagaaacatggaaggcatagcaaccctcttacacagcccggcccctctgaagcctgcctgggttcacagaatgttccgtcttcctcaggcccctggtgtgttggctttctcctttgttgatagctgatgttgagcaatgcaagatttctgttctgattatctgaccctggatatccagtttggggacttgtgacatatttgggacgtcagaagcacgtacctctcacatagagcatggcatacttaataaacaataaattataataaaaaatgaataatgcattataaattatcattacttatttatttatttattggagacagagtctcgctctgttgcccaggatggagtgcagtggcgccatcttcgctcactgcaacctctgcctcctgggttcaagtgattctcgggcctgcctcagcctcctgagtagctgggactataggcaaccacctccacacccggctagttttttgtctttttagtagagacggggtttcaccatgctggccaggctggtcttttttttgttttgttttgacatggagtctcgctctgtcaaccaggctggagtgcagtggcacggtctcactgcaagccccacctcccaggttcacgccattctcctgccacagcctcccgagtagctggtagctgggactacaggtgcccaccaccacgcccggctgattattttttgtattttagtaaagacggggtttcatcgtgttagccaggatggtctcgatctcctgacctcatcatccgcacatctcggcctcccaaagtgctgggattacaggcatgagccaccgggcccggccccaggctggtcttgaactcctgaccttgtgatctgcccgccttggccctccaaagtgctggcattacagacgtgagccaccgcacctggcctcatttattattttgtaatcacattataaattgtcatttattatttcataattacattataaatgatcatttcagaattacattatatattttcatttatttcataattacactatagattatcatttattattccaaaattacattataaattatgattatattatacaatagcatttgcttcataattacattagattatcatttatttttaaattacattatatttatttcataattacattataaattatcttataattagaaatgatcatttatttcataattgcaatataaattattattaatttcataataccattgtaagttatcatttattatttcataattacattatgtaatggtatgcgttaataattattaatatacaattaataattattaaccattcaattaatagttaattaactagcaatttatatgtaattctataattacgtcatagaatatgatatctaatttatacataaattatattattcaagtatattacccataatttgcaagtatagtatagaatcccgttataggatcctattacattttagaattttgttatatatatttgactctacaattggaatttagaccccacaccggcccccctcctgtttggcttaagggctatgaccacagaccctggcccaagtacctcccctggttacccgcaggcaggtggcaccatgggggcggggcggactcgcgcacgcgcagtgcaaaaggtcgggctcccggaagtccctcctcccgggggcggagccagggcaagaaggagaaacccggtgctgccgcgcggcctcttccgcgagcccgcgcgccggaagtggaaatgcgtcatagagggcgggcggcgacggcggtggcggcgtcggaggcgcctccgggggacggtggcggctcccggcggtgaggccgcgcctgtccggggatcgtcgagggacggcgggagcttgggccagcggcggcggcggcctgggacgcaggcggagccccgcgcaggtgagtgccgcccccgtgcctcc

SEQ ID NO: 43355 - DNA, 2300 bp, Homo sapien
gtccagaaagtgcctgctggcttggcccctcctcattggcgggggaggtggggggtgctggtgctgactgtctgcgtcttatgtttcaggcccaaggtcccggaggctatggcagcggctaccatcgtgcacgacacgtctgaggccgtggagctctgccctgcttacggcttgtacctgaagcccatcaccaagatgaccatcagcgtggcactcccgcagctgaagcagccggggaagtccatctccaactgggaggtgatggagaggctgaagggcatggtgcagaaccaccagttctccacgctgcgtatttccaagagcaccatggacttcatccgcttcgagggggaggtggagaacaagagcctggtcaagtcttttctggcctgcctggacggcaagaccatcaagctcagcggcttctccgacatcctgaaggtgcgcgcggccgagttcaagatcgacttccccacccgccacgactgggactccttcttccgcgacgccaaggacatgaacgagaccctgccgggggagcggccggacaccatccacctggaggggctgccctgcaagtggttcgccctgaaggagtcgggctccgagaagcccagcgaggacgtcctggtcaaggtgtttgagaagttcggggagatccggaatgtggacatccccatgctggacccctaccgggaggagatgacgggccgcaacttccacaccttcagtttcggggggcacttgaacttcgaggcctatgtgcagtaccgcgagtacatgggcttcatccaggccatgagcgccctgcgcgggatgaaactcatgtacaagggcgaggacggcaaggccgtggcctgcaacatcaaggtgagtcctgggcaccgagagagccacgcgcttcctccctctggcgacttccttccagcagggtcagcagaacgctcccagccacacccctgaggctgtggggacctcccctaagtaaaatggcagcaacagtcctgtgcctgtccaatttcagaggcacaggcgtgaggtggagtaggggtcccgtgctgtggttttggaaatttggtatcttaaggaagatgtgggggagacacaggtcatatagtaggtgagggatggagcctcaggaactctgacagggatttgaaccgtgtcagaaccaagagaacccggccttcccagaatgcaccttgaaaccagggctgaacgttccctttagcctcatgtgcttttttattttttttattttttttatttttatttttttttcgaggcagagtctcgatctgtttcctggactggagtgcagtggcgcaatctttgctcagtgcatcctccgcctcctgggttcgagcgattcttctgcctcagcctcccgagtagctgggactacaggcgcgtgccatcacacctggctaatttttgtatttttagtagaaacagggttttgccgtattggccaggctggtctcgaactcctgacctcatgaactgcctgcctcgccctcccaaagtgctgggattacaggcgtgagccactgcgctcagcctagcctcgtgttttgaccgtgttggcttcacagtgacaaatgagccagcctcctggagggggttttgtggccttaagatgtgccctgtgggtgtgggcaggcggcctgctcagtgactgtggccacagggaatggtggagccgggtagcggaaggggagctgtgtctcgcagcggtggcgtgtcacttgtgttcagtaagtggcgagggctagttggtgttcctcgctgagtcgtaactccgtgggatgagctaagtcttgagccactgatggtgacttgaagggattggtttggcttctgggctccactgtctgggtctgcaccggacatgagtggtgagcggtgagcggtgagcgggcgctcaggctctgaggccactcggccctacggcccaggagagggcgcctggccgtgtgtctggggggttttgggggaaggccatctgacactgtttttgcttttaaaggtttcttttgattcgaccaaacacctgagtgatgcctcaattaagaagcggcagctggagaggcagaagcttcaggaactggagcagcaaagagaagaacaaaagcgcagagagaaggaagcggaggagaggcagcgagcggaggaaaggtaccttctgcgggagcgggccctcggcgctggtgtccggcacctgggagtgtgcgcagacccgtgtgcgtgtgtctgcatgtattcctgtgcgtgtgtgtgtgcatgcatgcttgtgagct

SEQ ID NO: 43356 - DNA, 2300 bp, Homo sapien
ccttcctccctcccttccttctttctttctttctgtatctctctctctctttctttcctttctttctttccatttctgtctctctctcttctttcttttctcttctttctttctttctttctttctctctctctctctctcctctcctctttctctctctctgtttctctctttctttctttctttttgatacagacctcactgtgttgcccaggctggagtgcaatggcccaatctcggctcactgcaatctctcccttccaggttcaagtgattctcctgcctcagcctcccaagtagctgggatgacaggcacctgccaccatgcccggctaatttttgtatttttagtagagacggggtttcaccatgttgaccaggctgatcttgaactcctgacctcaagtgatcctcgcacctcagcctcccaaagtgctgggattacagacatgagccaccttacctggctaatttttatatttttagtagagtcggggttacaccgtgttagccaggctggtctcgatctcctgacctcatgtgatctgccccacattgctgggatgacaggctgtgtttatatttttcccctagaaaatcactctggaggctgggagtggtggcttacgcctgtcatcccagcaatttgggaggccgaggtaggcggatcagctgagatcaggagttcaacaccagcctgaccaacatggagaaaccccgtatctactaaaaatacaaaattagccgggcgtggtggtgggtgcctgtaatctcaactactgggagcctgagacagaagaatcacttgaacctgggaggcagaggttgcggcgagacatgcatcctcagaaatggggtagagacctggcacggtcacttttttttttttttgagacagattctcgctctgtcgcccaggctggagtgcagtggcgcgatcttggctcactgcaacctcagcctcccgggttcacacccattctcttgcctcagcctcccaagtagctgggactacaggcacccgccaccacgcccagctaattttttgtatttttagtagagactgggtttcactgtgttagccaggatggtctcgatctcctgaccttgtgatccgcctgccccggcctcccaaagtgctgggatgacaggctaccacgcccagccctggcacggtcacattttaattatgtgcaggcatttagattgtccaaataaacgttgcaagatatctaggctgaagtgggaggatctcttgaagtcaggagttcaagaccagcctgggcaacatagtgagacaccccccccccaccccgatctctacaaagaattaaaaaattagtcaggcacattggctcatgcctgtcttcccagcactttgggaggccgaggtgggtggatcaccttaggtcaggagttggagaccagcctggccaacatggtgaaaccctgtctctactacaaatacaaaaattagccaggtgtggtggtgtgtgcctatagtcccagccactcgagaggctgaggcaggagaatcgcttgaacccaggaggcagaggttgcagtgagctgagatggtgccaccgcactccagcctgacgacagagcgagactccatctaaaaaaaaaaaaaaggggtctcactatgttgcccaggctggcctgctggcatcttgatgttgaacttccagcctccagaagtgtgagagaactggtttcttgagccacccagtttgcagaaattcgcacgacccccagaaatgaatgcaggacctgctcaatccataagacgattaatgagtgctaatgatgggtgagcatattggtttgggatcagttctacagctgatgagtcaagggctcgggggggcctgatgcagactattttagggctgcggaggggcgcccagaaagccagggaatcgccacacgctttgtgatcccctaatacggttaatgcaaatttctagagtgatccgtctttgtttgagtactgggcaggcagcagggagagtcaggcagcagctgtgagcgggtggctcttccccaccttgccagcaggctctgtgctccttgaagcaagcgctccagaggctccggaagccacggctggattggagacaagatgggatcctcagaggaccaggcctatcgcctccttaatgactacgccaacggcttcatggtgtcccaggtaggatacgctctgtgggacaagggggaatagacttccgttcatcacactcacgttccattgttgtgtcagtcgagaaaaatgatgagtctccatcattttagga

SEQ ID NO: 43357 - DNA, 2300 bp, Homo sapien
tgtgaaacatatcacagattggctcagagccccgtgatgacgccctgtctgccagagagaagctcacgaactctggggtgcccctactccttcttccctcctctcttccctccttccatgtgcttggctccagctagccagccagccgccttcctcttcctggaatatcccaggcctgctagacttttgctctcaccgtcacaacatcagctcaggagcccctccttggaagattgttctctaaccctccgtccagaatcactgcttctccctttcctcttcttcctttgaagttcattcataactggaagatgtgagatctggaaagttctgcattattgccagacacatctgtgtatttagagtggttggtatctttcccaggggaaccaaatgtccttgaggcagacaacatgtttatctttgtctaattcatttccctgtatgctgggcacagagtgtgggctctacacatattttataaaagaaggagggaagggttagaagatggacagaaggaaggaggaagaaaggaaggaaagagggaggaaagaaaggaaagagggagggaaggaaagagggaaagaaggaaggaaagagtgagagaaggaagtaaagaggaaaggaagggaagggaaggaaggaaggaaaaagtgagagaaagaagtgaagaggaaaggatggaaggagaaaggaaggaaagggagggaaggaaaaaggaaaagaagaaagaaggagtgagacaaggaagtaaagaagaaaggagggaaagaggaaaggaaagaaggaaagagggagggaaggaaggaatgaagaaaagaaagagggaaggaaggaaggaaagaaggaaggaggaaggaaggaaaaagggagggaaggaaggaatgaagaaaggaaagagggagggaaggaaggaaggagggagggaaggaaagagggagggaaggaaagaatgaaggaaggaaggaatgaaggaagaaaggaaaaagagaaggaaggaggaaggaaggaaagagggaaggaaggaaggaaagatggagagaaggaagggaggacaagtggaaggaagaaaaagaaatacaaatctccctcaaaatgtggatcactcgtcttaaccagaaattcaagtgagatgctatctgcacgtgtgataccagcagctatgaagcaaactgtattaaccaagtcttttattttctgtgttctgatgcatgactttcatggccttgtcaaccctagagaccctgcccctcccatagctagcgaatccccagaggtggtgaagagcccacctatgaacctgtctttcatatgcaaacccatcaatccagaatccaccccccagccatctcctttattggggttgcatattccacgtcactctccacctgccctaaccaccccaaagccaggtaccagagagtcagggacagcccctatgccccagagcctgctgaaatcattcacactagccaactgtaagcctactcgcctgttccttcccttggaaaccacagtgagagctctggtctcctttgtcttcccacctgaccaaacttggtgcgcccctgtgtggtcctgagtggtgtcaacacgcccctcctcttgggacctgtgagtaacaaaccacttgcttaacggcagtctcctgatctgttggccccaccatacctacatcataataaagtctacattttacaacgcaaacgaacaaaaatgtcctgctcagtgctgccctgagagcagaggttattccaggattcttgctcgcctctgtaaagggtatccgttctgcagacctttctgccggtcacactgacggcatattgcagagcctgccagggactcacaggggatgacaggggatttatcaggtggttttttactgcactgtcattactgggggcgaatccactttaatacattcatgcctcctgagcctgtgggaattcaagaggaacagaaccagaaataaatgaaccataactccctttggcatcttgcctctctggaggcttaattcttacaaatatgtgctctgctttcaaatcttagtttgatgattttctcttcttctttttcagttttccccccacgacctgaccgtgtcgctatagtgacgggagggacagatggcattggctattctacagcgaagcatctggcgagacttggcatgcatgttatcataggtgatgacttttacagttacttgtgttttttgttttttcggtttttttttttttctgagacaggatcgcagtccgtcaacccgtgctggactgcagtggtgcaatctt

SEQ ID NO: 43358 - DNA, 2300 bp, Homo sapien
tgggatttcagccttggccctggtaagggtctgggtgggggttctgtgctggtctggggttccctgagggagcccaggtaactctgtggttgtctggggttcccaaccaaggtctgagtaggggtctgctgtcccagtagggatcagggtggggagggggctcgtggtccctgaagtagtctggagttctctgcaggggccgggaagggggtctgtgatccctgcagggttgttgggggcagggaagtggaggggtaggtttggtgggtggtgtctgtggcctggcaggaattggggtggggtctgtggtctcagtaggaactggggtgtggggtccgtgcttggggcaggttctgtggtgtcagcaggaactggggtgtggggtccgtgcttggggcaggttctgtggtgtcagtacgaattagggtgtggggtccatggtccttacagctgttcagagtcctctgtgggagtcctggtccataatcctggcatggctctgggtggttgtctggggttccctatggggtccaagtccttgtggtccctgctgaggtctgcgtggggttacatgattctggctaagatggggagggtggttcccgtggtggtcctggtcccctgcagggtctgggtaggggatctgtgatcccatggtgggggtcctggctggggcttgaatggggttccatggtcttggctggagtgtggggtcttggagaggcagtccagctggggtctgtagtcctggggggcgtcctggcaggggtctgtggtcttgtggggtgctggctggggcctgtggtccggggggtggttgtgatggaggtggaggtcctagaagggggccccagtaggggtctgtgatcctggagaggggtcctggtggtgggggtcccagtggaggtctgtggtcctggggggccctgggaggatctgtggtactggggagtcctggtggaggtctgtagtcctggtggggttcttggtggggtgtctgggcgtgccccagtgggggggcctgtggtcttgggggtcccagcaggggtctggggtcctggggggtgttcttgggaggagtctatggatctgacttgggtgctggctggggtctgtagtcctgggggcgtcctggctggggctgttggtcttgtggtggtggggatccctgctggggtctgcagtcctgccgggagggggaagggtccctgctggggtctgtggtcctggaggaggtgtggagggtccctgctggggtctgtggtcctgggggggattcctggctggggtctgtggtcctggctgggggtgtgtgtggggggtccctgctggggtctgtggtcctgaagggggggtcctgactggggtcagtggtcctgggggcgtcctggctggggtctgtggtcctgggggggggggtcctggctgaagtctatggtccttgcaggggggggttcctggctggagtctgtggtcctggggggggtgtcctggctggggtcggttgtccgctcggggtccccagtcctgcaggcggtgcgggatcccagagggcccgggcggggtctggggttgggggttccccgcaggccggggcggttcggggcgggcagggggcggtccggggcgcgcgcgtttccgccgtccgtccgggcgggcgggcgcagagtcccgcgggcggcgcggaagcggcggcggcgcggccggggcagccatgtcgccattgtctgcggcgcgggcggccctgcgggtctacgcggtaggcgccgcggtgatcctggcgcagctgctgcggcgctgccgcgggggcttcctggagccaggtcagcggggcggggcaggggtcagggctccggggacccgggtgggcgcgggctggctcgggggcgggggcgcgggggctccgcgtgaccttggcgaggcggtggcgctcccggaagtggggctgggcgggggtcgaggtgtggccgggggtggggggggggcggcgtgcgcgctgggacctccccgccccgcgctttccgtccccgccggctcttctgcgcgcctggcccggcccgacccggcccgacccttccctccccgcgcgtgtggcctccccgcctgtcccgggtcgggctccaaccaagcagcccccgtgcagccgcccccccgcgcaccctgacacctccgggccatggccggggacccgggggctcgcacgccccgcgcccaagacatcaggcggctctgcctgccgcctgcggtcggccagtgaccgcgcgcccccgccaggccccggaggggaggagcgggcgtcc

SEQ ID NO: 43359 - DNA, 2300 bp, Homo sapien
atcctttgcattttcgcgcccaagcacgtccatgcatgactgtaattatctttaacagcatatgtggttacgcgatatggcgacatccagacattccgctgtcgtctgtgtttgtccttggaggcattattaagtcatttcttcagccgtaaacatcttatgaccatgggccgtgaccggcaaggaatgtgtcttcctggtttttaagatggagttgatgattaaaatggtgtcaccccagctctcccaggctcctgtctcccaaacacagcgggtgttaggatctgtgtggagtcccggatgccaggtctggggtcccctgggggaccaggtgtgggactgggagggttgtggtggggtgaaggtctgagtgtctgggtggggggttccatgaagaattccagtaggagtctgctggggggtccatgtgggatttcagccttggccctggtaagggtctgggtgggggttctgtgctggtctggggttccctgagggagcccaggtaactctgtggttgtctggggttcccaaccaaggtctgagtaggggtctgctgtcccagtagggatcagggtggggagggggctcgtggtccctgaagtagtctggagttctctgcaggggccgggaagggggtctgtgatccctgcagggttgttgggggcagggaagtggaggggtaggtttggtgggtggtgtctgtggcctggcaggaattggggtggggtctgtggtctcagtaggaactggggtgtggggtccgtgcttggggcaggttctgtggtgtcagcaggaactggggtgtggggtccgtgcttggggcaggttctgtggtgtcagtacgaattagggtgtggggtccatggtccttacagctgttcagagtcctctgtgggagtcctggtccataatcctggcatggctctgggtggttgtctggggttccctatggggtccaagtccttgtggtccctgctgaggtctgcgtggggttacatgattctggctaagatggggagggtggttcccgtggtggtcctggtcccctgcagggtctgggtaggggatctgtgatcccatggtgggggtcctggctggggcttgaatggggttccatggtcttggctggagtgtggggtcttggagaggcagtccagctggggtctgtagtcctggggggcgtcctggcaggggtctgtggtcttgtggggtgctggctggggcctgtggtccggggggtggttgtgatggaggtggaggtcctagaagggggccccagtaggggtctgtgatcctggagaggggtcctggtggtgggggtcccagtggaggtctgtggtcctggggggccctgggaggatctgtggtactggggagtcctggtggaggtctgtagtcctggtggggttcttggtggggtgtctgggcgtgccccagtgggggggcctgtggtcttgggggtcccagcaggggtctggggtcctggggggtgttcttgggaggagtctatggatctgacttgggtgctggctggggtctgtagtcctgggggcgtcctggctggggctgttggtcttgtggtggtggggatccctgctggggtctgcagtcctgccgggagggggaagggtccctgctggggtctgtggtcctggaggaggtgtggagggtccctgctggggtctgtggtcctgggggggattcctggctggggtctgtggtcctggctgggggtgtgtgtggggggtccctgctggggtctgtggtcctgaagggggggtcctgactggggtcagtggtcctgggggcgtcctggctggggtctgtggtcctgggggggggggtcctggctgaagtctatggtccttgcaggggggggttcctggctggagtctgtggtcctggggggggtgtcctggctggggtcggttgtccgctcggggtccccagtcctgcaggcggtgcgggatcccagagggcccgggcggggtctggggttgggggttccccgcaggccggggcggttcggggcgggcagggggcggtccggggcgcgcgcgtttccgccgtccgtccgggcgggcgggcgcagagtcccgcgggcggcgcggaagcggcggcggcgcggccggggcagccatgtcgccattgtctgcggcgcgggcggccctgcgggtctacgcggtaggcgccgcggtgatcctggcgcagctgctgcggcgctgccgcgggggcttcctggagccaggtcagcggggcggggcaggggtcagggctccggggacccgggtgggcgc

SEQ ID NO: 43360 - DNA, 2300 bp, Homo sapien
cacccaactatctatccatccaatcatccactcatctttccatccatccacccatttattcattcatccagccatctatctctttatccatccttccagcaagtgatccatccattcacgcatccagatggctgtctgtccattcattcatccatccaccacttcctacccccagacccatctatccacccatcatccactgacttcaaaagcttcatttgatcgtctgtgcagcagacatggtgtgtgatgctctgacacctcttaagtgctttggttgcccacaagaacctcacgggaggtctctaagttgggctcagaccttggtaatgaaaaccagaaataaaagtgatttaaagaaagctgatagaaacctaactttagcaaatggtaagataaaaatgtactcctttgtcctgtaaaagaagttgggaatgtgagtcgggctggcacagccgtcctgctgtatcatcagccaccctgatacctttgctcaacgtgttctgccatgcttagaatacaacttctggccgggtgcggtggctcatgcctgtaatcccagcactttgggaggccgaggtgggcggatcatgaggtcaggagttcgagaccagcctggccaacaaggtgaaaccctgtctttactaaaaatacaaaaagtagcctggcatggtggtgcatgcctgtaatcccaggtactggggaggctgaggcaggagaatcacttgaacccgggaggcggaggttgcagtgagccaagattgtgccactgcactccagcctgggccacagagcaagactccatctcaaaacaaacaaataaacaaacaaacaacacacagacaacttctatcctgtaggagacttcctgcttcgaactggctgctgggactccagccatcacgtcattatcccaggcaggttcaggatgaagcaaagaccaaaaaaaaaaaaaaaagaaagaaaaaagaaaaatgattctgcctccaggagtggagtgcatagttagactgctgcattcctcaaacccctgaggtgggccccagggtgcggggccagcccctctggccttgcctgtgtctgatccaggggcacaggtggcctggggagagacggagtcacccgcaggcctgagacagcacaagaccagtgttaccgaagggcccctgacgcagcctgctggggtgagtcgccaaggaccaggactcagccaggcgacccagataggggtcttacccccaaccccaaaccacgaccacaagtcctcactcccaaccctgtctctgagcttgcggcagaacgtccttggtcccgcgcagagcgggtatccgcagtgtgtctcaaagccccccacccccgccatctttcaccactgagcgcccccagctcggacgctccagaaaggaccaggggccgtggctgcctgtcaaggcctacgcctttctaagcagggaggggattgcactttgcaccccttggggatcgccctgagcgccccgtgagcagctggaagggggccccatagttttccgagcagaggagcaggaagagtttcatttcctccccgttggggctgcctggggggggtgcctgttaggaacagagaggggacagcaagggcgggcgcggagaggcccacacctctccaagaagggcagcggtttctcttggctccaggtaggggccgccctggggcgtgcatttaaggggctgtagagagggagggacccgcactttcccgagaatgttgggggtttcactttgctctagttggcggcatcctggcgacgggcttgtgggcggggggcactcacagtttcctgagaagggaaggagggcgtcccgtggtcccctcggcgcggcccgagccacctccgcccgccccctcctctgtcccctccccgggcccggcgttccctccccttccgtgcgccagtggaggccggggtggggcggggcggggcaggcgcagcctgggctgagtttgcagggctgctcccctcacccaaccccttcgagtcctccgcgggctccgccccacccggcccgtgggggaggttccgtcccgccgccttcgcccgcgcgctgcactcgcggacgatctctgctcgccttgggcgcgccgtggcgcgcggggccgtgctggcgctgcggctcctcggcctgctccgccgtctggtggccgccccggtgagcgagcggcgggatccgggtgggaggacgcggggggtggcgcgggctgggcctggggatccgcctggggatgtggggtgcaggggcggggcgccccgcggggacac

SEQ ID NO: 43361 - DNA, 2300 bp, Homo sapien
tcacaccactgcactccagccaggcaaaaggacaaaactccatatgaaaaaaaaaaaaaaaaagaactagaaggctggctttgaaactagcatgaatgtcacattagtttgtggagcccagctgggtgggtagagccacttttcagacacagatcagaatccgtcagtcacagatcagatcacagtcacctgccctacctcttacggtctgccttgctgaaggtgttggggacctgggaggagataatggggaatcaacgggacagagttgtgtgcaggcagattcagagtcccaactgggtccaggcagcacagttgatttacaaatgacattctttctctctccctctttctcttgctgtcatctcttactcttttcatctgggggaagaatgatgtgaaaatgatcaggaatttactttttcaaatgagatcctagtcagtgtgatattcagaaaagtctttagtcatgtgggtctctggtgatttctccatctgtttccgaggtcattccttcctcatttctcagagctttactatgaacagaccgattccttcctttaggggcagactttgacttagcagatgcctttggtgagggaggaaacagtgagtaactcgttaaagtctcctctgttgctgatttgttattgtcaccaaatgactgtcatttccaagagacttatctcttttgcataatccatggattgggtttatacagtggaaatattggaagtatatgccttgttgtgttttatttttgttgttgttggatttttgttttttttcccaccaatatgctggcttttattttaaaattgttacagactttggaatgatataaggcaaatgtcacttccctggccaggtcagacttcatgggcatgtgacatgtgatgtcacacagggacctgtgcatacaagggcaccatattggtgtattactcagtagctgccatcttgaaattcgtcataaaattggaacagaatcttgcattttcattttgtgcagggcctctcaaattctggaggtggtctggacacctggcttagttttctttgaaaatacttgaagttaaatcctgtagctggaagatgatggaagggaattggcaggaggctatgtgtatgggcatccccaccacgacaaaaacaagggtcattttttacctgtttagtgaaaggtctctatgcaaattgatttttcatttccttttctggtcgccatggaaattgatttttcattttcttgactgcaaggcactgatgatcgccaactctcatgttttacaaacaggtgacccagcaccacctaatccccccaaaccaaagccagatccaaatcccaactgacctggtttcactgataagagcctctaaccctacggggtggtctctatgttgtttacctggcagtgatgtccgtgtcatctgagaagaggagatttcaggtgagcctgttcctactgttgaattacaaggtaattccagtgttcaagtagtggaaaacctagattacgaaaatatgtttttggtttggattttattttccttttcttgattttacttcaaagataaatggaacttccaaatcattgaataagagcttttagatgtagacttgatatgaggaaaagaatctgtgtgtttcccatggagaagccaacttgttttaaacaattagatttttactgagtgtttttctttacatgtttgtttaatttttaacacagaaatctatccagatggtctaaatcctgttgacatttttatggttttttgctggttatgttattattggcataagaatattccttgaccattttctcatgtcatttaatcgtttgtatcatacgactttacattattatactacagacttaattacatactttggtttctttaagtaatccctaattctgaagttatgtttcttctgatgttttggaattatcaattacaaagcaaatttgactgcccttcatgcactttcctttatgtttgaagatatatttctagagtgcaagttgtttacatcgatgtgtgtgagtacttttgtagcttctgacatggttttgaaattgccccagaattgcaccaatttattttgatggcggcggggtgtgcagatgaccctttcctcacaccgtctccgatattggtgttcaccaaaacatctttatccagtagtgcaaaatgtcatgctaaccttgtcttagtttcacgtctttaattctgaaacttgaaacaaaaacaatgcatcagtgggccatggagacttcttcttctgtgtatgggat

SEQ ID NO: 43362 - DNA, 2300 bp, Homo sapien
agacaaattttaaaatcacttacaaataatatgtcggtcttctcagaaacattaagaaatgaagagaaaacaattggaagttcacaagggttcatcattcagtggagagtaagagagaatgcacaaaaatgttgctatagttcagaaacagagagacaaatagcgcacataaaatcgtactcaccaaaacaaatcaatactgacgggaaaacaccttagaaatccatttaaataaatcaccaggagaaaaaggcacacagaagaatctgctcgattttacaaatattttagcactctataaatcaattcatagttgtaagtaatgcaaatgaaaagaaaaagatggttttctttttcccaagaaggaagagagacagtgataaaatggttctgttaaaaggaaaaatgtgttacacaaaggtggaaactcacacaaacctaagacaacataaaaaagaaaaattcaagccttgcttataaaagcttctgttcaaaatgttttcagaggcaacaataaagtggaaacacattttcataatatattgggcaatgtttactgtctataaataattcaaaaatgactagaaatcagggaggacataccagaatagaagaataaaagacacagtatcccatacacagaagaagaagtctccatggcccactgatgcattgtttttgtttcaagtttcagaattaaagacgtgaaactaagacaaggttagcatgacattttgcactactggataaagatgttttggtgaacaccaatatcggagacggtgtgaggaaagggtcatctgcacaccccgccgccatcaaaataaattggtgcaattctggggcaatttcaaaaccatgtcagaagctacaaaagtactcacacacatcgatgtaaacaacttgcactctagaaatatatcttcaaacataaaggaaagtgcatgaagggcagtcaaatttgctttgtaattgataattccaaaacatcagaagaaacataacttcagaattagggattacttaaagaaaccaaagtatgtaattaagtctgtagtataataatgtaaagtcgtatgatacaaacgattaaatgacatgagaaaatggtcaaggaatattcttatgccaataataacataaccagcaaaaaaccataaaaatgtcaacaggatttagaccatctggatagatttctgtgttaaaaattaaacaaacatgtaaagaaaaacactcagtaaaaatctaattgtttaaaacaagttggcttctccatgggaaacacacagattcttttcctcatatcaagtctacatctaaaagctcttattcaatgatttggaagttccatttatctttgaagtaaaatcaagaaaaggaaaataaaatccaaaccaaaaacatattttcgtaatctaggttttccactacttgaacactggaattaccttgtaattcaacagtaggaacaggctcacctgaaatctcctcttctcagatgacacggacatcactgccaggtaaacaacatagagaccaccccgtagggttagaggctcttatcagtgaaaccaggtcagttgggatttggatctggctttggtttggggggattaggtggtgctgggtcacctgtttgtaaaacatgagagttggcgatcatcagtgccttgcagtcaagaaaatgaaaaatcaatttccatggcgaccagaaaaggaaatgaaaaatcaatttgcatagagacctttcactaaacaggtaaaaaatgacccttgtttttgtcgtggtggggatgcccatacacatagcctcctgccaattcccttccatcatcttccagctacaggatttaacttcaagtattttcaaagaaaactaagccaggtgtccagaccacctccagaatttgagaggccctgcacaaaatgaaaatgcaagattctgttccaattttatgacgaatttcaagatggcagctactgagtaatacaccaatatggtgcccttgtatgcacaggtccctgtgtgacatcacatgtcacatgcccatgaagtctgacctggccagggaagtgacatttgccttatatcattccaaagtctgtaacaattttaaaataaaagccagcatattggtgggaaaaaaaacaaaaatccaacaacaacaaaaataaaacacaacaaggcatatacttccaatatttccactgtataaacccaatccatggattatgcaaaagagataagtctcttggaaatgacagtcatttggtgacaataacaaatcagcaacagagga

SEQ ID NO: 43363 - DNA, 2300 bp, Homo sapien
atacaaaaattagctaagtgtagtagcaggtgcctgtaatcctagctacttgggaggctgaggcagggaagtgcttgaacccaggaggtggaggttgcagtgagccaagatcatgctactgcactccagcctgggcaacagggtgagactccaactcaaaaaaaaaaaaaaaaaaaaaagagcatctgtcatttgcaacaacacgggtgaatttgaaggatattgtgttcagtgaaataagccaggcacggaaagacaagtaccacatgatctcattcctatgtaaaagtctagaaaccttggtctcacagaagcagagagcacagtggtggttaccaggggatgggcatgggtggggcatgggaagatgttggtcagagtattacaggccactagacaggcatgggcgggcaggagagggctcttccacccaccagcaatgccaggtgctggttcagcgatgatcgcattgcctctctaaaaaatgataaattggcggctgggcacggtggcccacacctgtcatcccagcactttggaaggccgaggcaggtggatcacgaggtcaggagttcaagaccagcctggccaagatggtgaaaccccatctttactaaaaatacaaaattagccagacatgatggtgcatgcctgtaatcccatgcttgaaactgggaggcggaggttgttgcagtgagctgagatcgtgccactgcactccagcctgggcgatagagtgagactcagtgtcaaaaaaaaaaaaaaattggcagcctgtggcagggagagaccatttcctgatgttccacacctgtcacactcaattgttcattgagtgcaagtgccgtggaaacacaacttcctaagcatgcacattaggagaaaacatggcggaatatgaccttctgaggtcactccactggaaacaggaagaaagcctcagatatgggcacgctacaacttcctaaacctcatgctcacctcccaagcataaggagggcactgtgcatgcgggcagctcaccctaggggaagaatcatgggaaagggatacaagatgctagaagtggaccagcctataaggtcctgtaaagttaaacaccacacttgttcttcagggcgcctgcttgggtctctttcaagtgtacttccgttcttttctgttctgaagcttttaaaataaacttccactcggctgggcgcagtggctcatgcctgtaatcccagcactttgggaggctgaggtgggtggatcagaaggtcagaagttcgagaccagcctagccaatacggtgaaaccccgtctctactaaaaatacaaaaattagccctgcatggtggcgcacacctgtaatcccagctactcaggagattgaggcaggagaatcgcttgaacccggaaggtggaggttgcaatgagccgagatcgcactgctgcactccagcctgggtggcaagagcgagactctgtctcaaaacaaaaacaaaaacaaaagccttccactcctgctctgaaacttgcccgggtctctctctctgccttatggccctcagtcaaattctttcttctgaggatgcaagaattccagtggctgcaggcctgtatggattcatcactggtaactcagataccttccaccacattataataaaagggcagaacatttcagttagacctaaggaataagttcaagagatatattgcacaatgtggtgattgtagttaatatcaatgtactgcatacttgaaaaccactaagacagtagattttaactgttttcaccacattaaaaaaataagtatgggctgggaatggtggctcacgcctgtaatcccagcactttgggagggtgaggggggtggatcacgaggacaggagattgaaaccatcctggctaacacagtggaaccccacctctactaaaaatacaaaaatttagccaggcgtggtggcaggcacctatagtcccagctacttgggaggctgaggcaggagaattgcttgaacccaggaggcagaggttgcagtcagccgagattacaccactgcactccagcctgcatgacagagccagactccatctaaaaaaaaaaaaaaagtatttatggtaatatgttaattagttttagttacccatcccataatggatacatatttcagtatatgaatggaatgttatgttgtatatcagaagcatatctaatttttgtttgtcaatgacaaaaagaaaatagtcctcatcattgtgactggctcaggctaaacacatacactatttttatttctgcagttactcttc

SEQ ID NO: 43364 - DNA, 2300 bp, Homo sapien
ctaaataaattaataaaataaaataaaattctaagcccccaccgccccccaccttcaaaacatctgaatggacttcttcctcagccagagctctttaaaaatttaacctgagagagtgtttcaagccgtgacgggaagcaggggttgaacatgcctcccggtgcctctccggcgttaacatccacacagcctttaagtttgagaagaaacattttacaacctcttctctctgaccctagcaccggaagggttcctgttcaaataagaacttgagtcttcacaattctttatcttaacccagacattcttttctattgatcccaggactttaaagaaacccaagcaattgccaatcagaaaattctaaaatctacctataagctggaagcctcctgctttgggttgtcccgcctttctggacaaaaccaatgtgtctcttaaatttcattgatgtctcatgcctccctaaaacgtataacaccaagctgcaccccgaccaccttgaggacacgttctcgggacctcctgagggctgtgtcatgggccatggtcactcatatttggctcagaataaatctcttcaaatatgttagagttggactcctttctctttttttcttttttctttctttttttttgagacggagtctcgctctgtcacccaggctggagtgcagtggcctgatcttggctcactgcaacctccatctccccggttcaagcgattctcttgcctcggcctcctgagtagctgggactacaggtgcacaccaccacacgcgtctaattttgtattttagaagagacagggtttcaccttgttggtcaggctggtctccaattcctgacctcaggtgatccacccgcctcggtctcccaaagcgctgggattccaggcgtgagccaccgcgcccggcctagtttgactcttttcgtggacagtttgaagtgtggaatgcaagaatattcagggttatttgtcaggctgcaaagttgttccactaccctgcgggaaaatggatacaattttaggcttaggtgttaacagataacattgttaagtgtgggaagggcgacaactgcactgcagctgtggccagtggcgcgggagggtgtctaaactcaaagcccactggaaggcgagtcgcccatgaccaggactagggcccaggtgccccagatagaaggcacctcgttccctattgcccctcactaactcccgtgaccaggagtccccactcccaaccttgtcctggggattctggggagaaactgccccagcgcagaggctactccaagggttgtccttggtccggcgcaaagggttcgtccgccaccctcccggctgcgcaccccgcgctcggacgctctagaaaggacttgggacgggggttgcctgtggagcgggggcctaggcttcctgagcagggagaggattgcactttgctccccttggggaactccctgaggtgagcagcggggaggggcccccatacttttcccagcaggggagccgggagtttcctctgctcccactgcagagcaggggagggtccctgctaggggcggagaaggggctgcaggggcgagtggggaggggggctacacgtttccaagaagggcggcagtttcgtgtcgctacagttgcaggcgtgcatttaggaggctgtagacagggagggacccgcactttcccgagcaggggagctgctgggaaagtttgtttttttgctcccactggagaccagggggtgaggggcggagaagtggctgcaggggcgagtggggagagggggctctatgtttccaagaagggcggcagttttgtgccactacagttaagggccgccctcgggcgtgcattcagagggctgtaaaccgggagggacccgcactttcccgagaacgttgtagttcactttgcttcgggtcggcgccgccctggctacggccctgtgggtgggtgagggggcgtgggcagtttcctgagaaggggcggggcgtgtaccgtactcccctcggcgctgcctgggccacccccgcccgcctaccccctctgtctcctccccgggcccggcgttcccgccccttctgtgcgcgcgtggaggccggggcggggcgggcgcagccggcgctgagcttgcagggccgctcccctcacccgcccccttcgagtccccgggcttcgccccacccggcccgtgggggagtatctgtcctgccgccttcgcccacgccctgcactccgggaccgtccctgcgcgctctgggcgcaccatggcccgcggggctgcgctggc

SEQ ID NO: 43365 - DNA, 2300 bp, Homo sapien
aggtgggcggatcacaaggtcaggagttcgagaccagcctggccaacatggtgaaaccccgtctctactaaaaatgcaaaaattaaccaggtgtggtggtgcatgcctgtaattccagctactcaggaggctgaggcagaagaatcacttgagctcaggaggcagaagttgcagtgagctgacatcacgccactgcattccagcctgggtgacagagcaagcctgtgtctcaaaaaaaaaaaaaaaattaatggtgaaaactgcaattacttttgcaccaaagtaatacatctgcaaagatcttatctccaaagaaagtcacattctgaagtactgaagggttgggcttcaatatatgaagtttgcgggagaaaaaatgcaactcataatatatccattcccacgtctttccagcccctggcaaccggcaatgtgctttctgtctctgcagatttgcctgttctggacatttcagagaaatggaatcctacacaatgcgttcttctgtgtctgttttctctaactcagcatccagtttttgacgtccatccactttgtagcagatgtcacggtgtcagtcctctttagggtcaggggactttgaaggaaatatctttctaaatgcatcaactgcttcctggactctgccactcagagcttaggactgcacaagctaactgccttagagcatttcccccatatgcacacacacacacacatgaacacacatgcacacgcacacatgcacacgcacacacgcacacacacacagacagacacgtgcacacacacacacacctgtgtgcacaggaacttaatccatccaagtaacttacctttataaagatgttgcagtccaggcgcgatggctcacacctgtaatcccagcactttgggaagccgaggcaggtggatcacttgaggtcaagagttcaagaccagcctggccaatgcagtgaaaccctgtatctactaaaaatacagaaattagccgggtgtggtgtcgggtgcctgtaatcctagctactcgggtggctgaggcaggagaatcacttgaacctgagaggcggaggttgtagtgagttgagatcacaccactgcactccagcctgggcaacagagtgagactctgtctcaaaaaaaaaaaaggaagatatttcatagaagacaactcccaaacaccaggtcaacaacatgaacagacttaacactccagatgctcaaatttgcagagagaaaagtccaaggtttatttctccttttgggtctgtttgccatgaatcctgcttctctgggaatttagaagctgccctcataactaagactgattttcccctttctcctgcagttaatctatttaccagaggacttcaaagctgtttgcaaatggtaactttttaagtgcttgcctactgcttcatggtaggtagagtgtaagggttaacccacgagttgtatatggataaattagacacactcacagatctgcagggaagaatataattaaaaccattgtgaaagcaggagtcatcatcgaactcagctatccagtcatgtttcttctccaaggagatttcaaacagaagatgtaaattttggtagttacataaaatgtctcagatttaaatgaaagacacaaaaagccacatatctccttttcctgaacaaccgtctctgctgaaatattagttctgccacctacaaagacaactgaaggctgaggataaaaaatgcctcttggaagtcactgagtttgttaggtataaaagccaagacttcaactgaggtctttgcactgatgtgtacattaaccccacactgggtatcactgtacaatcatgtcctgcaggaggaagattacaggcggccagtgtcttctctggtttctgggttggtgactttgaacttgctacagctcccacacccgcagcgagcagagttgccaagcaagtgtgccggcttccagaagcctgagatgcccattggtgcttgggaaccaccccagtttccccatcgtctgtgctgctgcagattggttggggcagcccggggaggctggctccgacacacgactgagtgtgcctacactggtcccacaggttttcagctgtggagtttgggatctgagcttggagcccatttgtttctggcagttccgctcatattttccacttgaagacatcgcctcccttccttccaagctgggagaccagaagtcaacaacaggagggtggagaggccgggtctcacaatccgcttggctggggagtccactgaggttcttgcatcctgaagcaaac

SEQ ID NO: 43366 - DNA, 2300 bp, Homo sapien
attagaatcacaagataacacaagtgtcctccttagctaaactgagcctatttccatttggatttgtgcatcccaataattttgttctctgcagcctcaaggtctcatttgcatagaaaggttaagaaatgaaataaaatccatggtcctcaccacacaacatgacttctgcacagaaaacatacagtaggaaaagtctgaactctttagcaagtcctcaaaggcaaaaagtggcatctgtggaatcaagaagcaagtatcaccttgactcaaatgcctcatataactgcagaatccctcactgtatccatgtgaaggaaaattgtcaaccctgtggtttggatcaatgaagccaagcaaacaggacagctgccacttttgcatagtactcttagaagatgtattttagatctgtcagatggcattaaaaaatctcctctaggtctcagtccgatgtcagaatgataaatttcagaaaaaccaagctgcccacttctgactgctttgaacttcatagtagaagatatcagaatcttgccatctgctatttctaccaaagcagggaagctttccaaaactggtgcttcatcacaaatttatgggcgaaaagaatcaaatttatttccttccttccttccttccttccttccttccttcccttcctccctccctccttctctgtctctccttccttccttcctttcttccttccttcctccctctctccctccctcccttccttccttccttctttctttgagagtctcactctgttgcccaagctggagtgcagtggtgctatcgcagctcactatggtcttgaatttctgtgttcaagtgatcctcccacgtagctgggactacaggtgtgcactacgacgcccagctaatttttaaatcgttactagagatgggggtctcactatgttgcccagcctggtcttgaactcctaggctcaagcaatcccctcacctaggcctcccaaagtgctgggattacaggtgtgagccactacgcccagcctaactttttggaaaactatacccaagccactagtttttcaaggttagttattaccttcaaatgacgcttaactgacatttctgaccatctaaatgaacttaattgaaaaaaaaaaaaaaatcaagggctgtatgaattgactctccaaaaacttaactactcatagcatactggttgactgaaagccttactggtaacagttgaacacgtattttgtatatgtattacataccatattattacaataaagtaagctagaggaaagaaaatgttatgaagaaaatcataaggaagataaaattaatgaatttactatttattaagtggaagcggatcaccataaaggtcttcatccttatcatcttcccattgagtagatggagggttggtcctgctgtctcagtaatggcagagccagaagcaaactcacatacaggtggacatgtgcagttcagccctgtgttgttcaagggtcagctgtacagtcaaggttatccttctctaaattacatggagatgacgttttatcaaggcttttctcatctgttcaattctcaccttctcagcatgaaaacagaatgcccagcaggtggtcctcatgacccctcaaagagaggttcccccaagcaatcatgattcaaatattttcatcttaagtagcttgaacgttagccttgtcacccaggtgaatttagtctcatgattaggtaactatgtatttcatatgttcatagtctatcttgagctttaaaagagatttatggcatcatattcacagctacgaaggttcataattttggggccacttctacagtcatttcatacaatttatttgtgaaatatagaaaaaaactattcaataatcaaatccagttatttttcttttacatttatttaaaatgattaaaaatagtttatgacagttttagaaaatggaatggattaaaggctaaaaatgtttagattccatttaagtaggtgtgtgtgtgtgtgtgtgtgtaactaaaaacacaggttttttcacaagaatttaattaagctcatgctgaaactcttatagggaaaatagtaattgagcatcagacatcaccactcctgaaaaaaaccttctacaagaattgaaaagtgttgcaggacctaatactgaaataggaaatatggactatcttcaaactgcacaaatgatgcatgaatccacatttgagacccgcaactccgaggtacctaatgtgaatgattaaagatattttacaaaccggggagccctttcaagtgc

SEQ ID NO: 43367 - DNA, 2300 bp, Homo sapien
cacgagttaaattcttgcctgtagcctgctggaggtcagagatagcctccactgtttatgtacagctctggccccatctatgaagtagagctaaaaacaccaccgatacctgtccccaaggctgagctgatgcaggaacagccctcagcacagtgcctggtatccacagaccatcgatcatcctaggtattcatctagatcaggaaggcctgactgtagcttgcgttgattgccattgacagtttcggcaagaatctgggttcctttgctgtctctttcggatggacacgtgaaggctcttctccaagtaagttcactcattcgactcatgcactcatacatgcatgcactcacaccatcatcactcattcaactcatacatgcatgccctcacacagtcatcactcattcaactcatacatgcatgccctcacacagtcatcactcattcaactcatacatgcatgccctcacacagtcatcactcattcaactcatacatgcatgcactcacacagtcatcactcattcaactcatacatgcatgcactcacagtcatcactcattcaactcatgaactcatacatgcttgcattcacacattcattgattcattcacttaattcactcatgcatgcatgcatgcattcacactttcacttattcattcatgcatccattaacttgtccatgcattcaattcattcattcactcatacataatacattaattcctgaagtgtatgcagtcttcactcattcactcgtgtgtgtgcattaacacacatgctagtttgttcagctcattcctgtactcatacatatttattcactcagtcattcggccacgtattcacttgtcatgtattctcttcattcactcacacacacatccattcctgtataaatgcatgccttcacgtgctcaatcaatcctgcatgcatgaattcactcactcatgcaggcatgaactcacttgttcactcactcattcatgcactcactcatgcttgtacgaattcgcttatttactcattcatacactcatgcaggcatgaactcacttgttcactcattcgtgcactcatgcatgcatgaattcacttgtttactcactcatacatgcacttatacatgcatgaattcacttcttaagtcattcatgcactcaatcacgtatgaattcgcttgttcactcattcatgcactcactcatgcaggcatgaattcgcttgtttattcactcatgcagtcactcatgcatgcataagttcacttgttcacttattcatgcactcactcatgtatgcatgaattcacctttcacccattcatgcactatgcatgcatgaattcacttgttcactcaatcattcatgcattcaactcattcattcactcattcatagattcatgccttcacgcatgcatgcatgcattcacctatattttccacacagtcacacctccattcacgcatctatctctaaattcattcatacatgcattggctcgttcatgccttcaactcatgcattcatgtgtgaatgcattcattccctccttggcgcaaacattgattcaatggttcattcatttcctggcctgctcattcatgagtagttgtttgttcattcacgcctcacatgcattcacgcatacatgcactcacgcatacatgcactcaccgcgtgcgtacagccactcgctcgctatgcattcaacagctgaagcctgaaaccctcatttattctttctttcgtgcactcattcattcattcagtttatgcgtgtaagtacgcgcacgtgcatttttcatgcattcgacaagatcgcgtataagccctgccttctccctctgggaggcttccagagcggcctccactcttgctgcgcgctggccttgggcccagggccttaagtcatcgcaaacgtttactttggggctggctgattaaaggttaaatgtccaaacctagaaaccgccgactgccgaaggggccgcggcgggcgaggggcggggcgcgggcgtggatcgcagcccccggcggttcccgggtctctcttcccggcagccggggctgggcaccaggcggcgcgcgggcttgcgggcaggggctgcagggaggaggagaggacccgcgcccgcgggggctggcggaggcggggccgggcttccggacagaggccaatcgctgccctcggggcctccagcgccggctctgggccgaggcagccagagcgcggaagaggtgcggggggctgtagggggctgcaggggaccgtgggcagtggagg

SEQ ID NO: 43368 - DNA, 2300 bp, Homo sapien
ccaccaagcctgtctgataaaagctatttcagagtaacagggcaaagagagaagcaataaacagtgctcaagagctagctccagacagatggccagcgtaataaatgtaaatgaactaaatttgccaattaaaagtgaatggtcttttttctaaatagaattcccagcaccattttgggagattccaattgaataaatttagggagtagggctcctgactgtattgtcttgaacaagcacccccatcatctcatcccaggggagtgtggggcagctccctcatttatgaaaatcctaactcagtgaatttaaggaggggcttctgaatctatgttttcaacacaaacttccaccccgcctcccctaccttactgattccatttggtaagcatagagaactgagttgcaaaggaaaaaaaaatggcataaatgttggaggcagaataatggtgaggaggacctggatatgcttcccacctacacacccaacatagagtcttgtggctggtcaggcacagtggctcacctgtaatcccagtactttgggaggccaaagcaggaggactgcttgaggcaagagtttgagaccagcttaggcaacatagtgggacctagtctctagcaaaaaaataaattaacaaaaatgtgtcaggggtggtggtgcacaccggtagttccacttccttgggaggcggtgacagcctcacccttgacagcctcagccttggaaaaagaaagtactgttaatcttgaagactatggaatcattttgtccctgaccagtggaagaggacctaagcaaccccctttgagggaaagtgggtcacctgggctggaggtagggatgtgatattgttttgtaagctagcatttcctacaaaatatgaatttatactttgaccagatcttgcattgtgaggggatgtgaggggatgaggtaagacatgaaggggcttgagagaatcagcgactggaggtcaagagagttagacaaaaacaaaggctcactgcagcctcaactctcagccttgatctttctagaggtcaaaagagttaaaaacaaaacaaacaaacaacaaagggagagccaaagatacaaaaaaagcattacgtgagagggtaatgagcaaaatagcatcattcaaaaacaaaaggatgagtcacagaaaagatggggaggggtccagggcacagtgattaatcaaaaggagtaatttcaacagcagtctgatgaaagaaacaaagataaaaatagcaattggaattagccgggcgtggtggcacgcgcctgtagtcccagctactcgggaggctgaggcaggagaatcgcttgaacccaggagacggaggttgcactgagccgagatcgcaccactgcactccagcctgggcgacagagtgagtccctatctcaaaataataataataatagtaataaaagcaaaaaaaaagggcccatctagcattccccgtcccagacttagagtacaagtccagcatccggaacagacatttcaaacaccaagctttgagaaactgaaatcgcaacttgattgctctgggtaggtcctaagacccttcctgacaaaaagaaaaggggctccctgtgctcaagcctaactgggtttattttttatttttatttatttattttttgagacggagtgtcactctgtcgcccaggctggagttgcagtggcgcgatctcagctcactgcaacctccacctcccgggttcaagcaactctcctgcttcagcctcccgaatagctgggactacagacgtgaactaccacacccagctaatttttgtatttttagtagagacggggtttcaccaggttggccaggctggtctcgaactcctgacctcaggtgacccactcgtcttggcctcccaaactgctgggattccaggcgggagccaccgcgcccggtcaatcgtaactgggtttaatcagctccttagcccaggccttcccgtgtgacgacctgggaaaacctgtttccacgcgcaggtcccggaggtcccgagagccaggagatgacgcggatgaaggaggggcgggcgcccggcccagatcccgcagctgagagggcggaagccttggcactagcggcgcccgggcgcggagtgcgcagggcaaggtcctgcgctctgggccagcgctcggccatgcgatccgccgcgcggaggggacgcgccgcgcccgccgccaggtgcctgggaccccgggacgcggcccatactaaggcctagggtgggggcctggggagggggtcgcgagcacggcgagggg

SEQ ID NO: 43369 - DNA, 2300 bp, Homo sapien
tcctttaggccccctacgaggaaatgacttaagatttgttgccaaaaatcacaaagtgaaagcaattaccattagggcacacacctgtggcaggaaaagaaaacatttctgacacccctcctaatactcgttttgagacatgccaccaaaaccgtccacttgtaaaaatgagtcaggctggagtgtgccagcgtgtcagctcctcatcccagaagtagggtggtttccacccccacataaggaggaagtgagatcaggtaggctatgtgacttctcacagacccagcatgtggctgcatatgaagttgcgaagagacagcaggtggaactctatgaaaccccgtccttgtaggtcaaggatggttgaataatagggaccattgcgtagggttccattctacagagtaacttcccagcaatgatcatgcagtgcctcagaaactgcttcctgccctcttggtcttgtcttgtcttttcttttttgagacggagtctcactctgccgcccaggctggagtgcagcggcacagtctcggctcactgcaagctccgtctcccgggttcaagcgattctcctatctcagcctcccaagtagctgggattacaggtgcacgccaccacatccagctaatttttgtatttttagtacagacggggttttgccatgttggccaggctagtctcaaacacctgacctcaggtgatcagcccacctcagcctcccaaagcgctgggattacaggcgtgagccaccgtgcccagcccgtcttttctatgtttttaaaccaagcattgcttgaaaataatcctttttttacttttttttttgcttattttttttctttttatcttatgtttattattattattactataatttttgagacagagtctctctccgttgctgaggctggagtacaatgctgcgatcttgcctcactgtaacctccgactccggggttcaagcaattttcttgcctcagcctcccgagtagctgggattacaggcatgtgacaccatgcctggctaatttttctatttttagcagagacagggtttcaccatgttggccaggctagtctcgagctcttgggttcaagtgatcggcccacctcgtcctcccaaagtgctggaattacaggcatgagccactgcgcctggcctttttacttcttttgtttgtttgtttatttactttaagaaatgttttcttttttatttttatcttatctttattatttcttatttacttcatttaccactcaacaaataacttctttaaaacatttttttttgaggcagggtcttgctctgtcactcaggctggagtgaaactgcagcttcaacctcccaggctcaaacaatctttccacctcagcctcctgagtagctggcagtagagacacatgccaccatgcctggctaattgttttattatttatagagacagggtcttgctatgatgcccgggctggtctcgaagtcctgggctcaagcgatcttcctgcctcaacctccccaagtgctaggattatgggcataagccacactgcccagcctaatattttttatttttgaagagacagcatctcactttgctgcccaggctgctctgaaactcctggcctcaagcaatcttcctgcctcgtcctcccaaagcgctgggattacaggcatgagccaccatgccaggttggatatgatcatattatagccagcaccctgtgtaacagcacaggcaatcacttaaaaacctaaggacactggcagaatacggtgactcacatctgtaatcccagcacttcgggaggccaaggagggcagatcactggagctcaggactttgagaccagcctaggccacatggcaaaaccccgtctctacaaaaaataaaacaaaataaaaacctaaggaaactgaccactggtttggtagacgtgggcgtggctttgagattcccccatgctgcgatgtggggggagtctgctctgtctgtcctaactctctctgatcttctgacttgggaaaaacaaactcgaagttaatcattcccagctcaaagccttgtgcaagtgctctctgccttcacgcttgcttcctttgggagagaaccttcctcttcttgatcggggattcaggaaggagcccaggagcagaggtgagtcctgtgaatgttcatttgtgctggatttgggctccgtgaccaggcatgaatagcgtggtgaacaaagagctccccgttcccttttctgtctctgaataattgcccagtttgttttgataaagcagaaacgtacc

SEQ ID NO: 43370 - DNA, 2300 bp, Homo sapien
ctgggtgacagagcgagactctgtctcaaaaaaaaaaaacaaaaaccctaaagctctatcactcagcttcaaaaaaaaaaaaaaaaaaaaaagaatacgtgaatactgacagagttaaaccttggaaagtttcttttctaaaaaggaaactttaaaagtttttatttttaattgacaaataataattgtttataggctgggcacgatggctcacacctctcagcacttcaggaggccgaggtgggaggatcacctgaggtcaggagttcaagacatgcccggccaacatggcgaaacgccatctctaccaaaaaaaatacaaaaatcagctgggcatggtgccacacacacatacacacacacacacacacacccctataagcctcataaatatgaacaattattattattttttgagacagagtctctctctgttgcccaggctgcagtgcagtggcgcgatcttggctcgctgcaacctccgcctctcaggttcaggcaattatccctgcttcagcctcccgagcagatggtattactttttttttttttttgagacggagtctcactcttgctacccaggctggagtgcagtggtgcaatttcagctcactgcaacctccgcctcctgggttcaagtgattctcctgcctcagcctctgaagtagctgggaccacaggcgcgtgtcaccatgcccggttaattttgtatttttagtagagatggggtttcaccatgtttgtcaggctggtctcaaactcctgacctcaggtattccacttgccttggcctctcaaagcactgggattacaggcatgagccactgtgcccggccttggttacatttttattcaataaagtaaacaaaaaagttttttttgagatagggtcttgctctattgtctaagctggagtgcagtggtgcattcatagctcactgcaatcctgacctctcaggctcaagcaatcctctcatctcagcctcctgagtagctgggattataggaatgcatcactatgcccagctatttttgtattgtttgtagagatggggtttcaccatgctgcccaggccagtctcaaacttctgggctcaaatgatccacccgcattggccttccaaagtgctgggattacaggcatgagtcacagcacccggcaaaattcaatttttagagcttaccctcaactgtaacccctgttataaattttaagcctctgatgtcactaaaacaatatcaaaagatgttataagagttaaacctcatcatgcttgcaaaatgaattggtaaaatatgatgccatattcgtatagaacaatggtctccaacatttttggcaccagggtctggttttgtggaagacggtttttccacagacaggaagggggtgcaggatggtttcaggatgattcaagcacattacatttattgtgcactttatttttattattattacacgataatatataatgaaataattatacaactcatcgtagtgtatgatcagtgggtgccctaagcttgttttcctgtgactagatgatcccatctgggggtgatggaagacagagacagatcatcaggcattagattctcataaagagcacacaacctagatcctttgcatgcacagttcacaatagagttctcgctcctatgagaatctaatgctgctaccgatctgacaggaggtggagctcaggcagtgatgcaagcaatggggagcggctgtcaatacagatgaagcttcactcatttgcccaccactcacctcctgctgtgtggcctggttgctaacaggctacggaccagtactggtccatggccaggggattggggaccccggtatagaacattagtttttgttgttgttgtttaatctagtttctgagtaagacaacacaggtacgttgtacagtgagaactgataacgaatatcactgtttcatatgttaagttatctaaaatgcaaatgttaattgatagtgcctggttttttgcttgcttgtttgtttgcttatttctaaaaatgctttcaggagctgctggctgtcagtgtccctgtgctgtttgttttgcggtgttgatggcacatttatgacaagaaacgccagacccaacattgtcctgctgatggcagatgaccttggagtgggggatttgtgctgctacggtaataactcagtgaggtaaagatggactctgaccccctccctgtatgtgggagtctcccttaccacagtgttcacgtctttgccgttgcagagaagggtttctggagagaagtcattgtctga

SEQ ID NO: 43371 - DNA, 2300 bp, Homo sapien
atgcctcagcctccacaattgctgggagtagaggcacctgccaccacgcccggctagtttttgtatttttagtagagacggggtttcaccttgttggccaggctggtctcgaactcctgatgtcaggtgatccgcccgcctcagcctcccaaagtgctggaattacaggcttgagccactgtgcccagccttcagtttggttttgtccagtgttttctcatgattagactgaggttatgcatttttggcaaaaaaatcatcagaattgatgtaagttttcagtgtgtcatgttacggagtgcatgatgtctgtatgtcctgtcctggtgatgttaaatttcatcacctggattaagtggtgtctgttggaattctccactgtgaaattattattttttctgatccaggaaaggttaagcaagagtctggcaccattttaagtctaataagaaacatttactacctgatttctctgaagcctgctacctgcgggctacatgtgcataataaaaactttggtctcctcaacgccttatcctcacccagacatttcctttctactaattacaggtctttaatcagaaaatcctggaatccacctacgacctggaagttcctcactttgaatggaatcccacctttctggactaagccaatgtacatctcacatgtgtcgattgatgtctcctgtccccgtaaattgtataaagccaagctgtcacccaaccaccttgggcacttgttctcaggacctccttggggctgtgtcgtgagccattggttaaatgaataactcttttcaaatattttacagagtttgactcttttcatggacattaattggtgccctacacgtggggcctcagaaaagactcagaatccttgacgcagttgcccgaacccggagctaagttacccgcagggccattggaagccctccctggctttaggtttctcctccagtggaaccggtgagtcctctgcagctctggaccttccatttggttgatggtccttggttcattctgagctgtttttctacctcctttttatttttctcctaggaagttgttgtataggatcctactttaggtttggtggtgcattctaaatggtcttctccactgcccttttccccccaaattaatgtcgattggcctgtgagtacatttgcgtgagagactgaactgccacttttgtggcataattttgaattgccaaacgagaggctgacctcctcagcttggaaaagaaagggagttttgctcctcctagccaaaaaccacccctgggtggtaggggttgagtgggagtctctgggggattgactcctgccatgatgtgcagtgaccctacagggaaccacacaacaaaattaattttaagaggctcatccaggagacaggtgtaagagctgatcacttgctatgttgagccctgtcagaggtctagacctctggagagagaaactcagacacgtgaaagggtagaaagactcagtggtgacacacagtgtagtccctctcacagccagcacacttcaatccaccctactaaaacccaggccacagtttagttcctcattttaaaataaaagtgggagacatagcatgtaaggatgaggaaaggcggagagagcgacccccatttgggcaccccttttggttctctggttcctctacttgcaagtatttgtgtaagcgggaaaagcttgagggcatgccaggtcaaacaagaagcttcctgttacatattatgtctgtgcttgttcacactttaaactgctgcacacattacaccagagaaaattccagcccaaaggtcaacctgcaaccaatcagttcctaagtcctctattttgctattttcttttctgcctactttaaatcttctgtttactttttgttcttttcttttcttttctttttctttttttttttttttgagacagagtcttgctctgtcacccaggctggagtgcaatggcgctatctactgcagcctctgccttccaggttcaagcgattctcctgcctcagcctccccagtagctgggattacagacgtgcgccaccacgtctacgtaatttttgtatttttagtggagacaggctctcaccatgttgaccaggctggtctcgaactcccgacctcaagtgatccgccggcctcggcctcccaaagtgctgggattacaggcgtgaaccaccactcctggcccttctgttacttttccactgctgttgagatagaagtcactgttgggatccaacctttttgtttgtataaactggtgagtt

SEQ ID NO: 43372 - DNA, 2300 bp, Homo sapien
tcactggccatcagagaaatgcaaatcaaaaccacactgagataccatctcacaccagttagaatggcgatcattaaaaagtcaggaaacaacagatcctggagaggatgtggagaaataggaacacttttacactgttggcgggagtgtaaactagttcaaccattgtggaagacagtgtggcaattcctcaaggatctagagctagcaataccatttgacccagtaatcccattactgggtatatacccaaagcattataaatcatgctgctatcaagacatatgcacactattcacaatagcaaagacttggaaccaacccaaatgtccatcaatgatagactggattaagaaaacctggcacatagacaccatggaatactatgcagccataaaaaatgataagttaatgtcctttgcagggacatggatgaagctggaaaccatcattctgagcaaactatcacaaggacagaaaaccaaacactgcatgttctcactcataggtggtaattgaacaatgagaacacttggacacagggtgggggacatcacacaccgggcctgttgtggggtggggggttgggggagggatagcattgggagagatacctaatgtaaatgacgggttgatggatgcagcgggccagcatggcacatgtatacctatgtaacgagcctgcatgttgtgcacatgtaccctagaacttaaagtataataaaaataaataaataaataaataaataaataaaataaaatcaggagaaaaaaaattggccagtcatggtggcaggtgcctgtaattccagctactcaggaggccgagacaggaaaatcgtttaagaccaggaggcagagattttagtgagctgaaattgtgctgctgcactccagcttcggcaacagagtgagactctgtctcaaaaaaaaaaaaaaatgcacatgccctttatatgtaaattttcattttagggaataagttcacatcttcttaacatatattattttggtgtttttagacaattccagttcaaaattcctctccaggtacatttacctgaagaaatctgcatctctggtctaatgcaagatctggtttccaggctgggcgcagtgactctcgcctataatcccagcactttgggaggccgagatgggaggattgcttgagcccaggagtttgagaccagcctgggcaacatagtgagattatgtaaaaatacaaaaattatccatggactagtgggtgcctgtagtcccagctattcgggaggctgaagcaggaggatcactcgagcctggaagtcgaggctgcagtgagctgtgatcaccataattttactccagcctgggtaacagagagacaaccagtctcataaacaaaacaaaacaaaatctggtttctagagtttatagaatcatacaacagcatgtttcatggagcgttccatctcacaaggtggtgtttggtttagagagggttatgtatgccctctgatattctcaaatctttatttaaaatgctgggagagttgctatctggctttgcatcagtgtttaatataatagccatccttttggggtgggtgttgacgaacagcacacctgccatcttccaaattataccccacactttgtcttgttgaatattattaagatataaagacagggaagaccttccatttccctcccacgtccccaccacctttagttgggagcacagatgtccctgaggcactgctatagaccatgaggtcaccgcaacacaagggacatcaaatgggattgctctggctcaaaacagccagtcttaattctggtgcgatgaatggctttggtggtcgtcccagataagaacattcagcgtcagcaagaaaggctgtaggtatttggctgaatgtaatgttttgttgttgatgtgctgttgtttttcttttcctgggtgtgtagtaggagttgcaaatgcgggctgcagattagcaacgggaaccatctgggtgagcctagcagggaccagccctcccatgggagagagaggtgacacggagcagctgatgctttcgtaatgattcgaggcagctgccaaaagaggcagagcctttgcagaacagcctgtctgttctgctcctagacattagagagataatacggctgataggtgagttggggaaggcttgtttggacacattttctcagccttttttttttttttttaacctctggtagaaacgggcatagttgaaagatccattgacctattgtattctgaaactcaatggatcatcagcttaggcact

SEQ ID NO: 43373 - DNA, 2300 bp, Homo sapien
accgggacagtcatcacgcagacaaaaggggtttggtgtccgagtcccgggcggcggggactcgcagggccaccccagccgcgttccgggaaagctcgtaattcatcccgcagccagctcgacgcgacccagcggactctggaagccggccaggggctcagggctgcccgcccggccactccaggttgtctgcccagggccaagacgaaagcagacggcctcacgcccccacccctgcttcccggcggggttcgcagaccgtctctggcggcctagctggcgccaggccgctttctccgcggcggagagacccgaccccgagtccccgggattagggttgtctgggggcgagtttcctgggtctcccgggaggttggtgccggggtgggaggccggacagggagttggggctgaagagtcctatggaacgcccgggccaagtccgcccgcaggcacaggacgctggggactggcgcggctgcccttggaaccagcccagcgccgaggtcaggcgcgcaggcaggggcggggaaagcccgggctctggcgagagagaaaactccgaggacttttgcagagctgcaggagccggtttgttccagcgcccagaggcggagcccggacttgcttttttgcaaaactacctgtgcgccatcagttctttatgggcagctgaagggagacgcgcccccgggcttaagagaataaccttttctaggtcacttaaaggcaggaaaagctacaggtttgggatgttcctctcttataggaaggattttagaattttatttttattttttgagacggagtttcgctcttgttgcccaggctggggtgcaatggctcgatctcggttcaccggaacctctgcctcccggattcaagcgaatctcctgcctcagcctcccgagcagctgagattataggcatgcgccaccacgcccagctaattttgttttgtttgtttgtttgtttgtatttttagtagagacggggtttttccatgttggtcaggctggtctcgaactcctgacctcaggtgatccgcccgcctcggcctcccaaagtgttggatgacagacgtgagccaccgagtccggcctgggttttagaattttaatcagcagttcgcgctcgttcagaacccgggcgaatgggcaggcgcgtgtttgttgtgtatccctatttactttccatgtgtgtcactatttttaagtgaacgccattcaagagatgacaaaaatgttagatgacataggcattgccaggacaagaagaaaatgatcaccgccattctaaatgaagtagctgatgcaatctagctttacccgagcttttccattttttagtgactccatttttttctgtttgcctgaatatatttcataagcagtcccttcctgtttattgaatgatcagaggttcccccaaacttcctccccgattaacagcaactctatatcatcaaaaaaactctctggcttttccaagacaaaaacataaggatagtaaataaacccagaaataacaggatgaatatccttctagcaaatacctctttaagctcttcaagaagctagaattaaaggtttgaaaaatatcattaaaggaaagaatacgaataaacacttcttgggaagttttaaattcaaatatatgcaatatataatggctcagtcttgttggaggcagaaacacaatattttattattttttaattatggatacataaatataaacctctttcttctctctctctctctctctctctctctcgtctctctctgtttcatagccgcaattacagagtgcaagatagatttccaaatcatagtatcgaagccaagaatcaagactatattctatagtcatgattaaagtgaatggtgaaaagtttagaaaaaaaaccatgtttcatctttctcaattcccatggtttaagcgtcactacaacacatcgtgtgaagtcctgggaagcttgaaaccctgatgcacaattcaaatttaaaaattgcccacagttcgtcggtgctacctgtgaataagctcatctcttcgttgttctacctcaggtatccgagaatcaggcaccccgacaagatgcccaagcgcgcgcactggggggccctctccgtggtgctgatcctgctttggggccatccgcgagtggcgctggcctgcccgcatccttgtgcctgctacgtccccagcgaggtccactgcacgttccgatccctggcttccgtgcccgctggcattgctaaacacgtggaaagaatcaatttggggtttgtaccact

SEQ ID NO: 43374 - DNA, 2300 bp, Homo sapien
aagaacacgttgggccaagagattcttaggcatcaggatctaaacttggcaaccagttgactatgaggaagacatgaaggagaggcagaaggcaaggatggcttgagtttctagtttagctgacgagatgggtggcaacatcattaacaagggtaaagagatgttcaagagacagttgttttttgttttgttttgtttcgtgatttaatcaatgggtttggggcatgcccagaaagaggctacctaagggcattatttgactaatccctggaactatgtcaacacacactgaaaactaaagctagagaaggaatgaattcccatttatgaaccagtatttcctgactatcaactctgtggaagccaccctaggcgcaggaggcaggtggtgaggaattcctagacgctgtgtttcttaggaggagctaagatgaaccacgcttcatgcaggggaagcaacttgtttcttaggcttagtccttccttcctcctgaaagccccctgacagagtgctggacgtagggcaggacttctgaatctaaagagcaggcacttctcaattatactttctccatgcattgccttttaaaagctgcatgcctgctgggctgggtggctcacgcctgtaatcccagcactttgggagtccgaggtggatggatcacttgaggctaggaattcgagtccagcctgagcaacatagtgagaccctgtccgcaccaaaaaaaaaaaattagcccagcgtggtggcgcaagcctctagtaccagctgcatgggggacggaggtggagaatcgcttgcgcctcggaggcagaggttacagtaagccgagatcgcaccactggcactccagcctgggcaacagagcgagactctgtctcaaatacatagatacatatatacatacatacacacatacataaatgccgcacgccatcagcctgcttcaggggcatctcagcagacaggattcgttgtacaagtacatggtaccactgggcttgtaaaaaaaattttttttatactcacagatgtcttttgtagatcaaagaacacaacaggcaaacactgaccctaaggacatgtcaaaatgctggttcagggagaggaatacggctaaccagaggtatagcgaaaagcagtcgctggtgcaccctacaacaagctggtgcaatggtgcctttccgggccctacacacctgtctgagctccatgtttttaccccaggttggctctgctgactgaagatactcgcctgacctctccccaccattccaggtctgacttatccaggaagccaggcagccgccgcctcctcttcctctgcctcctggaatagggacctaccctctgcaccctctactttttgccttgtcgccaggtcgctcccaccctcccaccgccccctccccagacaataccatcagactctccgaacgtcccaaccctcgccttgcccctcgaatgctccccaagccggaggggagccgttccacctttctggcaggaagactctggcaaggggagggaggcgggcgccggggagtcctggagaggcgggagggcgtggcggcggctctcacgttgcagccctgcctgcagctagtgggatgccggcggggccagcccgctcctgcttgcacacggtctgggaagagctgccgagaaaacaccgtctggcccggagaagcgcaaaccctgctccttctctctctcctgaaaggaacggaaacgttcccagcgctgcttaggcgctctccaagcgcggactctactgcggctcccaccgcgctccctgcatctcgcccttccctcctggggtcctggacttctctctgacaaagagccctccttccccgagccgcctgcggttcttgcagctggagtgggcgaggcatgcccacccgggcccaggcgcaatgaagacgcgagaggaaggctgagcgcagagcggcgcggccagggtcccttggctcgggcccgcgccccgtctccccggggtggggcagggtgggggtgtgccgaggcgtggacttggggaagcctcgcagcgccgggaataaaagggcgccggcttgctgtgccgcgctgggaagccgagctgcctcacccccggccccgggaagggcatggccccggcaaactcccggccgtgactcgcgcgccccggctcggtggatgctcccggcgcaccgctcccgtgtgcggcggcttcccaaggacaggtgaggacccagggtggccagggcgccccagggctgccgtgtctgcctgcagggggtgaagggatttgagacac

SEQ ID NO: 43375 - DNA, 2300 bp, Homo sapien
ttgtctctcaagtaataggctgtggtttctcaaggatttttatgatccttccagatgaaagctgttttgtcaagcaaggtgttgtgaaacgtgcagggtctatttataagaagaggtagctatgcggtcaagttcagggtgggttcggtggaatcagaccaaccagcagctcaagcagagtttaacgctgcaaatctgtgccacgttcttcttcctgcgtgcaatttgcaggcaaggacatctgcttaattgggtgtgaaacccgggccttgattaaaaggactttatgaggccgcagccttgcatttccaaggtcaggccctagtggagagggcgcgcgttccgcggggagacacgaacttttcctgagtgcgcgttccttgctggccctgaacccctcggccaggcagggcttggcagggccgtttcctgtcctaaccaggatcaagggattgcgcggcttgctggtgaagcttggcagggccgtgacctgtcctaaccaggctcaggggatggcaggggcctgctggtgtcgcatatgttttgcattccagctcaggattttgcagagcatagggagcgggtgtcacccccggggggaaatgccacccacaaaatgcaggtggaggctgggcgaggctggcagccaggggccagaaatccaaagcctgagccaggttcagacttcctgactccccctccccgttagctgtggaaggatggctcggcctggtccccctaaaaatgtgtccgttctgacttagaggccgctttggctctcggaaagcccccctgacctgcggactgagggactggagaccccctccaatcgcagaatcgctgagatccctcaaaacaaaggcgtttgcagtttgaccccttgctgctcaaactgtggtcggcgaaccggcagcctgggccgccctggtcgcgggtcaggggcgcagcgtccaggccgtgccaggcccgcaagttaagcactgtctgcatttccctggggaaaggggtgaccaaatatctagctatatttgcatttcaaatccacacggatatgggttttaaatataagtatgtccaactattgcctgagccacacttaagccaggaaaaaaaaatctttggggtttctgaaattgaaatgcctctgcacaattctttatagggttgtcgccggggtgtttgaaacagtgaccaatcaagtttcacgcactacatttggtcgggcgatctctcaaatctgtctttccctagttttttaaaggaatgtttatttgtaaagaattctagatccacaggaagctgcaaagaaacgcacagggtcgagcccgcccttccccgccccttccaagtagaaatctagaatcaccagagtcctacagcaaaaccaggacgctgaactcatcccgaagacccggcagcccctcttggggatccgccctcattccaaattctctcaggtcccaaacaagcacccgcaggagtactgaactttttggggggagggcagaggggatctgtatgcagattgccagctgagcaatcctattttctatgacttaaagccaatcagaggctgggcgtggtggcttatacctgtagtcccagcactttgggagaacgaggcaggcggttcacttgtgctcaggagttccagaccagcctggccaacatggtgaaaccctgtctctactgagaaaatacaaaaattagccgggctaatccgagcccctctcttcaccaaacgccagtttcactttttagttttgaacttcacttctgctgagctacgccctccctgtccccgggccccctcgcctccccatcttccgggcttgggtgcagcgacgcgggtggcccgccagtgcgtccccgaggagaagtcagcctgggtcccaccccaggggtgccccgggcgcggagggggcgtgggcacctccccagcgccgcacgcccgggtctccggctcctgggctgggtcggggcgggggcggagcgcgcgcgaaggcgacgcccccagccccgcggccgggttagggcggggagaggcgcggtcacgcccaggcggcttccgcccgccccaacagcgcgcacgcggctaccgagctggaggaggcggcgggcgcgagacccggaatgcgcagggcccccgcctcgccccccccagcccgggccgcggcccccgccttccccgcagtcgtcccgcactcggtgcccgccccccgaggccggcggctgctcccactcggggccgttgctgcttgtgccgtgagcgccgcccagccattgtccccgtcgctccg

SEQ ID NO: 43376 - DNA, 2300 bp, Homo sapien
ctgtcacaggagagacgtggtgggaagtaattgaatcacgggcgcaggtttttcccatgctgttctcatgatagtgaatgagtctcatgagatctgatggtttcataaagggcagtccccctgcacacggtctctttacctgccaccatgtaagacttgcctttgttcctcattcaccttctgccatgattgtgaggcctcgccagacatgtggaactgtgagtctattaaacctcttgccttcataaattaccccggctcgggtatgtctttattagcagcatgagaacagatcaatacagtgtgtgtgtgtgtgtgtgtgtgtgtgtatgtgtgtgtgtgtgtgtgtgttttgtttttcagtacatttacaaaggaaatgattcttatattggatacatgtgcatagtgcagcatgacaattatttccatttgtcactgaaccactcctgccctttttaaatgcaacaaacagggtaagaaccatgtcaaagctatctacttatcctctagcagaaatcatctacaggctttcttctgtctaattcaaagtgtagcacaaatgaaagacagcttcattaattataagataaatgcccaactgctttctgggtgcaaaatttcctgaataaagctgggcaataggattagtaccaactcaaagaacgatataattaggaacaggagtaaagatgactgcaagccaataacattatctccctaaaaatagtaacagttttcaacctctatctacaaaatttgatttatgtatctctcaaatacaagataattttgtttaccatcttttgtgcttctattccattaaagcttttcataacattcaaaaatgcatcagccatgaaaaagacatggagcttgaaacattaataaggtattgaaatatgtttcaccctgaaggttttataccctgtaatcagacatccttccacctcgcacagcatatgtttctgatgaaccaagaagtgtaaaaggaacataatctgcatgaaactaagatattgaaagttcatacttacttttaaatcactggtttctctgacaccagaaaataatgctattccacctagaaatcagatgtgtaccacttattttgattagactaaaggatgtatctgtctatcatctatgtatcaattatgtatctatccagatttatatacttatcatctaccaattagcaatctatctctatagcaatatagagatatatagacaagatatagatagactctgtattaaagaaagttaaggaacagacccacatgtctgtattacagacttaaagcttaagagaaataatctccaacctgggaaatacagcaaaacctaaaaataaaaactaggtgttgctatgttgcctaaaaataaaactactttactaaaaattaaaattaaaatattggctaagagtggtggcatgcacctgtagtctcaactactcaggaggctgaggcaggagaatcgcttgagcctgggaagtgaagtctgcagtgagccattatcacaccactgaatgccagcctgggcaacagagcaagaccctgtctctaaagaaaaacaaatctgctaattgaatgtataaatgagagaactaggtgaagaatgatctagcaataaaacctgtaaagcataattttcctgaagatttgattttgaagagattaggttgatttcaggaagaattattttgctctaaaggtgaacacatcttcaactagccacagcaggttaaggcatctgtatcccaggctataataatgaggaagctactaagcctacaacgtcagagaatgaaacacaaaccaaccatcttcctgaaattccaaactaaaattggaggtgaatttaaggagaatttttggtctctgatatgatttggctgtgtccccagtgaaatctcaactcaaattgtgtctcccagaattcccacgtgttgtgggaaggagccagggggaggtaattgaattacgggggctggtctttccggtgctattctcataatagtgaataagtctcacgagatctgaagggtttttcaggggtttccagttttgcttcttcctcattttcccttgctgccaccatataagaagtgcctttcaccttccaccatgattctgaggcctccccatccatgtggaactgtaagtccaatgaaacctctttttcttcccagtctctggtatgtgtttatcagcagcgcgaaaacggactaatacagtctccttcaactctctgttgcctaaagaatttaaggtatgattgcaatacctttgaca

SEQ ID NO: 43377 - DNA, 2300 bp, Homo sapien
ttgagaaagagagaacagtgagtgaagaaaagacgtgctgaagacagaatcgttctgttagaaaattgctcgtgccttaggaattaatcacctctttctttaataggggaagaaagcattgccctgtggtattatagggcacctaaactgacatgattcgtcattgtcatataaggatcttcgatcttttctcccaagcaaagcctgatgccttttatgaacgatcgtgtcaaagatatagtgatggagacaggtgttgcagaacatttttggcatgaagcactaattagtaattgctaattaaatgggggaggaggcttgggtaatgtctgatcgcacccactaatcgtagctaatctcccgtcacatccctctgaactttaaagaagatcacattggtaggatgtgtcttaagtatccaacctcgcagttgcgacgctgcctctctttgaagctgcaggagatagtgactcccgattcaggcttggagtttttattgtcattgttgaacgaaaatcgtcctgtgactttctttggagccaggccatttcctcctttccagctcagagcatttttccacaggtgctcaggaaagctcatggaagaaatgctggttgactcaattggtatgcagcctcatcctctactctttttgttttaaaagtagaagccggcactcagtcactccttggaatgccgtcaactttggttagggacgtgctttgagggaattggtttgatgttattttagggcttaaagcagcctgtcttcatacaaacatgactgcaggtggccataataatgtgctgagcatcccttgaaatgagtgaatgacatggctcttggaaaaaagaaattgtatagaaggggcaaatatcatagttgggtagttggggaaggctcaaataaggacgtgaaaatggttaaaaaaaaaaacttttaaaaattctttgtctttttggaaggcatatccagtacagatttggacataaagttggattaaagtttatgcaatgaactaaacttgcaggaggccttagaaaatattcctagttttgaatctgagtaggagagtgtatgtcttcccaaacttgacttcaaaacatcagaagaaagcagtttttccaggtcaagctatttttcaatacagaaggaacaaaaaataaaatagattaactcataactttgctatcattaataccaaaattgccatttttcaactactaaggagaaattaagaatcgtatgccttgagtaaaatctagatcctcaactcacagaatccttctttttaaaataaggaaggccagttcctgatattttgggaacagttggggagatgtgaatattcattagcttttgggtgaggttcaataattacatttttttgtatgtgactaatattttcgctatgtaggaaaatagaggtgtatactatttacgagtcggatctagtggagtctgtaacttacgttgtttcttaagcattgaaaggagttaaaacaaaatgttaataactaattcagtgagaaagacaggcgcacactgcctttgtatacatgcacatattcttagacacagacacacatgtgcacttacgccccctcccccccccacacacgtactgttttccctgaaaaatttcttgtaggagtctgttgcatttttcaaaaaagaaaatgaaaatgtgcacagaaatgataccttgaacctagtaaaatttacgacgtcttctgggattgcttcatgttattaatattttagattcattttgccttctctattagccacatatatacacaaagatgccatggtatcataacatcaacctaaaataaccattatttatataattatttctgccacaaaattttttctcctgttcttcctctaattggtgggggtgagagttgaggagagagagaatgaagaagacaagctatgagatatcttttcaaatagcagagacacgtatgcactttttctatttggccaccaaaaatatcttgtgttcttttgtagggtttttaagtaccggtgaccaggcagcaaaaggcaactatgggctcctggatcagattcaagcactgcggtggattgaggagaatgtgggagcctttggcggggaccccaagagagtgaccatctttggctcgggggctggggcctcctgtgtcagcctgttgaccctgtcccactactcagaaggtaataatggcacccccagggtgggcgggcaaataccctgaaccaagaaatgaatggtcagagttcatatctcagatgcatgtcctggtta

SEQ ID NO: 43378 - DNA, 2300 bp, Homo sapien
aattaggaggatatcctatgtgttgcggacactatctttttccttccataaatgaattaatgggccatgaaataattttaagaaaagctaacttttctggccaagcagaagaataaaagtaatcaccatgtaatattgttgtgaagactacctggccccacacattaactcagctaatcattacagtattacacggtgattatctgttccattttacagatacagaaatggaggcaaacgattaaaatacacacctaaggtcacatgcatcttgaacccaagcaatctcattttaaaatccgtgttcattgtcacaacactctattatgccctctgatctttgcattgccaatttaaatccaactttctccaactcaactttaagtacaggggtcatacccccgtcctcgccccccgcaacttgaaactccctgggaaagataacctcctggaccctggaaatgaagaggcgtatttaaaaacaaatgcctcatcctgggcacaattccaacattttatcaaaatcatgaaagtataagaatagaagtaaacaaaaagctttcatcgatcccctctcaaccataccctgagcataaaacaggtcctgtactttacagaactgtattccaaattttgctgctcttaaaaattttttttatatcattgcttcccaaatgaattacaataacgcagacatagagactgctggagatcgtgaccttaaacagttaaagatgtttgcatatactgcagcatgtttggtgtggagggtatctagagagtcctaaaaaagcaaagaggaagaaggtttgctgtacgcgtctggtgcggtggcaccgtttgccatgcccacctgctctatctcccgagtacccgggatctctccgttacagctggtttgcattgggattagcagctctttgcatgaggttgtagctgtggatgtggtttctgtagtgatggggccgactccggagatctattggctgctggctttgtaaatttcattcagtttggtccaatggcagagggagagccccggagacagcaggacctctctcctcaatctctctttttcttgcagaaccgtctctctcccttctctgtctcttagcacagagctcttattcagccactagcttggcccttcctgcttcaattgtaatgcttgttctgcccgtccacagactattggcggcagaaacaacgaatttcctccaaactaggcggtgttggtggctcttgcattcctctggatgaggaaatctagttggggggttccagaaggggaaggctcctgggctttcaatacatcctcctgaatcatacctcgtttcgggttccctagaaaaatctggacgtgtaaaaagaactcttaacggccgatgcagctcttccaaagctaaggtaggtgcagttttaagacctgtctctgggacattattctcattttaaaaagccgtttaaacattttgacttgcagcaaaggatggaaagcctcactgcagatacttgagcttcacttcatctgatctttattttttccttttatgattattaatattatttttggaaaatttggacaggactttctcccatctgtctcgctgcatttcttaggtgtgggtgggagtgtagaccttcatacggtttttacatgcaacctctccacagaaatatttggttttattttcacttaaagagaaaaatccagaccaccgttgtttggaagcgttttgctgcaatcagctatttgaacggctctggggccgtgtgtgatgtgtttacaaagtagcgctgccttccacacaaataaacagaagactgtggcggggagaggaggaaaaaaatatatatgtatctgcagtacagggagaagaaggagagaagcggccagggctggagatggtgaaggcaggaagacttctgcaaactgtgaggcatgggaggcttttcttttctttttctctccccccccaccccccccccttattctttaagaaaactgtcagctaccaccgcctggggtgcttttttgaggggttgggggggtgctgttaaccagaaagaaaaagggaaaaccggcttggttggggtcgcatttaagcgattttttttccctccttcatctccgggcctcggataagatgacggcttgggtgatgcacgaaataacgcacgtgattgattagacctggcttggcttggctagggaacgatccaggcgcgctggagaccccgcgtgaagatgaaatgacggtagctccgggctgcttctgtaaaccggggagcgggctcca

SEQ ID NO: 43379 - DNA, 2300 bp, Homo sapien
tatgaattcatatgtattccttgtgcacaccttcttgtaatcatattttttctcatgcttttggctatcttgtccactagactgtatgctttctcaaaaataaatggatgagtttcactcacagatgcatgtcagtgcttaggactgcaccagtgctaaaaaaaaaacaaccctgaatttatgaataagtcaatgaattaatacattcttggcaaaacccatgactttctggcctactataaattactgtgttcaaggtgagattctgctttagtttaggatatagatatctatatatatgtccatatatctgcagctatatatccatatccatgtatatcactgatttggggaataagctatacttattaacaatattactatgttaatgggtcttcaatatctatacaataacggaaaaagtacatgcatatttctaaatatctatccaataattggaacacacacgtatgtatggatggatatatttttttttattattgggtatagatatctattaatagataagtgtatatttatgtacctatcttgttggtaaaaggtgcttttatacatattatttcatttagtctccacaagaaatccacaggaaaggtaattttaatctcagtttaacagattcacagaacataactgactttacaacaaggcaaagtttgtgaggatagagtcttaacatgaaaccaggtccccaaattggtgtctatcaccttccccattattggtcaggctgcccaaatatccttcacatcaccatggcaggcttcatgctttggtttactgcctaaagccgaagcaattaggaggatatcctatgtgttgcggacactatctttttccttccataaatgaattaatgggccatgaaataattttaagaaaagctaacttttctggccaagcagaagaataaaagtaatcaccatgtaatattgttgtgaagactacctggccccacacattaactcagctaatcattacagtattacacggtgattatctgttccattttacagatacagaaatggaggcaaacgattaaaatacacacctaaggtcacatgcatcttgaacccaagcaatctcattttaaaatccgtgttcattgtcacaacactctattatgccctctgatctttgcattgccaatttaaatccaactttctccaactcaactttaagtacaggggtcatacccccgtcctcgccccccgcaacttgaaactccctgggaaagataacctcctggaccctggaaatgaagaggcgtatttaaaaacaaatgcctcatcctgggcacaattccaacattttatcaaaatcatgaaagtataagaatagaagtaaacaaaaagctttcatcgatcccctctcaaccataccctgagcataaaacaggtcctgtactttacagaactgtattccaaattttgctgctcttaaaaattttttttatatcattgcttcccaaatgaattacaataacgcagacatagagactgctggagatcgtgaccttaaacagttaaagatgtttgcatatactgcagcatgtttggtgtggagggtatctagagagtcctaaaaaagcaaagaggaagaaggtttgctgtacgcgtctggtgcggtggcaccgtttgccatgcccacctgctctatctcccgagtacccgggatctctccgttacagctggtttgcattgggattagcagctctttgcatgaggttgtagctgtggatgtggtttctgtagtgatggggccgactccggagatctattggctgctggctttgtaaatttcattcagtttggtccaatggcagagggagagccccggagacagcaggacctctctcctcaatctctctttttcttgcagaaccgtctctctcccttctctgtctcttagcacagagctcttattcagccactagcttggcccttcctgcttcaattgtaatgcttgttctgcccgtccacagactattggcggcagaaacaacgaatttcctccaaactaggcggtgttggtggctcttgcattcctctggatgaggaaatctagttggggggttccagaaggggaaggctcctgggctttcaatacatcctcctgaatcatacctcgtttcgggttccctagaaaaatctggacgtgtaaaaagaactcttaacggccgatgcagctcttccaaagctaaggtaggtgcagttttaagacctgtctctgggacattattctcattttaaaaagccgtttaaacattttgacttgca

SEQ ID NO: 43380 - DNA, 2300 bp, Homo sapien
ccagggagttcaataaccattttcctcaacgcaaaattccaacctcatgttagaaatattacctcatacaatagatatctactttatccaagtaagtaattaactagagataactagatgaagccagtacttgaaataaacaaattcttttcaacactacttcttatgtcttagtgacataaaactagacatttagtggtacctaggcaaacagttgaataaaaaactagcaattactgggaaaactggttaacatagaaagtttagtaacgattctagtcaactctgtgttctcatttttttaggattgttgactaggtacgatggatatggtaactagagttatctgagtaagagttaaatacagaatcctccataaaaccagaataactggttgaagacaagaagcataacattgcattttcctcaacatttctcatctctttttggaataatgagtcagttctgtcagtgggtagtagtacctagattattacaaagtaagaaataagaagagatggctagaataaatatttgataccagaatggtgaaaaaaaaaaaacattcttttcaaatagaaactctaatttcctgtgtgattaatgagttacacttagtactggagatatctgtgtaagatgtggatttcattgtgggagtggggtacctactcaacagatgaactgctgggtcacatggtagatctgttttgattttccaaggaaccattacactgtttttcctaacggctgtaccaattacacgtctgtcaacagcgtgtaaaggtcccgttttctgcacaccctaaaagggtttcactctctccacagctttgccatcattatcttttatctctcgactttttgataatagccgtcctaacaggtgtgaggtgatagttcattgtggttttcatttgcattctctgattattaacgatgttgagcacattttcatatacctgttggccagttgtgtgttttctttcgagaaatgcctattcaagtcctttgcctatttgttaaccagactatttatttatttgctattgagttgtgtgagttctttatatattttggatattaactcattattagatatatggttcgcaaatagtttctcccaaaccatagcctgccttttcattttgttgattgttgactgtgcagaagcttttagtttccaggctgcccacttgccctacatatttcagcttcctagacccccccacattgtgtgaatgtgtgagccaattgcttagaataaactgtatcatatatataatattattcataaatcaatactacatgatagtaaatacatatttatcatatatattacacactcacacacacacacacaaaaagtatcctgttggttcagtttctccttctctgaggaacccagcctgatacagatacccagctgagcgagtgtgtttgctgatcttgacctctggaagccagtgctttaaaccatgagaatgaaaaattgtgaggcactatgtggatgctgggagaagtatgtgagatggaaaagttgtttcatggcatccaagaagtgaatgatcctcaaggtgtagcagaggaatctgtaggagagagggatgattgacgtcttcgtatagccctccatccatcccagttagcatggagggattttaggtaggtcatacagaaactgggtaatgatggcaggtgtggaggaacagaatgtaccactgaatgggaggtccgggggaaacatgtgggggaaatatcctcccgtgccacgtgatctgccaaaattgaacacggggagtttaggaggggtgacatgtcagtttgggaactatctttaggggtgctaacccaaatctccctttctccaattagagcaccctgccttcctcattagatgtcacccccccccgcccccgacttcatccgccatgtcctgatggtgcgttgtgacgtataaggccttccttcccacccagggctaccattggctgggtagtggagtgttgaccaatcacagctcaggggcgtgattgtctcgtcctgggatcgcgagaggggtatatacagggaggccaggcagcctggagttagtcgaccgttgcgagacgttgagctgcggaagatgagtccaaagccgagagcctcgggacctccggccaaggccacggaggcaggaaagaggaagtcctcctctcagccgagccccagtgacccgaagaagaaggtgagtgaccctcccaagctcctcctcgtcttcccctcgcctccttcctcacaagaagcctctcctgtcgtca

SEQ ID NO: 43381 - DNA, 2300 bp, Homo sapien
gtatattttacctcgataaaaataaatttcaaaataaaatcacgttcttctcaccacttactgctgagttattgttggaataatgaattagtactacacgtaaggcatgtacctacgtaaatagtaaaatagagacaacaagaatagttcagtggaatgtagaacatagggaatctagtctcgtcaaatataattttattggtgttgagttatatacaaattctacttaactgggctttcccatgaaacacgttacatagaaacagctaacaatcattacaataccaagtgaacctgaccctgaaactcatgttctttgcaaatctcaattattgattttagttgggataagaacttagaaggataggtgctgagtgttacccaggaaaaaaggtacaaaggataacaggagataatttgaatatctatgtgatgccaggaaaaagcaaaatccttccttatcattctactgttttgttgggataataaattaccacagacatctggtggtaaacatttaattagcaacctaaagatagctagaattaaccagaccaagtaattgatcccaggaagctgaagataactggcctatgccagggagttcaataaccattttcctcaacgcaaaattccaacctcatgttagaaatattacctcatacaatagatatctactttatccaagtaagtaattaactagagataactagatgaagccagtacttgaaataaacaaattcttttcaacactacttcttatgtcttagtgacataaaactagacatttagtggtacctaggcaaacagttgaataaaaaactagcaattactgggaaaactggttaacatagaaagtttagtaacgattctagtcaactctgtgttctcatttttttaggattgttgactaggtacgatggatatggtaactagagttatctgagtaagagttaaatacagaatcctccataaaaccagaataactggttgaagacaagaagcataacattgcattttcctcaacatttctcatctctttttggaataatgagtcagttctgtcagtgggtagtagtacctagattattacaaagtaagaaataagaagagatggctagaataaatatttgataccagaatggtgaaaaaaaaaaaacattcttttcaaatagaaactctaatttcctgtgtgattaatgagttacacttagtactggagatatctgtgtaagatgtggatttcattgtgggagtggggtacctactcaacagatgaactgctgggtcacatggtagatctgttttgattttccaaggaaccattacactgtttttcctaacggctgtaccaattacacgtctgtcaacagcgtgtaaaggtcccgttttctgcacaccctaaaagggtttcactctctccacagctttgccatcattatcttttatctctcgactttttgataatagccgtcctaacaggtgtgaggtgatagttcattgtggttttcatttgcattctctgattattaacgatgttgagcacattttcatatacctgttggccagttgtgtgttttctttcgagaaatgcctattcaagtcctttgcctatttgttaaccagactatttatttatttgctattgagttgtgtgagttctttatatattttggatattaactcattattagatatatggttcgcaaatagtttctcccaaaccatagcctgccttttcattttgttgattgttgactgtgcagaagcttttagtttccaggctgcccacttgccctacatatttcagcttcctagacccccccacattgtgtgaatgtgtgagccaattgcttagaataaactgtatcatatatataatattattcataaatcaatactacatgatagtaaatacatatttatcatatatattacacactcacacacacacacacaaaaagtatcctgttggttcagtttctccttctctgaggaacccagcctgatacagatacccagctgagcgagtgtgtttgctgatcttgacctctggaagccagtgctttaaaccatgagaatgaaaaattgtgaggcactatgtggatgctgggagaagtatgtgagatggaaaagttgtttcatggcatccaagaagtgaatgatcctcaaggtgtagcagaggaatctgtaggagagagggatgattgacgtcttcgtatagccctccatccatcccagttagcatggagggattttaggtaggtcatacagaaactgggtaatgatggcaggtgtgg

SEQ ID NO: 43382 - DNA, 2300 bp, Homo sapien
ctctgtctcataaaagaagaaagaaaaaagaaaaatactcttttttaatttaatgactaaacagaaatgtgaggtggttacaataccaaaaaaataacagtaactctgacatgtgtgcatccatttgtttccagagaatggaaggaaactgggagggagaattctacagactccaggtgggaaatactgtcatacttactgtaggtaccacagctatgtgtgtgcaatgcatctattatggaattgtgttcccaaaaatatatgttggagtcctcatccccgctacctcagaatgtgaccttatttggaaacaggattttgtcagaggtaatcaaattaaaatgtagttattagggtggtccttagtccaataagaatcgtgttcttataaaaggagaaaatttggacacagagacacacacagagggaagacgataggacaagatacagggaaaggaaagcaggttcaagctgaggagaaagacctggaataggtcctttcctcacagccctcagaaggaattaagactgctgacatcttgatctaggacttctggcctccagatctgtgacacaatacacatctgctgtttaggttacttagtctgtggtatattactatggcagctgtagtaaactaatacagaaaccacgaacgactgtatttgaggcgcaagtccctacctaatttgctcataaattgccttctctgaaatcccgtgtcctcaaagggaaatcacgattgcattaaatgggggaagctctcttatagtaccacctctaagaacacataattttattgactatatattatgcactggtactaagggcttggcctgcctcacctcctttatcacctccattttacccaggaggaaacagacacaggtgcactttgtctatcatagataataattcttgctgaatccaggcatgcccctgtccactatgtctgcactaaactagaaatacactctcatgtttacacctttttttttttgtctttttccccttttgtggagaacagggtctcgctatattgcccaggcagttcttaaacttctgggctcaaactattcccccaactcccacttctgcctccctaagtactgggattacaggtgtgggccactgcgcccagcacaccctcacgtttttaaagtcttgaaattctcctatttccgcttctcaaaaggtccaatccttttccttaaacgtgaatataccacataaacgaacacgaaatagaaacagggacaaaaaagtatttttttgacgatggcaaacgggaaaaaaaaaaaagaaagctgtttaggtggcatttgaaaagttaaaaaagaaagaaaactcagagcagcccaaaagacagatgatacctaagaaggcacaaccagcaagacatgttgactgttagtattatttcagcatcctccttgagcagcttggctttgctctgggacaatgcaccagcctgggatgctcagagatgcaggcacggaggttgtgcagcctctccgcacactgcgcatgcgcggctgccggttcaagtcgcggtccaggaccgcaaggaggcgggcaagcgaaactgagaaaaacccacccacggtccagggactgggggctcgggcgaacccacccagggacctcctgaccaaggccatttgtctgcaacctgatggctagaagtgataccaccctgagcatcttcaatcccctttccccactctacagccccttgtactgtccctccttcctcattcacacccctgatccaaactcaagcactgaatttgtccccagacgagggcctcggctctgcgcggccgctggctgagtagcttggcccgattccgggtgtgaagtgaggaggaattgatgcgggtaaacatacagcgccggcccgcgccgcatcccgggtctgcagctacagctgcggcgaaagcccaaggtgcgcgtgcgcggagcgccactaggcagcccaggacgcgcgggctcggagccgggcgaggggccgcggaaggcgcgtgcgcagagcgaccccgggcgcgcgagaaggtcctcagtgcgcgtgcgcggggcgggcgggtgcgcgcgcacttcctcctcgcccccacccagacccagaaggcgccaccatggcggcgcccccgcagcccgtcacccacctcatctttgacatggacggacttcttctgggtgggtagtgtgcagccgccgcctccagtaagggcggtcttgtgtgggcgtggggacggtcggcgcggggtacgtcacggcctgggggccgcggcggggcggtg

SEQ ID NO: 43383 - DNA, 2300 bp, Homo sapien
aagaaggttgaaggtccccagaggtcagacagctatgatataagaggttttgagcatttgcatcacataccacattttctaggcactaaagagaaggtaacaaggctttagcttttagaggcctccacatgatcaacaccttccctcctgagcatgtcggccccctatggccatgcacttgccagcagcctctctatggcaactttttgcctttttattaaaattgctcgggcgtatgagagccagttctagtcccaatagtatgcccatctcatccaacctcttactgcttcggaggtttgttttgactcttgtttggttttcctaaggaatctggttgaaagagagaagagagaaaaatatttttcaaatcaaatttctgccccaggtatttgtagagcaaagccgctgcttcaccaggctagagtcccttccccagggcccagtaagactttcatgggccatgaaggcaaaacatattaaatatgttttaatatgaaaatatattatgtaaaaacataaaacattaacatttgtattttacaactatattggtgcaaataccaatatgatcttcaatccccaatgttcattttcttctgattataacacaaattaaaacattttgtgagcccctaaaaaggccttagagtgtgtgcctgttgggtaacaatctggcctttccccactctcagatcatggaggttgggactgttttgtgtcttattcctctctgcatttctcagcctctctcttgaactaagaagggagttgatgaatctttgcagaactggaacttgtattccccattgcttgacatcaagctggaagtgtagtaaacattccccacattgttgaattgaatcacattagaaagcagggtattagcgcacagcatttttaattgccaaggaaaattttattttaactttgcattaatatgttctaaggaacctttatacttgatgcaatcagattcctgagagaagccaatacttttcctgtttttgtgttttatcctccattcttcatcgtatgcccttcaaggaaatctgaaaagttggcttttttgaatcattagtcacattgatatgtagactgcaattttgcttttcctgcgggattgctgaccttgtaaaatgatgcttatgtatgcgtcactaatctatgtgcttaacttttaacatctatgtaatgctaagaatatagacatcgcctgggggcaggtggaggttgaggaaccctatagagaatgatctgatatcatgtgtgatcagatagtgagggtgagggcttcttgcaaaaactggattttacaaagaagtgcacagataatcttagaacaagattcaggagactgggttatatttggtcaaggaaggaatctttgtcaagggatttcttaacctttgctgttttccaagatcaaagggttcgggtggaatgcgacaatgtcggtggtatttcaacttagcaacctctttttttgttttgtcatggttgctgagctgaaagggagaaaatattcaagggatccaccaagaaaatgctcacttaggctggaacagcatataataagagatatgttgtggttataagatcaacgattgccaaaaagctcacttgagggtctctcaggctgacaccacttgtcacttagcagcatgatgcaacctggctctgcagttagcaaacctgggctttccaaaagctaaaaccacctcagcacaggtgcagcttttatagaccttaaaataaagcttactcttataagaatagcttaaactatctttaggaaagaaatgcctggtcattgacccagactgaagacaggtataagagaggggggaaaatcccttaaactcccgttcagtctcttatctgaccatctcattctctatggcccatgtcactggcctgttcctgctgtaagtttcataacactgctgctagcataaaccgcttgggtatcagattgtgtctgcatttatctttgacacaaatcataccgaaggggagaagttgccccttctgaagaatccggtttaccaggatcacctgaaactcccaaaagaatgcagcaactaggcaaagagtgtctccgcctcacattatctgcccaagcacagtgctgttggccaagcctccagcagctgacgggacccagctgtagtgaggttgcagtgattgagtaggattggcctgcttcaaagcagaggtttctcatgggaatatgcttattaaactcccactggtgcagaaaccatgaacagaggatgaacaagtgaagttgcaatctc

SEQ ID NO: 43384 - DNA, 2300 bp, Homo sapien
gcaattggccaaaacaaaggggttacagtgcccatgcaagtccaaaatccagtggggcagtcaaattttaaagctccaaaatgatctcctttgactccaggtctcacatccaggtcacgctgatgcaagaggtgggttcccatggtcttgggtggctccgtccctgtgactttgcagggtacagcctccctcctggctttcatgggctggcgttgagtgtctgcagcttttccaggcccacggtgcaaactgtcagtggatctaccatgatggggtctggaggatgatggccctcttcttacagctccactaggcagtgccctagtaggaactctgtgtgggggctccaacctgacatttcccttccacactaccctagcagaggttctccatgagggtcccacccctgcagcaaacatttacctgggcatccaggcatttccatacatcttttgaaatctagtgaagctttcaaaacctcaattcttgacttccgtgcacctgcaggcacaacaccacgtggaagctgccaaggcttggagcttccgccctctgaagccacagcccaagctgtacgttggctcctttcagccagagctggagtggctgggacacagggcaccaactccctaggctgcacacaacacagggaccctgggcctggcccataaaatacacgttttcctcctgggctagagataactagatgaagccagtacctggaataaacatattctttgtcatattttttcttatgtcttagtgacataaaactagacatttagtggtacttaggcaaacagttgaataaacaactagcaattagcaggaaaactggttgaacatagaaagtttagtaaccattctagtcaactctgtgttcttattttttttggattgttgactaggtactatggatacagtaactagagttacctgggtaagagttaaatacagaatcctccataaaactagaataactggttaaagacaagtataaaatttcattcttctcaacatttctcatttcttgttggaataatgagttagttctgttaatgtgtagtagtacctaggttactacaaatcaagaactaggaagagatgactagactaggataagtatttgacaccagatggtgaaaaaaaaaaaaccagtgttttcaaatagaaactcttatttcctgtgtgattaatgagttagaattagtactggagctatctctatgagatgtggatttcattttggggggtggtacatactcaacagatgaaattttgggtcatatggtagttctattttgattttccaaggaaccattatactgtttttcataatgtaccaataacatttctgccctgtaagggtccccttttctgcacaacctaaaagggtttcactctctccacacctttgccatcattactttttatctcttgactttttgctaatacccgtcctaacaggtgtgaggtgatagttcattgtggttcatttgcattctctgattattaatgatgttgagcacattttcataaacctgtcagccagttgtgggttttctttcgagaaatgtctattaaagtcctttacctattcgtaaaccagactatttttttttttttttttgctattgagctgtatgagttctttatatactttggatattaactcgttattagatatatggttcacaaatagtttctcccaaaccataccctgccttttcattttgttgattgttgactgtgcagaagcttttagtttccaggctgctcacttgccctacatatttcagcttcctagacccccacaatgtgtgaatgtgtgagccaattgcttagagtaaagcatatcgtatataatattattcataaataaataccatacaatagtaaatagatgtttatgacatatattacacacacacacacacacacacacacacacacactcacacaaatatcctgttggcttagtttctccttctctgaggaacccagcctgatacaaatacccagctgagcgagtgtctttgctgatcttcaccgcctgaagccagtgctttaaaccatgagaatgaaacattgaggggcactatgtggacactgggagaaggaagtgagatggaaaagttctttgattgcatccaagaagtgaatggtcctcaaggtgcagcagaggaatttgtaggagagagggatgattgattgacggctttttttttttttttttttttttgaggcagagttttgctcttgttgcccaggcttgagtgcaatggcgctatattggctca

SEQ ID NO: 43385 - DNA, 2300 bp, Homo sapien
atacagtaactagagttacctgggtaagagttaaatacagaatcctccataaaactagaataactggttaaagacaagtataaaatttcattcttctcaacatttctcatttcttgttggaataatgagttagttctgttaatgtgtagtagtacctaggttactacaaatcaagaactaggaagagatgactagactaggataagtatttgacaccagatggtgaaaaaaaaaaaaccagtgttttcaaatagaaactcttatttcctgtgtgattaatgagttagaattagtactggagctatctctatgagatgtggatttcattttggggggtggtacatactcaacagatgaaattttgggtcatatggtagttctattttgattttccaaggaaccattatactgtttttcataatgtaccaataacatttctgccctgtaagggtccccttttctgcacaacctaaaagggtttcactctctccacacctttgccatcattactttttatctcttgactttttgctaatacccgtcctaacaggtgtgaggtgatagttcattgtggttcatttgcattctctgattattaatgatgttgagcacattttcataaacctgtcagccagttgtgggttttctttcgagaaatgtctattaaagtcctttacctattcgtaaaccagactatttttttttttttttttgctattgagctgtatgagttctttatatactttggatattaactcgttattagatatatggttcacaaatagtttctcccaaaccataccctgccttttcattttgttgattgttgactgtgcagaagcttttagtttccaggctgctcacttgccctacatatttcagcttcctagacccccacaatgtgtgaatgtgtgagccaattgcttagagtaaagcatatcgtatataatattattcataaataaataccatacaatagtaaatagatgtttatgacatatattacacacacacacacacacacacacacacacacactcacacaaatatcctgttggcttagtttctccttctctgaggaacccagcctgatacaaatacccagctgagcgagtgtctttgctgatcttcaccgcctgaagccagtgctttaaaccatgagaatgaaacattgaggggcactatgtggacactgggagaaggaagtgagatggaaaagttctttgattgcatccaagaagtgaatggtcctcaaggtgcagcagaggaatttgtaggagagagggatgattgattgacggctttttttttttttttttttttttgaggcagagttttgctcttgttgcccaggcttgagtgcaatggcgctatattggctcactgcaacctctgcctcccgggttccagcgattctcctgcctcagcctcctgagtagctgggattatgggcatgcgccaccatgcctgactaattttgtatttttcgtagagatgggttttctccatgtaggtcaggctggtctcaaactgccgacctcaggtgatccagccaccttggtctcccaaagtgctgggattacaagcgtgagccactgtgcctggtcaactgacgtcttcatatagccctccgtctatcccagttagcatggagggattttaggtaggtcatacagaaaccgggtaatgatggcaggtgtggaggaacagaatgtaccactgaatgggaggtccgggggaaacatgtggcggaaatatcctcccgtgccacgtgatctgccaaaattgaacacggggagtttaggaggggtgacatgtcagtttgggaactatctttaggggtgctaacccaaatctccctttctccaattagagcaccctgccttcctcattagatgtcacccccccccccgcccccgacttcatccgccatgtcctgatggtgctttgtgacgtataaggccttccttcccgcccagggcgaccattggctgggtagtggagtgttgaccaatcacagctcaggggcgtgattgtctcgtcctgggatcgcgagaggggtatatacagggaggccaggcagcctggagttagccgaccgttgcgagacgttgagctgcggaagatgagtccaaagccgagagcctcgggacctccggccaaggccacggaggcaggaaagaggaagtcctcctctcagccgagccccagtgacccgaagaagaaggtgagtgaccctcccaagctcctcctcgtcttcccctcgcctccttcctcacaagaagcctctcctgtcctca

SEQ ID NO: 43386 - DNA, 2300 bp, Homo sapien
agagctgaacttttaactagttacatggagatatgatacgggattgaagggagtaaggaggaaataaatttaaaattttaagagttaaattatggagcattttgctgctccaaagagacttacctttggtgagctctcactctgccagccaggtgtagaaatagtggatgcccttatctttcctttaagtgaaagatatcaaagttgtggtgttcatccaggctgcccggtgataaagttttcacctgtctcctgaatcgacctgctgacagtgtccaaatgcaggaaataacttgctctgtaaacagcatcccagattctggttctgtaaatccagtctctccttaaacttctgatgccaccacatcactttaaaccagaccacctgtcttaatccattcaggctgctataataaagtagcattgactgagtgtttataaaagaaatttatttctcacagttctggaagatggaagtctgagatcaaggtgccaagatggtcaggttctgaggagggcccttttccagtttgcagattgccatcttctccgtgtacttttatccttacatggtggaaagagacctctctggggtcccttttctaagagtactaatcccattcatgagggcttcaccctcatgacttaattacctcccaaaggccccacctcctaatactatcaccttgggggttagtatttcaatatgtgaattttggaggtatacatgcaaacaataacaccaccaaaggagttagaccactgcttcaggattctgttaaaacgcagatgccgactcagatcagagatgggacctgggatccttcctttctcatgagcttcctggaagatgcagttctggggaggatcacactcgaccttaaagagctagaagattgtggaaggtttaaggactggagtgtgtcctgtattttcctaatgtacgttgtgccttcccttcactaaattccggtagaggtaaagaattctgagtaatgcagtcattctacgataaggcaataaggtgtttcaggatcaattttctctaaagaatagttatgtgaattaaaaacatcttccctaatcgtcacatcaaggactcacaggtgttgttggccagagacgatacaccaaaacagaaagaaaaagcccaaaccagaggcaatttggagagctccacccctcctccctgttttgtctaaggtagagacattctcgcagacgctcctttgtagcctcagagaaagtaaatctctgcccttaaactaggggacctggagagccttcaatcacgaagtcagggattcctccaggcttggttattaggattagataaggaaaacaccgtttggggagagaaagaattatcagagtcctttaaatcttggtgggcatggcaggcatcttggcggtcgttgaagctgcttaagtctgagccaaaggtgccagaggacaaaacagccacctgctcacggccccctatgtggaaaaagctttccaatttagctctctcattttagcatctcaatctgcacataaggcacgcgggaaactcagagaggttatgctacctgctcaaggtcacacagcctaaggtcaactgaggatatgaaagttccccagagtcatagtccagcttttcctttagatagcacttcttaaaaaaaccaaaggcacgccttgaaaagctgcgggatgtccagccccaaaatagccgctggagttggcccctaggggcagctggaccgcccaggcgggcgaaagggtggagagggagaagaaccacttccgggaaacagacgcgaagagggtaaggcacttccggggcacagaaaatgaggattattaaaggtcagttgctcgcaggtaagggccaagtagcgttaaaagacacgtaaggattacaacgcctctctagggtgtgggttaaaatgtctctctaggtactcgaagataacatgactctaaacgaggaatccttgcctgcgctggaggacgctccggtctagcggccaggttgagtccagaagtttaaatagagcaggcggggcctagcgggcgccttcgtcggcgcgatgacgtcacatacctgcgcgggaggcggtaccaacccctgccgcaggactttcctgggccggctcgcggagagcgtagcgcggccttggtggcggaatggcgttgagtgacggcccggccccgccatctggttaaagggactcgttcaacacggaagtgtcccggggctgcattggtacggagccctggggcccagcaagggtgtgctcctgcgggactgatgc

SEQ ID NO: 43387 - DNA, 2300 bp, Homo sapien
ttttttttttttgagacagagtttcactcttgttgcccaggctagagtgcaatggcgccatctcagctcaccgcaagctccacctcccgggttcaagtgattctcctgcctcagcctcctgagtagctgggattatagacacgcgctaccacgcccaactaattttgtatttttagtagagacggggtttctccatgttggtcaggctggtctcgaactcccaacctcaggtgatctacctgcctcggcctcccaaagtgctgggattatagctgtaagccaccacgcccggcccatatatttctatcttttaacattgtacaagtgatatgagacaatgtatataaaggactggcatggagtgggcagacaataagtgtagtaaatattaataataagattctaataataggagtgggtgctcaggaaagcaaggcattttactaacaaagaatagaccaaaatctttattttgtctctttgaaatgaggtgattagataattaaatgttttagtagttacggtgttcattttgataacagcactggtaatgtctagatcttgtactccaaattaaaatacagtattttggtgaatttgatggagcataaggcactgaagctgtccacctgtcacccaacaatattacttacttgatattgatattatttcctcagtaatcggctccatgataagaaaaatatttgaaggctagaaaggactatttatgtctgaacaattggtggacccctagcagccatgtccactgtacagttgctttgcgatgaagtacacagagcagagaataccagttttctttgactgggattttaaaaaatatttaggattatgtgtacatttggtaccacatactcaccacctggctatcaaggatctgaacccgttttctataaaatatatcgtttaagtataagaactctgaaagcttgcctactttactatctctgtttttcagctcaatgcataatattacatttggaacccttcacatattaaattaaaatgaagtttataaaataaatgtcacatttttaaaatgtttctctttaatagaaatagtctgatatttagtttcaacaccatgttaaaagatctaaagattatcatatattatcagatatactgagtcataaataaattatatttccaaaggatggctattttgaattatgttttcagattgctatggtctgaatgtttgtgtcccatcccaaaaatgtatttgttgaatcctatcccccacagtgatggtgttaggatgtgcggtctttgggaggggaggaggtcctgaaggtggagcctcatgaatgggtttagtgcccttatcaaagtggccccagagagctcccttgccccttccaccatgtgaggacagggcaaaaaggtgccatctatgaatcaggaaataggacctcaacacacaccatctgctagtgacttatcttggaatgttcatcttctagatctgtgagaaacacatttctattgttcataagccacccggttttgggtattttgttatagcagtctgaacagactaaaacacagatgctatcaaagaaaagtcttattttgttttatataaatatgtaaacatatatataacagaaatatgtaataatgtaatatatataatatggtatatatataaaattcatattttttgaaagtatattacatttagaaagaatttacccagtgttcctttaagtagtcagtttttgtagcatatttctaatggaaaacagccatgcgcaatgtaaaaagcacttacattagtaagaacggtttggtttgcaagctttagaaactcaatgctaactaacttaacaaatagaaaagggtaggtgtagtggggaaagcgagtcaggaatataaaatatattgtttatgcatgaaacctttgaaagcttaccggctctaccttatctagaacaccagttacaagcactgtaattaaggaattctaatacgataacagaaatactcaggaaatccttaccatctctatttttcagttcaatgtataatattacatttgcatccacaggctcaagaggggcaaccacacctaggtgcctgtctgtgtctgtctgtctgtctgtctgtctctctctctctacctcattctcagctctggatccctctaagctgcctctgttttcaggctggctccctccacatagtggcattcacacatgaccttcttcatctattccctcactgtgttcctagagatggtgatctataggaaggaagtagcccctctttctatggtt

SEQ ID NO: 43388 - DNA, 2300 bp, Homo sapien
tccttcctaatcattctactattttttgttggaataataaattaccacagacatctggtggtaaacatgtaattagcaacctaaagatagctagaattagccagaccaggtaattgattgcaggaagctgaagataactggcctatgccagggagttcaataaccattttcctcaatgcaaaattccaacctcatgttagaaatattacctaatatagtagatatctactttatccaagtgagtaattaactagagataactacatgaagccagtacctggaataaacaaattcttctcagtactagttgaacaaacaactagcaattactaggaaaactggttgaacatagaaagtttagtaaccattcgagtcaattctgtattcttacttttttaggattgttgactaggtactatggatttggtaactagagttacctgagtaagagttaaatacagaatcctccataaaactggaataactggttgaagacagaagtatcacattgcattctcctcagtatttctcatttcttgttggaataataagttggttctgtcaatgggtagtgagtacctaggttattacaaagcaagaaataagaagagatgactagaataaatatttgataccagaatggtgaaaaaaacattcttttcaaatagaaactctaatttcctgtgtaattaatgagttacaattagttagtactggagatatctatatgagatgtggacttcatttttggggggtggtacatacttaacagatgaactgctgggtcacatggtagatctattttgattttccaaggaaccattacactgttttttataacggctgtaccaattacacgtctgtcaacagcgtgtaacagtgaggtgatagttcattgtggttttcatttgcattctctgattattaacgatgttgagcacattttcatatacctgttggccagttgtgtgttttccttctagaaatgcctattcaagtcctttgcctatttgttaaccagactatttatttatttgctattgagctgtgtgagttctttatatattttggatattaactcattattagatacatggttcgcaaatagcttctcccaaaccatagcctgccttttcattttgttgactgttggctgtgcagaagcttttagtttccagcctgctcacttgccctatatatttcagcttcctagacccccacattgagtcaatgtgtgagccaattacttagaataaactgtatcatatatataattcataaatactacatgatagtaaatatatatttatgatatataatattacacacacacacacacacacacaatatcctgttggtttagtttctccttctctgaggaacccagcctgataccgaaacccagcctgataccgatacccagctgagcgagtgtgtttgctgatcttgacctctggaagccagtgctttaaaccatgagaatgaaaaattgtgaggcactatgtggatgctgggagaagtatgtgagatggaaaagttgtttcatggcatccaagaagtgaatgatcctcaaggtgtagcagaggaatttgtaggagagagggatgattgacgtcttcgtatagccctccatccatcccagttagcatggagggattttagataggtcatacagaaactgggtaatgatggcaggtgtggaggaacagaatgtaccactgaatgggaggtccgggggaaacatgtggcggaaatatcctcccgtgccacgtgatctgccaaaattgaacatggggagtttaggaggggtgacatgtcagtttgggaactatctttaggggtgctaacccaaatctccctttctccaattagagcaccctgccttcctcattagatgtcaccccccccccccgcccccgacttcatccgccatgtcctgatggtgctttgtgacgtataaggccttccttcccgcccagggctaccattggctgggtagtggagtgttgaccaatcacagctcaggggcgtgattgtctcgtcctgggatcgcgagaggggtatatacagggaggccaggcagcctggagttagtcgaccgttgcgagacgttgagctgcggaagatgagtccaaagccgagagcctcgggacctccggccaaggccacggaggcaggaaagaggaagtcctcctctcagccgagccccagtgacccgaagaagaaggtgagtgaccctcccaagctcctcctcgtcttcccctcgcctccttcctcacaagaagcctctcctgtcgtca

SEQ ID NO: 43389 - DNA, 2300 bp, Homo sapien
tgaagatggtgactatagtgatggttaccagaggccagaaggggaagcgggggatgaaggggaaataaaagaatataaatacaagaatataaatattaccactgaactgcacacttacaagtggtaaagagggtgcattacatgtgtatattttacctcagtaaaaataaattttaaaaataaaatcacgttcttctcaccacttactgctgagttattgttggaataatgaattactactacagatgagtcatatacctaagtaagtagtaaaatagagacaacaacaatagttcagtggaatgtagaacatagggaatctagtcaggtcagataaaattttgttggtgttgagttaatatatgagttctacttaactgggctttcccataaaacacgttacatagaaagagctaacagtcattgcaatactaagtgaacctgatcctgaaaatcgtgttctttgcaagtctcaattattcattttagttggtataagaacttataaggataggtgctgagtgctacccaggaaaaaaaggtccaaaggataacaggagataatttgaatatctatgtgatgcctggaaaaagcaaaatccttcctaatcattctactattttttgttggaataataaattaccacagacatctggtggtaaacatgtaattagcaacctaaagatagctagaattagccagaccaggtaattgattgcaggaagctgaagataactggcctatgccagggagttcaataaccattttcctcaatgcaaaattccaacctcatgttagaaatattacctaatatagtagatatctactttatccaagtgagtaattaactagagataactacatgaagccagtacctggaataaacaaattcttctcagtactagttgaacaaacaactagcaattactaggaaaactggttgaacatagaaagtttagtaaccattcgagtcaattctgtattcttacttttttaggattgttgactaggtactatggatttggtaactagagttacctgagtaagagttaaatacagaatcctccataaaactggaataactggttgaagacagaagtatcacattgcattctcctcagtatttctcatttcttgttggaataataagttggttctgtcaatgggtagtgagtacctaggttattacaaagcaagaaataagaagagatgactagaataaatatttgataccagaatggtgaaaaaaacattcttttcaaatagaaactctaatttcctgtgtaattaatgagttacaattagttagtactggagatatctatatgagatgtggacttcatttttggggggtggtacatacttaacagatgaactgctgggtcacatggtagatctattttgattttccaaggaaccattacactgttttttataacggctgtaccaattacacgtctgtcaacagcgtgtaacagtgaggtgatagttcattgtggttttcatttgcattctctgattattaacgatgttgagcacattttcatatacctgttggccagttgtgtgttttccttctagaaatgcctattcaagtcctttgcctatttgttaaccagactatttatttatttgctattgagctgtgtgagttctttatatattttggatattaactcattattagatacatggttcgcaaatagcttctcccaaaccatagcctgccttttcattttgttgactgttggctgtgcagaagcttttagtttccagcctgctcacttgccctatatatttcagcttcctagacccccacattgagtcaatgtgtgagccaattacttagaataaactgtatcatatatataattcataaatactacatgatagtaaatatatatttatgatatataatattacacacacacacacacacacacaatatcctgttggtttagtttctccttctctgaggaacccagcctgataccgaaacccagcctgataccgatacccagctgagcgagtgtgtttgctgatcttgacctctggaagccagtgctttaaaccatgagaatgaaaaattgtgaggcactatgtggatgctgggagaagtatgtgagatggaaaagttgtttcatggcatccaagaagtgaatgatcctcaaggtgtagcagaggaatttgtaggagagagggatgattgacgtcttcgtatagccctccatccatcccagttagcatggagggattttagataggtcatacagaaactgggtaatgatggcaggtgtgg

SEQ ID NO: 43390 - DNA, 2300 bp, Homo sapien
aataaaaataaatattaaaaataaaatcactttcttctcaccacttactgctgaattattgctggaataatgagttagtactacaggtaagtcatgtacctaagtaagtagtaaaatagagacaacaagaatagttcagtggaatgtagaacatagggaatctagtctggtcagataaaattttgttggtgttgagttaatatataagttttacttaactgggctttcccatgaaactcgttacatagaaagagcctacagtcattacaataccaaatgaacctgattctgaaaatcatgttctttgcaactctcaattatcggttttaattgagataagaacttacaagggtaggtgctgaatattacccaggaaaaaaagttacaaagaataactggagataacttgaatcatctatgtgatgccaagaaaaaggaaaatccttccttatcattccactattttttgttgaaataataaattaccacagacatctggtggtaaacatgtaattagcaacctaaagatagctagaattcgccagaccaagtaattgatcccaggaagctgaagataactggcctatgccagggagttcaataaccattttcctcaatgcaaaattccaacctcatgttagaaatattacctcatacaatagatatctactttatccaagtgagtaattaactagagatagctacatgaagccagtacttgtaataaataaattcttcacagtactacttcttatgtctctgtgacataaaactaaacatttagtggtacctaggcaaacagctgaataaacaactagcaattactaggaaaactggttgaatatagaaagtttagtaaccattctagtcaattctgtgttcttacatttttacgattgtttactacgtactgtggatatggtaactagagttacctgggtaagagttaaatacagaatcctccataaaactaaaataactgattgaagacaagaagcataacattgcattcttctcaacatttctcatttcttgttggaataatgagtcagttctgtcagtgggtagtagtacctagattattacaaagcaagaaataagaagagatggctagaatagatatttgataccagaatggtgaaaaaaaaacattcttttcaaatagaaactctaatttcctgtgtgattaatgagttacacttagttagtactggagatatctgtgtaagatgtggatttcattgtgggagtggggtacctactcaacagatgaactgctgggtcacatggtagatctattttgattttccaaggaaccattacactgtttttcataacggctgtaccaattacacgtctgtcaacagcgtttaaaggtcccgttttctgcacaccgtaaaagggtttcactttctccacacctttgccatcattatcttttatctcttgacttttttataatagccatcctaacaggtgtgaggtgatagttcattgtggttttcatttgcattctctgattattaacgatgttgagcacattttcatatacctgttggccagttgtgtgttttctttctagaaatgcctattcaagtcctttgcctatttgttaaccagactatttatttatttgctattgagctgtgtgagttctttatatattttggatattaactcattattagatatatggttcgcaaatagtttctcccaaaccgtagccttttcattttgttgattgttggctgtgcagaagcttttagtttccagcctgctcccttgccctatatatttcagcttcctagacccccacattgtgtgaaggtgtgagccaattacttagagtaaaccgtatcatatatataatattattgataaataaatactatagtatagtaaacagatgtttatgatatataatattacagacactctctctctgtctcacacacacacacaaatatcctgttggtttagtttctccttctctgaggaacccagcctgatacggatacccagctgagcgagtgtgtttgctgatcttgacctctggaagccagtgctttaaaccatgagaatgaaaaattgtgaggcactatgtggatgctgggagaagtatgtgagatggaaaagttgtttcatggcatccaagaagtgaatgatcctcaaggtgtagcagaggaatttgtaggagagagggatgattgacatcttcgtgtagccctccatccatcccagttagcatggagggattttaggtaggtcatacagaaaccgggtaatgatggcaggtgtgg

SEQ ID NO: 43391 - DNA, 2300 bp, Homo sapien
ttcaataaccattttcctcaatgcaaaattccaacctcatgttagaaatattacctcatacaatagatatctactttatccaagtgagtaattaactagagatagctacatgaagccagtacttgtaataaataaattcttcacagtactacttcttatgtctctgtgacataaaactaaacatttagtggtacctaggcaaacagctgaataaacaactagcaattactaggaaaactggttgaatatagaaagtttagtaaccattctagtcaattctgtgttcttacatttttacgattgtttactacgtactgtggatatggtaactagagttacctgggtaagagttaaatacagaatcctccataaaactaaaataactgattgaagacaagaagcataacattgcattcttctcaacatttctcatttcttgttggaataatgagtcagttctgtcagtgggtagtagtacctagattattacaaagcaagaaataagaagagatggctagaatagatatttgataccagaatggtgaaaaaaaaacattcttttcaaatagaaactctaatttcctgtgtgattaatgagttacacttagttagtactggagatatctgtgtaagatgtggatttcattgtgggagtggggtacctactcaacagatgaactgctgggtcacatggtagatctattttgattttccaaggaaccattacactgtttttcataacggctgtaccaattacacgtctgtcaacagcgtttaaaggtcccgttttctgcacaccgtaaaagggtttcactttctccacacctttgccatcattatcttttatctcttgacttttttataatagccatcctaacaggtgtgaggtgatagttcattgtggttttcatttgcattctctgattattaacgatgttgagcacattttcatatacctgttggccagttgtgtgttttctttctagaaatgcctattcaagtcctttgcctatttgttaaccagactatttatttatttgctattgagctgtgtgagttctttatatattttggatattaactcattattagatatatggttcgcaaatagtttctcccaaaccgtagccttttcattttgttgattgttggctgtgcagaagcttttagtttccagcctgctcccttgccctatatatttcagcttcctagacccccacattgtgtgaaggtgtgagccaattacttagagtaaaccgtatcatatatataatattattgataaataaatactatagtatagtaaacagatgtttatgatatataatattacagacactctctctctgtctcacacacacacacaaatatcctgttggtttagtttctccttctctgaggaacccagcctgatacggatacccagctgagcgagtgtgtttgctgatcttgacctctggaagccagtgctttaaaccatgagaatgaaaaattgtgaggcactatgtggatgctgggagaagtatgtgagatggaaaagttgtttcatggcatccaagaagtgaatgatcctcaaggtgtagcagaggaatttgtaggagagagggatgattgacatcttcgtgtagccctccatccatcccagttagcatggagggattttaggtaggtcatacagaaaccgggtaatgatggcaggtgtggaggaacagaatgtaccactgaatgggaggtccgggggaaacatgtggcggaaatatcctcccgtgccacgtgatctgccaaaattgaacatggggagtttaggaggggtgacatgtcagtttgggaactatctttaggggtgctaacccaaatctccctttctccaattagagcaccctgccttcctcattagatgtcacccccccccgcccccgacttcatccgccatgtcctgatggtgctttgtgacgtataaggccttccttcccgcccagggctaccattggctgggtagtggagtgttgaccaatcacagctcaggggcgtgattgtctcgtcctgggatcgcgagaggtgtatatacagggaggccaggcagcctggagttagtcgaccgttgcgagacgttgagctgcggaagatgagtccaaagccgagagcctcgggacctccggccaaggccaaggaggcaggaaagaggaagtcctcctctcagccgagccccagtgacccgaagaagaaggtgagtgaccctcccaagctcctcctcgtcttcccctcgcctccttcctcacaagaagcctctcctgtcgtca

SEQ ID NO: 43392 - DNA, 2300 bp, Homo sapien
cacaaatgaaagtgacaacatttagaagacaatctcggtattcagacatcattatttattgacacttggctttatacacatgcctgcttggggtcattatagttagcttctttactcttcgttaatattatgtttaacatacttaaaaaatatttccatttgcaattctgagcaattttaaaacaaatcattgaagtcgtgtaagcttatgccaaaattactaggtttccagcccaagtaaagagtggccccaacctttttggcaccagggactggtttcatggaggacaatttttccatggacctgggggtagcaagtgatggcttggggatgaaactgctccatctcagatcgacattagattctcataaggagtgcgctacctagacatctcgcatgcatagttcactataggactgaagctcctatcagaatctaatgctgccactgatttctcacctgaggcacagctcaggcagtaatgttccctggcctgccgcggcccagttcctaacaggccactgtcattgtgaagagtttcaggatggtgatggcagaacaggccttctaagagtgcgactgtaccattgtacagcttgcatgtccatgaaactggctttgcctatagaaccttttgaacaagatgaccctgattttctaattcgctgagaaacacaccaaggccaattaatttgactggcctttctgatttaagctatgtgaagaaatacacatgtaagatgatgtatttgaaaagcactcataataggatagctgcagatggctgtcattgcaatttgttaacaggcagatctcaaaattgcagagtggaacctgtgtataagaatagggaaaagggtgggaaattgcaaaacaactatataggctttgtgcaaagaggattccagccttctgatgtagctttgagtagagcgagtgcatctagataccctgactgtgcttagctgggtgcttatagagatcccgttttcgaaggtgaaagtgcaattgggtaggagagggtggagatgtcagagcaaaggaacagcagtcagttgttgtccattcgaataggagtgtgcctgggtcttttttctctgggctctcctacctgcaaggggactgtcacttcctgatggggctcaggggagtgtagagctttgttacaagttgtgtcttatcaatgcctcctgtctttctgtggcaggatcctggctggggagggagaatttgtgtgctgagagaacactagacaaaaacgacaggagaggacggagcagccattccaaagctaaaaagcctgagtcaagaggctcgggcaaatcgtggggaaagaaagagattaagacgcaagtctatttagaataaatcactcactttggggcgtgcaaggcttactagaaaaacagacacctgaggaaacaaggcgtgtggacctaaaggtggttagctatgcactgagactgtctccagggaaaacagtgcgggagggagggagggagggatgcgggaaggacggaagaaatgcaagagggagagaaggaggaatttgtctccgggacactgtagggcaaatgtccacgctcccctccccgtctgtcttactgccatttgttttcttcacttctttccactacctgggcaaaggaaattcgaatatgtgaaagcgtgggaaaagcctggacccaggggaggtcggggagaaagcaagccacttaggggcgcggggtcaatccccaggcaggtgggacgcccctgggggtcctgaggcctcttccctcctgctgaagggagcacccctcctggcaggcctggacctgctcacaccgacgtttacctggacggagggggaaggtgggaggggcaggaagcggttggtgcgaacgggagaggcgcctgcgtgggagctgggcccctcgagacctgcgcggcgtggaaagccgctcggcgtcgccctcccccggagcgcccgggctcgcagctgacgagaccggcccatgggccctgcgcccggcccccctgtcactcacacgccttccagccaatggtgcggcctcctgtccccctcaccccacccctcgagggcgagctgggagggaggtcggcgaggagggtccggccggagttgaaggattgaactttccggctcagtcgcggcgtctgcctggtcctcagcagtgcagccccggcgcggagcagggagcctcggcccgcgcccggcgccctcgccctcgccctcgacccgcagccatggtgcccggggtgcccggcgcggtcctgaccctctgcctctggctgg

SEQ ID NO: 43393 - DNA, 2300 bp, Homo sapien
tagtgggggctttgggccacctgtatcagtcttgacctctggaggggctggtgactaatttcggtcatgcagacagtcggccatgcctacatgctcccaaaaccacactggatgtcaggcttgggggagctccctgggcagcaatgttctgtgcaggtttcctcacatcactgctgggagaattaaacatcatttggttccatttcccagctgctgaaaaactgtaatgttgggaagaaattaataattcagcttaaatccaaaggaagaatgttgattgtgtagattttgtagaattttttttaaaatgttgagggaagaagggaagaccaactatgtagaaaagggagcctttattatgaacacacaactctttaaaacaagtgaagtaatacccatgtagaataaaagcaaagaaaaaagaaacaattcagataatcatcacataagaacacttatatgttttattttatcttattttatttattttattttattttgagacagagtctccttgtgtcacccaggctggagggccatggtgcgatcttggctcactgcaacctccgcctcctgggttcaaacgattctcgcgcctcagccacccaagtatctgggattacaggcgtggtgccacccagttttttttgtgattttggtagagacggggtttcaccatgttggccagggtggtctcgaactcctggcctccagtgatctgcccgtctcagcctcccaaggtgctgagattacaggcatgagccactgcacccagccacttacatgaaacatctgactgcattgctgaattcaaaatatctgaatatgttatacagaaaaatgttttggaaatctaatgaaaattaataacgaaatacaatgttctacttacagtcattgttgacttatcttaataatttgtttgttttgtaatgtgacaaaatagatctatattgttcatcttgtcaaaaatatttatgtgcagaactgtattttaaaacaagcaagtacaaaaggaaataaattaaagtacacgaatattttattacctctcaaaatagcctgacttgaaaagaccatcactccatggccaatggatctacttgatcctgaaataaccgagagtggggtgtatctgttactatcagcaggtcaaccttacagcaacaagaagaaaggcctttgacaacctgatggtcactcctgggatttctatggctaacttaagtggcaagaactagcaggaaactagttgactttttttgaagaaagaaatgacaaaagtttctcaatcagtaccttttagtcatcatttcttggaaacaactatacatcatacagttgatgcctttaaagacacgactttgggtatgggctcagtggctcatgcctgtaatcccagcactttgggaggctgaggcaggtggatcactttgatgtcaggacttcgagaccagcctggccaacatgacgaaaccccgtctctactaaaaatacaaaaattagccgagaatggtggcacgcacctgtaatcccagctccttgggaggctgaggtgggagaatcgcttgaacccgagaggtggaggttgcagtgagccaagatcttgccactgcactccagcctgggcgacagagagagactccgtctccaaaacaaacaaacaagcaagcaaaaaacataaaagcacaatccattgataaaaagggtgcagctggacatggtggaaacacacagggcatgggagggagcctgggctccacctgcaaggcgaaggccattctagccaaaggggcaggggtggctggaaggagctcgggggcgaggtcctaggccccgtccacttggcttccatcccgagtccttgcatccctccccaggaggaggcgctgaaaacttctggggacagaggccccaaagaaccaccacccaccccagtccacagcaaatatgggtggtcccttacggaaagagggaaggcgtgtcagcaggggtcgtggcccccaaggtccttcacccgcatgcgcatgcgcacttagctgaccaatcagagaggagcgtggatagccagggcagctgctctcgcgagaactgaggacccatttttctaagagagcgtcgtggtgccagtgcctgcaggttctgtgaggaagcggcatcaggggtccctcaggtgaagcgctcgcggtggggaggcaggaagtcgagcatgcggccctctcgcaaccagggtgtgaagcgcaggtgaagcgctcgcggtagggaggcaggaagtcgagcatgctgccctctcgcaacca

SEQ ID NO: 43394 - DNA, 2300 bp, Homo sapien
tgtactttttgtatcattttgtttaattccattcttacatacagcatatacttaggtttttattttgatccaagttggaagtcatttcctttagaatgcgagtttatctcattcatatttcttgctcaacagattcacttggccttaattctgttcttttatgttatgttatggtctctgtagtattttctttattttccaacttttactacaggatttgtatgctttgtgtgtgctctttttggttatataggcatttaaggctgtggattagttttcctgatgactgcctttataatttcaatagtataatgaaactctgtatcttgatttacaaactttaggcaatatttattcactcccaactccgaaacaactctctccctattacaggggatcggaggtgggaaaaagctgagttaacgataagtattaaggcattaatttgtgggtgaaggttgtggcatatgtctggataagtctggagtatgaaggtttgtgggcaagtctggggcatgaggatgagaaagaaaagtagtgaggaaacaaaaaaggttatgggctgggcacggtggctcacgcctgtaatcccagcactttgggaggccaaggcatgcggatcaactgaggtcaggagttcgagaccagcctggacaacatggtgaaaccctgtctctaccgaatatgcaataataataataacaacaacaacaacaacaacaacaacaacaacaacaacaacagggcgtggtgttgggctcctgtaatcccagctcctcgggaggctgaggcaggagaatcgctggaacctgggaaggggagattgcagtgagctgagatcttgccactgcactccagcctgggcaatagagtgagactcagtctcaaaaaccaacaaacacaaacgataaaagcacaatccattgattaaaaaggacgcagctgggcatgttggaagcacacagggcatgggagggagcctgggctccacccacagggtgatggccattctagccaaaggggcaggggtggctggaacaagccccagggcgaggttctaggccctgtccacttggcctccatcccaagtccttgtgtctctccccaggaggagaagctgaaagattgtggggacagaggccccaaagggccacccccaccccagtccacagcaaccacgggctgtcacttaggggaagggtgagggcgtgccagcagggggcctggccccacacagcccgtcacacgcatgtgcactgagccgaccaatcagcgaggagcgcaggaagtcctgcctgcagctctcacgagaactgaggacccgttttctttacttttctttttttttgtttttttgttttgttttttttgggacggagtctggctcttgctgcctaggctgcagtgcagtggtgtgatctgggctcactgcaacctccgcctcctgggttcaagcaattctcctgcctcagcttcctgagaggacccgttttctaagaggtcctagtggtgccgctgcctgcaggttctttgagggcgccacatcaggggtccctcaggtgaagcactcgtggtggggaggcgggaacgcaggcacgaggccctctgggaaccagggtgtgaagcgctgggcagcccgccgacctgtgaggaaatggccccagcgtcgtcgcctggggcctgggtcagggcgaggccctgagggtgggctagggtgggctggggtgggccagggcagggagggagctggagctgcctgggtgatccctagggcccgggagggtcctgggggcttgtgcatgtgttggggggaggggccgagggggggagaagtgggagtgaggcgggggtgttgtgggggacagtctgagtggggccctcctgcctggccgcccgacaggacaggacacttggggtcaccgggggtcaccgggggtcccctgtgcgtccaggggggcgagtggcagtgcagcccctgacattcccctagaggtggctggggagatcctgtgtcacccagcggccctcccagccacatggggtcgctaggtgactcagaggtagggctgagttctgtcccaaaagggcggcgaggatcccgcagaggccgtggagttcaggtgtgaggggcagctgtgagctttgcagccagccccggggacgggctggacgggccaggacaggaggggacactggcatcttttccgtcccttcctgctcccacatgagacccagggcgggccagccccacccttcttgaacctgtgatcccaatggctttcctttccgatgccaggttt

SEQ ID NO: 43395 - DNA, 2300 bp, Homo sapien
ggtgtgtacacacacaacaacaacaagaaaacttttctcctatttgctaatgtaagtctttctaattttttttaaattttattattattatactttaagttttagggtacatgtgcacaacgtgcaggtttgttacatatgtatacatgtgccatgttggtgtgctgcacccattaactcgtcatttagcattaggtatatttcctaatgctatccctcccctctccccccaccccacaacagtccgcggagtgtgatgttccccttcctgtgtccatgtgttctcattgttcaattcccagctatgagtgagaacatgcggtgtttggttttttgtccttgcgatagtttgctgagaatgaagtctttctaattttttaatcttttgggaaactgtaggtagaatagaagatagtagtggccaaggaagtactataggatgtggtgagggttcattggttgaaagtgaaagaaaatgctcactctactgccaagagagcaatttaagatactatgcctgtatccaagacaatacatttgtatttggtctctcctggacagacggagcttaaactctcatatcactgttcattttcattgattgttttgcttttattttctacggttttgggtttaggcacattgatgctgtgttaagcacaaaatgattcatgtgagattgtcagagtagattgtgcccttctcttgttcagtgtactctgcctttagtttattcatttattttttgcattattttacattcatgagatatcaattctcagatccatattttccttttcttcatatttttctgatatgtactttttgtatcattttgtttaattccattcttacatacagcatatacttaggtttttattttgatccaagttggaagtcatttcctttagaatgcgagtttatctcattcatatttcttgctcaacagattcacttggccttaattctgttcttttatgttatgttatggtctctgtagtattttctttattttccaacttttactacaggatttgtatgctttgtgtgtgctctttttggttatataggcatttaaggctgtggattagttttcctgatgactgcctttataatttcaatagtataatgaaactctgtatcttgatttacaaactttaggcaatatttattcactcccaactccgaaacaactctctccctattacaggggatcggaggtgggaaaaagctgagttaacgataagtattaaggcattaatttgtgggtgaaggttgtggcatatgtctggataagtctggagtatgaaggtttgtgggcaagtctggggcatgaggatgagaaagaaaagtagtgaggaaacaaaaaaggttatgggctgggcacggtggctcacgcctgtaatcccagcactttgggaggccaaggcatgcggatcaactgaggtcaggagttcgagaccagcctggacaacatggtgaaaccctgtctctaccgaatatgcaataataataataacaacaacaacaacaacaacaacaacaacaacaacaacaacagggcgtggtgttgggctcctgtaatcccagctcctcgggaggctgaggcaggagaatcgctggaacctgggaaggggagattgcagtgagctgagatcttgccactgcactccagcctgggcaatagagtgagactcagtctcaaaaaccaacaaacacaaacgataaaagcacaatccattgattaaaaaggacgcagctgggcatgttggaagcacacagggcatgggagggagcctgggctccacccacagggtgatggccattctagccaaaggggcaggggtggctggaacaagccccagggcgaggttctaggccctgtccacttggcctccatcccaagtccttgtgtctctccccaggaggagaagctgaaagattgtggggacagaggccccaaagggccacccccaccccagtccacagcaaccacgggctgtcacttaggggaagggtgagggcgtgccagcagggggcctggccccacacagcccgtcacacgcatgtgcactgagccgaccaatcagcgaggagcgcaggaagtcctgcctgcagctctcacgagaactgaggacccgttttctttacttttctttttttttgtttttttgttttgttttttttgggacggagtctggctcttgctgcctaggctgcagtgcagtggtgtgatctgggctcactgcaacctccgcctcctgggttcaagcaattctcctgcctcagcttcctgagag

SEQ ID NO: 43396 - DNA, 2300 bp, Homo sapien
acgcttgtgtaatgcttatcaaaatacagctcattatcatcaccctagaaggtttcctcatgcctcttgccagttaatccctatgcccactccctcagagcctaccactgctctgaccttttaccaccatacatgagttatttgttctagaattttgtgtagtatgcactctttttgtggacgccttctttcattcactaagcataatgtttttgagacttcttgttgttgcttttcactggcaagtgctgttccattacatgactatcctatgtttggtttctctgtgttcctattaagcaacacctgggttgtttgcaggttttgttgcttatgaataaagctgttatgaacattcttgcacagctctttttcgtggtcccgtacattttgttttccctttccttggcacgggatggggcaaatacctatgagtagaactgctgggtgatacagtttagatatgtgtccccgcccagatctcatattgatttgtaatccttgatgctggaggtggggcctggtgggaggtgttcggatcatgggggcggatcctccatatcttggtgctgtcttcatgatagtgaattatcgctggatctgattggttgtaagtgtgtggcacctgctccgcccccactccccttgcccctgctctggtcatgtgttgtgtatcctcctgctttaccttctaccgtgagtcaaagccccctgaggcttccccagaagcagatgctggagctatgtttcctgtacagcctgcagaactgtgagccagctgaacctcttttcttataaattaccagttgcaggtgttttttcgtaacaatgcaagaacactctaatacaatgggtcatggggtaggtttttagcttttgaagaaactcggacttttttccaaactgattgtaccattttacactcctaccaacatgcatgcctgagattcgagttgccccaattcctcaacgtcatttggtattgtcggtcttcaatttttgtcatctggtgggtgtatggtggtatcacattgtggttatattttgcattttcctgatgactaatgaggctgaacaattttcttgtgcttactggtccttggaatatctttttttttttttttttttttttttgaaatggagtcttgctctgttgcccaggctggagtgcaatggcgcaatctagacttactgcaccctccatctcccgggttcaagcgattctcctgccttgccttcctgcgtagctgggactacaggcacctgcaaccatgcccagctgatttttgtatttttagtagagacagggtttcctatgttggccaggttggtctcgaactcccgacctcaggtgatctgccagtcttggcctcccaaagtgctgggattacaggcgtgagccactgttcccagccatgtataagtttctttagcttttgtttctcagccaacaaaggctagtttttcaaatttctttgctaacaacttaaatttctccttttcttgatgccataaagacagaataatgcctgcaaatataattcatttaattcactttttctgcttctggaacctaattgggtgcaggaggcttccgctgcagctggttcaccgtgacttctattcttgcaaacacatgattaaagttgtgtgcctctggctgtgccccttctatttgggaagcgtgcttctgctgctctttggcaaatctccagctgctgttggatccccgtgatgtttgtttacctctgtctcctctgcaacacaccctgatcaatctccactgacatttgtagtcattttgacactgaggtctggggttttaactccttgttttactaaaaatgaatttaagaaaaacttttttcttcttctcctttattgcttctgtatttccatgaagaaaatggtagaaatgctgagtttacatttcctgtgaaaacttgaatcctactcggaaatgttggattgtcaggaagtgactaacaacacttagaagccaagttattttgtctgattatctgagattttaatcagtctttttttctttttccaagaatgatatacttcctactacactcaatataactagattggctggtgaaataaatgggctttaagtttgtcctcaatgtttttgaaaattagagaatagttttttaacaaaatatttaaacaacattatcagttatcattttggtacttaataactcttagacatcaaggtattctcatcgccagcacacttaactttatttttcttttttaaaagtatattttattgatacataatagttgta

SEQ ID NO: 43397 - DNA, 2300 bp, Homo sapien
gaatagtcaatgattccaagagactggcccaagttcacccagttaattagtagcagagttgggctggagcttgggctgcctcccacgctgctgcctttgtttgcaatataattattctcactttcttaaatctaatttttaaaattaggtattccatttacatggttcaaaatttaaaaagtataaaaggataagctgttaaaaaacatccctgtcaccctgaataagcaatgcacgttctggagcttttaaaaatatctatgagcacatttttatgtgttgtaatgtgtatgtgtgtgtgtgtgtgtgtgtgtgtgtgtgtgtgtgtgtttctctcctttttaaagtgaattatacactgcggcttttttttaacttctaatagaaatgcaagttaaaactacatggcaatccattttttccattattatgtttgtagttgaggataattgtatgggactaaaaaccatttgtcttctgttgaattatttgttcgtattgttttccatctttttctttcattgtagccataagctacttgtttattagagaaattaactttatgagatctcacaatcttcccccagtttgccacctgtcttttgagtttgcttattgtggttttgcttgaagagttctgacgtttttgtggttgaattactcagtctgttatcatgtctggcatttgggtcatagttgaaaggatttttcccccttagtattaacagaagaattatcccatggtttctttcatttatcactgaattctacatatttatatatatttaaatatttgatcatttgggaagttatcctggcataaggtgtgaggcatagaaccaaatatattcttccagaaggcagctcatttctctcaaaactattaaataatccatttcttctcttctgacctgagttgccacttataacatatactaactttccatatggggggttctgtttctgaattttctactatgttccattgatctttctgtctacttaagttaaatattaaggttttatttatgtttcagcatgctatatacagggctaatcttccttcattactgttttagtttcttcggactttttccaacattttattatacagatttttaagcatatggaaatgttgaaagaattttacagtgaacacccattacacaccacctagattctaccattaacattttactaaccttcctttaacatgtatctatccatctatttggccctctatacactaatccatcttagtttctgacgcgtttcaaagtaaactggagataccagtgtacatcccattaaatacttcagcatgcacatcatgaactagagtttagtatttgtagtattttttatttccagctgaagtttacatgcagtgaaatgcacaaatcttaagtgcacattcactgggtttggacaaaagcatacgcttgtgtaatgcttatcaaaatacagctcattatcatcaccctagaaggtttcctcatgcctcttgccagttaatccctatgcccactccctcagagcctaccactgctctgaccttttaccaccatacatgagttatttgttctagaattttgtgtagtatgcactctttttgtggacgccttctttcattcactaagcataatgtttttgagacttcttgttgttgcttttcactggcaagtgctgttccattacatgactatcctatgtttggtttctctgtgttcctattaagcaacacctgggttgtttgcaggttttgttgcttatgaataaagctgttatgaacattcttgcacagctctttttcgtggtcccgtacattttgttttccctttccttggcacgggatggggcaaatacctatgagtagaactgctgggtgatacagtttagatatgtgtccccgcccagatctcatattgatttgtaatccttgatgctggaggtggggcctggtgggaggtgttcggatcatgggggcggatcctccatatcttggtgctgtcttcatgatagtgaattatcgctggatctgattggttgtaagtgtgtggcacctgctccgcccccactccccttgcccctgctctggtcatgtgttgtgtatcctcctgctttaccttctaccgtgagtcaaagccccctgaggcttccccagaagcagatgctggagctatgtttcctgtacagcctgcagaactgtgagccagctgaacctcttttcttataaattaccagttgcaggtgttttttcgtaacaatgcaagaacactctaatacaatgggtcatgggg

SEQ ID NO: 43398 - DNA, 2300 bp, Homo sapien
aaaaagatgctcaaaaccattagtcatcaggaaaatccaaatgaaaatgcctatacatttaatagaattgataaagttaaaaagactgacagtaacaagtattaatgaaaatgcaagccgggcgtgatggctcacccctgtgattccagcattttgggaggctgaggtgggaggattactttgagctcaggagttcgagaccagactgggcaacatgacaaaaccttgtctccacaaaaaatacaaaaatcagccaggcattgatggcttgcgcctgcaatcccagctacttaggaggctgaggtgggaggatcacttgagcccaggaggtggaggttgcagtgagctgtgatcgcaccactgcactccaggctgggagacagtgagaccctgtctcacaaaaaaaaaaaaaaaaaaaaaaaaggaaaatgcagagcaagtgaaactcacatatattgctggtaggaatgcaaaattgttcttataaagttaaacacacatgaaccatatgacccaacaattccactcctaggtatttacctaaggaaagtgaaaacatatatccacaccagcatctgaatggaaatgcttatttaatgtatatgttacaatggctttattcacaatcaccaaaaactggaaacaacccagcaccattcgacaggtaaatagagaaacaaacaaatatccatccaactgaatactcccaagggatagaaagaaaagaatgactgtatcatgcaactcaaatgcatgatgctaagtgaaagaagccagacaagaaaacctcatactgtatccttccacttatgtaacatattagaaaatgccaaaaaacaggttccacgctcaatttaatgctctgctgttgccatctttaaattcttaatttttgaaaaggggtcttcatcctttcattttgctctggaagctgcaagtgatgtagctggtcctgcttggtttcaccatgcagtgtttttgaaaatatgcaagaatttgggaatgacatttgttcctatgcttacctgttcccaataggccccacactcttaattttttttttatacccagagcttcctgaaacatccacattactgcctgactccagaaagcattcaagttttcaaaacttgcaaaagcatgctggtcacctgatctcagaaaccgcaaaagaaaaaaaaaaaaaggcaattgcctacataagaaaaatcctgttaaccaagtttacactcattctcctcagcctgcacttcagtgtctggtttgaatcacagccacacactgtcgaggcccctctgagatgtgcaaaactcagcctgtcatctcactagattattccaagtgttccaaggaccgatggaattttttgctttctgtcttgatgttctcttggcacccacccaggaaggtcttgggtagtgcactgaaaaggaacatctccaatctccatccaggagaatcttaacaaatgtccaaatgtctctgctttctcaaaatctgcctcatggccaggatggatgctttctgccctgtcaagtttccagctcccttttctaaaagtagccttatagagccccgtatctatagaattcctgcaattgatatctctagagttcctgcaatcggcatggcaatcagcatggacttgcggaataaaaagtgtcatcatctccaaaaagcaatccacaccagggaaaaacaaatcatcttcaatgctgtgaaaatgccttggtgatctctgacaaagaaatttaagggtttgtattaaaactggcagagcaaacttcctgctgaaagccacaggccaatccccagagtaacatacgtcttgacagcgagaagagccactgacatcacattatgagtttccatgagcaacaacgatggaagccatggagaagaaaaactgcactgccaactgcctcaaaccactccaaagacaatttttagtactggaggagagaagagtgctttttcatcatgcagactttcctgaattgatgctgagagggatgcagcaattttggtggtcaattctggtggcgcttccaaatgacgtgatgtcgcgaaggtacattccgcacaggctggcccctctacgttgctgagaagcactccacaagcacacactctcgttattccactccacacaactgtgaaggaggtgagtggaaaattgttgcttttcttgtgttacagattttctttaaaaatgtgagggtgcaaagggttaatgcgtgttttatttttgaaatcacaaggttgctccaatgccatctccagctatgggggaaaggagc

SEQ ID NO: 43399 - DNA, 2300 bp, Homo sapien
gtttggtgattacgagtaaaggtgccataaacctctgtgtgcaggtttttggagcacgtaagttttcagcttagttaggtaaatacctaggggcacaacggctgactgtatggtaagactctgtttggctttgtaggaaattgccgaactgtcttctgaagtagctgtacaattgtgcattcccattagcaacaaatgagagttgctgttgttctgcatcctgtcagcatctgggattgtcagttttctggattttagccattctaatgtatgtagtagtatctcattgttactttaacttgcaattccctaatgatatatgatgttcagcatcttttcatatgcttacttgccatctgtatatctctttgatgagtttttttctgatcgtttgctctttgattcagttgtttattttctcatcgtggagttttaagaaatatgtatatatatatacacatacatatacacatatgtacatatatctgtacacgcacacacacacacacacacacacacacacacacactctaaaaaaaaattagagacaaggtcttctctgtcgcccaggctggagtgcagtggtgagatcacagctcacagcagcctcaacaggtgtgagccactatgctggcctgcatatttcaaatacaatccttaatcagatatggaatttgcaaatatttcctcccattctgtgacttgtcttctcattctcttaacagtgtcttttgtagacttttcaaattttagtgatgcccaacttaccaatttttttttcttttacgcatcatgcttttggtgttctagctacacagtcattaccaaacccaaggtcatctagattttctatgttatcttctaagagtttttatagttttgccttttacatttgggggtatgttctattttaagttaatttttgtgaaagataaaaagcctagttttttttttttttttggcatatgggtgtccagttgttccagcaccacttgttaaaaaggatgaattgcctttgctcctttgtgaaagattagttaagtatatttgtgtgaattcctactgccttttaattaaaattttgggtactgtttatggggaatgctggtagtatttgttgcaagcagattcttgttttcccctccctccagtcaataactgaaaataagtgtttgcaacacacacacgcgcacacacgcacatggctagtgcagtgggtttctgtgtaaatcactgtggacccctcgccctgttatcctttagctttctcagaatacactacctccttgccgctctactttatttccttgttttctcccaccttataggactgcacatttgaaaaatcgttgaaacagattaaataacacagtctaattatcacccacctacagtccatctagtatttcaaaaagaggaattttggtgatttcacgataaatgtaggcggtctctcttcctgtcttaggtcttacagtgtcctttggggtcctgtgagtctatgataaaagatattgactctttacgggtaataagggtggtgggattatggggatattgtcaaacagtcaagatgaattctcagctcttttgcattgtcaattacaggagctcagctgtaaatcctggccacactgggctccagtttgaaagtgaggatttccaccactttcccatactttaaaagactggcatctgccaagtaatcaaaacacacaaagaggccttttaaccaagtttagcttggaatttccaactgctaaccacaagcaggtctggcaagctaggaggctggttggctgcgcagctactccagagtgtgcggtagccgagggctgcgtccgcgtaaagcccagagctgtaatgatgtcaacttgttatttactttccaaatctgaatgactgagcaaggcgaaaggagaatcaatcaaccacaatgtgaccctacaggcggaaaaaacgcagcactcccaccagcaggcggtgggggaagggaagcacgtgtagccagggcagggttgcatcatgagctcgttcgggttttctattgcacccttcgtttttctattgcatgtaatacctcagcatcagtctgcacaagcccagggagcccaggagcaacgaagggcaggctcaagggaaggccccaccatgtccttctggggggccttgaatggcaactgatacataataagacacaatctattctgctgattcacaattatggagactgtgtaagtgtgtatttttttattgatgtcctctaatgatggtgtagcaacagtcgttttgcatcattg

SEQ ID NO: 43400 - DNA, 2300 bp, Homo sapien
ttcccatactttaaaagactggcatctgccaagtaatcaaaacacacaaagaggccttttaaccaagtttagcttggaatttccaactgctaaccacaagcaggtctggcaagctaggaggctggttggctgcgcagctactccagagtgtgcggtagccgagggctgcgtccgcgtaaagcccagagctgtaatgatgtcaacttgttatttactttccaaatctgaatgactgagcaaggcgaaaggagaatcaatcaaccacaatgtgaccctacaggcggaaaaaacgcagcactcccaccagcaggcggtgggggaagggaagcacgtgtagccagggcagggttgcatcatgagctcgttcgggttttctattgcacccttcgtttttctattgcatgtaatacctcagcatcagtctgcacaagcccagggagcccaggagcaacgaagggcaggctcaagggaaggccccaccatgtccttctggggggccttgaatggcaactgatacataataagacacaatctattctgctgattcacaattatggagactgtgtaagtgtgtatttttttattgatgtcctctaatgatggtgtagcaacagtcgttttgcatcattgacgttttacagcaatattttgcagggtaattttgaggtccgccgttttggtggaggaccggcctcttaaaaactcacctccggccgggcacggtggctcacgcctgtaatcccagcactttgggaggccgaggccggcggattgcctgaggtcaggagttcagaccagtctggccaatatggtgaaaccccgtctctactaaaaatacaaaaaaaattagctgggcgtggtggcatgcgcctgtaatcccagctactcgggaggctgaggcaggggaattgcttgaaccagggtggtggaggttgcaatgagccgacagcgcgccactgcactccagcttgggcgacagagcgagactcctcagaaaaacaaaaacaaaaacaaaaaaacaaaaacctcaccttaggtccccctccccctacaaccagaacaacaaatggtctagagttcgaggaagagcaagtgaggttatagtttagattgctgagtgtaccgggctcttagcacgaagctcattatatagtaaaggaaggggcaagaatatttgaaaaatattcaacgaggctgaccccagaggtgctggggagggggagtggagatctgtttaactgaattaaggctgcgagtggttgggagtagcctacgtggaggggaggaaggagcgctggggacttaggtacaccggggccaggccgtgtaagccattgcaacataaagcactttgcaagggccagagggctgatgcctggggggttggggtgggagtgatgaggcccgagtgcccaggtccccccaacctcctcagcccccacacccgagttcctggcgcctatgcctgtgtgtctgagtttgtccctaagcatttctggctcttcttgggaggtgttttgcaaaggtcgaggctccgccggaacccccactttttgagctggggtaaagactactggggtgtcttctaagacgccgattttgagggagattcaccatcgggcaggtggcagggggttctgttggggcagccgggtggcttcctttttggggtgggggagggtaacactttagcagtgatcgaggttcccctgccccctagaaactgagggggtggccgaggttcccgtcccctcgaggcagtcgtggaaaggctgggtttgggatgtgatgggggtagccctggggtcctctcagtcccacggaggccacggggaagggaccgggaccagagcaactagggagaggcccgggttcccctcacccaccctaggcgtgggggagcggggcgggcttggtagggacgctggtcccccgaccgtgggacaggggctgggttgggacgcgggtccccactaggagccgcgggggaggggcagggccggagtccctaccctcgtaggggaggggctggttcgggacgcggctcccccggggcgcaggggcggggccgggtggtacgccgggtcccctcccacggccgtgagggaggggccggcggcgggggcggacccctggcggtcctcctggctggggtccgcgcgctcgcggcagctccccgtggaggtcactgtccgtgccagtccctcccgctgtcccgccctctcccgctgccgccgccgccgccgccgcgcccgcctcagcgcccccactccgcgcttgggagcgaggagccgccagcg

SEQ ID NO: 43401 - DNA, 2300 bp, Homo sapien
gtcccagaagggtaggtgtcaaatccccaagagcatcggcggatccaggttcctgttgtgttactatcctgccttcctaagggtcagacaggctctcaagcaacccccatgaccacaagttgtgcacatcctttcccagctcctctcacctaccattggcaagaactcagtagtggaacacctggggtctcttaatgaggtgtgcttgtgtgactaaaagaaaaagaaattttgggggaggagcaggctggtggatgtgcagtttctaaattatcttgtattttatttgattacagtgtttgaattcagtgttttgaagagatgtatgtagcactgcaagctctattctaacctactttctttggagaagcaggtacatgctgtgttgtgtcagcttagagagccccttcaaaacctctccatgttcaatgtggagggactgtcactatacatgcatggcacaccacaccaagaacagagggctaccagaaaattagaatcccttttatatttgtcacatatcagcatttatttagctgtaaaaataaacagcatatggcatttgttaaaatcgtttgtatttcacacaaatatttggcaatatgtaaactttcttgccagggctgtttattgtggttctatttgcatactaataatggggaaatcagtaatgaccaggtgttggaaggtctgatttctcatttaaatgtattgtttctagcaataaactaattatttttgacatgtttcataaccagaagaatgttattaaccaaagtcataattcctatttttgtgttgatcacacacagatgataagttaattatacttattgaatttaacaacatatataagagataatctcaaatttcaagactctcatttgtgggttaccatctgttttggaccaaagaataggaatttgattgcaagctttcttctgaacagcttgtaataagagctgtttgtatattaattacttattgaattattgtggattttaatgttttaatttacaagcaatttggaacttattgtggtgacagctgctcatattttgatactttatggtatttagcaatttcatcataaggctattttttcccctggtaatttataacccaatcctgaaaacagtaatttggtctctccagctcactataaggagtattgtcctgtttcatccccactgcagatttttttcatagttaaaagtatattttataagcaaaatcaagattcctttgtgcctgcttccctggtgccctttcatttctattcagagttacagatgaatttagtttcactctcattattttacttcagtggtagattttttacaaattgccctggttattactttcatcttgaatatccttatggtttttgttttcaatgtactgtaatgcactttaggggcctgtgaacctgcttgtaggtttttttttaatctccttcctttaaacaacataactataaacatgactcagtgggaataatttgcttgaatttccttaaaacacttgagtttctatataaactccctaataagaaacaccttcactcatagcttcacttgtggacttcaattatattaaacctggtacctttttattatcactgaagactattaaataagaatttagagaaaatggtggacatttaatttccttagttcttgaattcgtagatgatagaggataattgatactctctaggaggcaggaatcattcacaaccaaagaaattttataaggtaaatatcattaggtaaatggtttactgattagtgtttatagtgactgagaaataaaaacaatttttgatataaaggattatcattttatgagccataaacctggcttcctcataaatcagtgcaaatggaacacttgtgaaacagaaatgtctgaagagtaaatgaaaagttgagacgttagtgggtgcctttggttttcttgattttagaggagccggaggagaaaggattctgacccgtttgtgtgtttttatgagcacagtacatgaggatgcatatatgcacacaaatgtgcctggtagagttattggaaagctagcccaagcgatggggaatgtttagctaaagcgtgttgtcttctcccgagggtgtgcacaggttcatgtatcagctgaataaggccctgttccaaaaactgatatttcaagggaaccttaatttatctttaaatttaatgtaatttaaaattaatttaaatctttaaattatctttaaataatagcagtagcaatagctgagctaacattaattttatctatt

SEQ ID NO: 43402 - DNA, 2300 bp, Homo sapien
gagtagtgggcaccagagtcagccagagccccctggagagtactcccaggttatcacgtaggaagcagagaggcggagtgtgttttctggggcatgaaacagtgactcaaatgcagggacccctttgcctggcccactggccctcaaccttcaggcaaatgtacagacactcttcatttttatcttttaaagcactttccattacactaacctccagaagcaactctgcttaccaaggcagaaggaaagagagccactgtccaaattagatattagaattcaagcttttaaacattaatgcttggggagtagttctatggtgcttctgactgtttttacaatggagtgtgtaatccagcagagctgttaagctttctgaagatgtcagtctgttctgacttctaggaaggcagctgtggagtgaacaggctgcgtttatagacgtgccagatctggactcttttgaagtggtggagtttgcacctcattgttgttaaataaggctccgcttcctgtctggcagtggagcctcccgcctgccttctgtggggtcccaagggaaggccagtcctgctatccctagaggaagacggcacagatcatgccttccttaaaaccgcaaagctggtggggagaacaagtgaggaaagtccatgaacacaatggggacacctgcaccttggttgcttgaaaaaaacccagagaggggcccattttaccaggagagaggaggaagggtgtctcttgtgtggtcacaaagagccaatgaggtttgttgaagatgataaatatgatggagctggatttttttttcttttctttttttaaaataaaggccataatctagaaggagcacttctattttcagccttgaagaacttaaaaaaaaaaatcttagtatgcttactgtaatcattaacacaatattacttggaaacttacatgtatagaataaagcaagattttcaatgtatgagaaaacatagaaaaattaacgcagttaagaaaaatccaaataaatagaactgaaagttaaggtgcaaaatgtgtctgtgtgtacttatgctgagtacttttccctttatttttttaatgtttttaaattttaaacttaattctgtgtgtgtgtgtgtgtgtgtgtgtgtgtgtgtgtgtgtgtgtgagagagagagatagggtctcactccattgctcaggctggagtgcagtggtgtaatctctgctcactgcaacctccacttgccgggctcaagtgatcctcccacctcagcctccccagaagctagggctacaagcacgccccaccacatccagctaatttttgttttgtttcgttttttgatacaaggtctggctctatcgctcaggctggagtgcagtggcactatcttggctcactgcaaactccacctcctgggctcaagcgatcctcccacctcagcctgccgagtagcttggatcacaggcctgggccaccacaccgggctaatgtttgtatttttaatagaggtggggtttcgccatgttgcccacgctggtctccaactcttgagctcaagcgatctgcctgcctcggcctcccaaggtgctgggattacaggtgtgagctactgctctttctttaacattgatctgtttgtttcattcattaattgtaaacgaaaatcctgcctctgtgggattatatccatgaatgagagaggccataaaaaaaagcactaattggacaaccatctctacttaggaaaaaagcagttacagggatcagtcacagtttatgaacatgttctggcgccttaaaggcatcaaaatcaggatgtcagagtcccaaataggaaagatctagtccacgaggcctgtttctctagaagaccagtaaagatggcaggtttggcgctctaggtggcagagaaaccaccaggaaggcttggtgaatggggagaaaggtaaccttcccaacctttctgcttctccttccacttccctcctcctcctccctcttcctctcctctcagccctccctctctctgtcctcctcctccgcccgcccaagcatcacctcgtgaggcctcgtggcgttagcccagtgctctcggcccccaccgagcctggctctactgcaggcgctgggggttggggtgggggagaggcccagggcacatgatgccgcccccagcccgcccagcacatgacccaggcaggccggcggggtcctggcacacccgagccgcgtccgcgaacacagcccatggcctccccgcgcctagggaccttctgctgccccacgcgggacgcagcca

SEQ ID NO: 43403 - DNA, 2300 bp, Homo sapien
gcacagactcaaagagtgcgcagcagcaagatttactgtgaagagcgaaagaacaaagcttccacagcatggaaggggactggaccgggttgccactgctagctgcagtggccagcttttattcccttatttgaccccacccacatcccgctgattggtccatttacagagtgctaattggtccattttacaaacctctagctagccacagagcgctgattggtgcattttacaatcctcttgtaagacagaaaaattctcggagtccccacccaactggcttcgcctcttggtaaggaataatacagggaagtcctgtgcacccttcactcttcacctgcctgttccaatggcaacacgttacaaaactacagcacaatgtcacaacctggaatatggacattgatacaatccaccaagccttttcagatttcccgtttcacgtgcatttagttctgtgcaatttagcttaatcaacttggcagctcctgtgaccatcaccacagtgaagatacactcgacttgattctgagaggcacattccttaagccttcgtttaatctttgaaaaagaaaaaatcgcctcattcttctaactaaaggcattcagagactgtagttagaagttaattatggggcagtcaccacgtgcccagcgccatgacaggtgcccagtggagctgcgactctgaatttaatcggctgcatgagacacctccacagaatgcacccctctcacttgacctctgaagaaacagaccagagctgagatttcttgtcccagcttgacagtggcagaacccagacccggggacccttgactctctgtccagtgctctcccggcctgtcctggatgcgtactccagcatcgtcacctctgaaaagggcctggatggagctgcttagagaaaagaggtgttcaccagccttcagctacgtatagaaacagcaacgaaaacagcttttttgcaaagcatgtaaatacctatccatgcaggtactttagaccagagtttcatggaaactgaaaccgagcaggaagaggtggcacacatgttgtccgcaaactttcaccaatcccagacctccacctccccttttcggggatgtaaacctgggaaacttgaagaccttgtggtccaatcctaggcgagtggggacagcatctagacgcaacggctttctgcgcggtggctgtgggaggcctctgcgggaaggtgggaaggccctcgtggaaacggggcacggtccttctgcgcccgccttccaagcccctccagaggccggacccgcgcccggctcaggctgctggggggcgcccttcccggctctctaagtccagagtgtgagtgcgcgcagggccgcgcgggacgggcggtccctctgccccggggcagcggccacagcgcgggcaccagggcctcccgcggcgcttccgctctcacctgcgcggcagcccgcggtgcgcgagaacaaagtgtgggcgccggcgggccgcgcgccccgagacggaggaggccggagactcccgccacgccaccccgcgcccatctcacctgccgcctcacctgcccggtcctggcctccaaccggcgggcgggggcgcccagagcttcgaagcactgcagagctctggcgcgggaggaaaggcccgacctggcgccggggcctccgcccccgtcctcgcccgcgctggctccgccagccccggggcgcgcgctcctcgaccccgaccccgaacccgctgaacggcgcgcgcgcctgagcgcccctcccggcccgctcccctccaccgggcgagagaaccggggcgcgcccctctccagctctccccggtacgagcggccgcgtgggcccctgagcgcgcacctgaccccgtccctcacccttcgggccgcgggctggacctctggacgcgctccccgtgaccggccccgcggtacgagctcccgaacgcgcccgccccgccccccgtcggccccgccccctccccgccagccccggccccggccccggccccggccccgccccctccccgccagccctccgggctccctccgccgccgggccggcactttctttccaagttacggcgcaagttctgcggcgctcggagcctcccttgcgatcccacggccgggactgcccggagtgcatgggcgcgggccagggacgctgagcggtcgcgccatggagggcgccgagccccgcgcgcggcccgagcgcctggccgaggccgagacgcgggcggcggacggcgggcgcctggtggaggtgcagctgagcggcggcgccccgtg

SEQ ID NO: 43404 - DNA, 2300 bp, Homo sapien
tagggggaagtgggtagagggcatatgggagctctcgcctggctgttgcaattttttagtaaatctaaacccattctaaaatgagatgctggccaggcgcaatgggtcatgcttgtaatccaagcactttgggaggttgaggcaggaggattgcttgaagccaggagtttgagaccagcctgggcaacatagcaagaccctggccaggtgcagtggctcacgcctgtaatcccagcactttgggaggctgaggcgggcgtatcacttgaggtcaggagttcgagaccagcctgaccaacatggtgaaaccccgtctctaataaaaatacaaaaattagctgggcatggtggcgtgcacctgtaatctcagctactcgggaggctgaggcaggtgaattgcttgaacccaggaggcggaggttgcagtgagctgagatggtgccactgcgcttttgcctgggtgacagagtgagactccatctcaaaaaaaaaaaagtataatgaaatatttattttttacaaatttttatgtagagaccaggtcttgccatgttgcccaggctggtctccaactcctgggctcaagcagtcctcccgcctcggcctcccaaaagtgctggggttataggcgtgaaccaccacacccagccctataataaaatatttaatcagccatcagctgattgctgttccgtgtgtggcctggcagtatgtgttgagcatttgagaaaaggtgatggcccggggtgaatggcaccctctcttagagacagtaacatgtacttggtaaagtaatacgtgaagatgaaaagtactggaaagaacacgggcttcggagttgaagacacaggctggaatcctcattctgcctctcagtgtaagtgtgtcaggtcccccaagcttgctgacctcacggccctggatcatggggatatgcagagcaaccttgctcgcagacttatttacatgcttaagggatataacattaatgaatcagcacagtgcctaaggttaagtgtcgatatgggggaaaaaaatctaaaatagcagtgatacagtataggctgcaaagcagcatatgttatttggagaaatgagcaagagttggaagtaattgctatgaatgtagaagagggtgacaggaacaggttggaaagagaaactccgtcctggtggctaagcccaggatgtgggagggtgggatagggctgtgaggcgcagtggctggcgacgctgcttcctggaggggctgtggtgctgaggtctggggctgcgttaggagggaggtggggctcagggactttaaatagagatcattgtgaaatggttaattgggaaagtcaggtccagcctgcctttgtcttccctgagtgccttgcacacactcaaagttccggaaacgcttgttagttgcttgatgggttacattcctaatgagtgtgtaatcaacccaagaatatatggacatagaataggctgttgaatgttttctttttcctccttatggttgtggagttgaactgtgtgtcacatatgttataggattatctagcatcacttaatagagaaagctgtaacatcagtgcagtgggctttctatatttccccgttaaaatataagaagtgctgggcacagtggctcacacctataatcccagcactttgggaggctgaggcaggaagatcacttgagcccaggagttggaggctacagtgagccatgatcataccactgcactccagcctgggagacagagcaagatcctttctccaaacacacacacacacacacacacacacacacacacacacacacacataaaggaagactgccccccaagccttttggggttttaaattacaagacacacacacacacacacacacacacacacacacacacacacacacacacacataaaggaagactgccccccaagccttttggggttttaaattacaagacttttggggtttaagcactgaagtgttgggaatgttccccactgaggcaaggagttgctgatgaagtgatgggaaatgcaagcggagccttgagccgtggaggtgaaggttgacggagcctgcgtgagcttgcccatcaacaagacagcaggcacagacaggccagctgttgtgagcttggctttaggactccattcagtaggcaggaggagagctgcagcagaggcgggctgtgggtccctgaagcacatcgctgccttcacagctgggcgaactcccatccagcacggtaagcagagccgggtaagggacctctgcgtttgctctcggggcac

SEQ ID NO: 43405 - DNA, 2300 bp, Homo sapien
gaggcgggcgtatcacttgaggtcaggagttcgagaccagcctgaccaacatggtgaaaccccgtctctaataaaaatacaaaaattagctgggcatggtggcgtgcacctgtaatctcagctactcgggaggctgaggcaggtgaattgcttgaacccaggaggcggaggttgcagtgagctgagatggtgccactgcgcttttgcctgggtgacagagtgagactccatctcaaaaaaaaaaaagtataatgaaatatttattttttacaaatttttatgtagagaccaggtcttgccatgttgcccaggctggtctccaactcctgggctcaagcagtcctcccgcctcggcctcccaaaagtgctggggttataggcgtgaaccaccacacccagccctataataaaatatttaatcagccatcagctgattgctgttccgtgtgtggcctggcagtatgtgttgagcatttgagaaaaggtgatggcccggggtgaatggcaccctctcttagagacagtaacatgtacttggtaaagtaatacgtgaagatgaaaagtactggaaagaacacgggcttcggagttgaagacacaggctggaatcctcattctgcctctcagtgtaagtgtgtcaggtcccccaagcttgctgacctcacggccctggatcatggggatatgcagagcaaccttgctcgcagacttatttacatgcttaagggatataacattaatgaatcagcacagtgcctaaggttaagtgtcgatatgggggaaaaaaatctaaaatagcagtgatacagtataggctgcaaagcagcatatgttatttggagaaatgagcaagagttggaagtaattgctatgaatgtagaagagggtgacaggaacaggttggaaagagaaactccgtcctggtggctaagcccaggatgtgggagggtgggatagggctgtgaggcgcagtggctggcgacgctgcttcctggaggggctgtggtgctgaggtctggggctgcgttaggagggaggtggggctcagggactttaaatagagatcattgtgaaatggttaattgggaaagtcaggtccagcctgcctttgtcttccctgagtgccttgcacacactcaaagttccggaaacgcttgttagttgcttgatgggttacattcctaatgagtgtgtaatcaacccaagaatatatggacatagaataggctgttgaatgttttctttttcctccttatggttgtggagttgaactgtgtgtcacatatgttataggattatctagcatcacttaatagagaaagctgtaacatcagtgcagtgggctttctatatttccccgttaaaatataagaagtgctgggcacagtggctcacacctataatcccagcactttgggaggctgaggcaggaagatcacttgagcccaggagttggaggctacagtgagccatgatcataccactgcactccagcctgggagacagagcaagatcctttctccaaacacacacacacacacacacacacacacacacacacacacacacataaaggaagactgccccccaagccttttggggttttaaattacaagacacacacacacacacacacacacacacacacacacacacacacacacacacataaaggaagactgccccccaagccttttggggttttaaattacaagacttttggggtttaagcactgaagtgttgggaatgttccccactgaggcaaggagttgctgatgaagtgatgggaaatgcaagcggagccttgagccgtggaggtgaaggttgacggagcctgcgtgagcttgcccatcaacaagacagcaggcacagacaggccagctgttgtgagcttggctttaggactccattcagtaggcaggaggagagctgcagcagaggcgggctgtgggtccctgaagcacatcgctgccttcacagctgggcgaactcccatccagcacggtaagcagagccgggtaagggacctctgcgtttgctctcggggcacttcatcccagatgggaccggtttcaggacgcctgcgccgtttgttaggggtttgtagttcccagtggctcttttgttctgctatcttgaagggcaggttgcttgtcagctcacaatgctgtgggtaaggtctggtgaggtcggcgaatgtgttctcattgtttattcttctgcctgaagatgagaaataatgcaaatcagggtgcagattccggctcgagctccacaggcgtgcacgtatgtgtaaggg

SEQ ID NO: 43406 - DNA, 2300 bp, Homo sapien
tttttttttttttttgagacagggtctctgttccatcgcccagcctggagtgcaatcgtgcaaacacggctcactgcagcctcgacctccctggctcaagtgatcctcccacctcagcctcccaaagtgttgggattaaaggtgtgagccaccgagcccggccccacattcttctaattttttttttgttgttgttgagatggagtctcactctgtcgtccaggctggagtgcagtggcgcgatctcagctcactgcaacctcccaggttcaagcagttctcctgcctcagcctcccgagtagctgggattacaggcgtgcgccaccatgcccggctaatttttgtatttttagtagagacggggatttcaccatgctggccaggctcgtctcgaactcctgacctcgtgatccgcccgcctgggcctcccaaagtgctaggattacaagcgtgagccaccgcgcccggcccattcttcttttttaaaacaacctttcccctcataaaagtaatattaccattttacaaaaaattggaaggcaaatcatttttaaaaatcccgccaaaggaatgcaaactcttgtgagcatttcaggacattttcctccagtctcttcccctgtgtatctggatttcaatcaggctctaccagatatttttgtatcactgtaactgtttaaaaatctccctgatactgtcctgcatttcctggcataacgtgttgcggctgtgggtctggggcacgaagtaggtgggagatttagagcaagacacagccccaactctggagcttcagcttccccagctgggagccagtgaaacagaagttcccgtctaggctgaaagttttaggagttgacccggcttcctccccagcaatggtctacttgggtctccgctcaaacgatcagaccccacaaaccggatgaagcgctcagggaaggtcaaggaactcccgcctagtgtgggcccccaggttagcccttctagggctgtcctggcggggacgcaaagtggccacctgcccagctgcccgcttccagaggcgtcctccctgcgccgcccgagaggaccggccgcgggctcccccagctcctcagctccctcggccccgccttcaggggcttttcccaccttcgcgggaccagacgggttgtgtgggagaccgagggcgcagcctcccgccaagtgcgcagagggtctccagacagccagagcccgggagcgggtgaagggagggcactgcccgctctctcgggaattgtttgcgcccgaggagtcaccccaggcaggccgcgcccgcagtccgggtagggcgtcgtcctccccgcccgccttcctctacgcgggggcccgggggcggactgacgcggcggcgcccatcctggcctccatgcggtttcccgaggccggaggaaggtggcggagcgggagggagagagcgaggagcgcgcggagagggaggacggcggagggggaggagcaagcggaggggtgggggtggggtcgaggagccgagcgccgaggaggaccccgagggagactgggggcggagcagccggcgacggagaggcgcggaggacgcggggccgggggaggcggagcagcgggagtgggtggaaaagcagaggcggcgggaggagcgggagcctccgtgggagattcgggaggagcagccggcgtgggtggagccgccggcgtgggaggagccgcggggcctgggtgagaacggggcgggacggccggaggcggggcctgcgaacgccctgcccctgctcgcccgggccgcgccgaggaacgaagatggccgggcgcgccgcgggaacggaggggcggccggcagcggcggcggcggcggcggcggctcccgggctgtgacttcgcgcgcggcggccacccgggctacctgaacggagtgggcggcgcgggcagcggcttgctagggcgggcgggcggacgccggtgcacgggcgccgggcggaggatgcgccaggagcggcgggcggctccccgcggccgcccccgcgccccgggcgccgggccttagtgctggcggaggaggcggcgcgcgcggggcggccgggcggcggcggggcccgcgccgtcatgccttggctgagcggcggccggcggcgacggcggggacagccgcgcgaggccccgcgggagccgccgccttctgcgcagccccagcgggaaccgcgccgccggcgccccccgccgcggtccccacgcccccagctccttccgcgccgccgccgcgggcccgggagagcgccgagctgccgctgcccgccgg

SEQ ID NO: 43407 - DNA, 2300 bp, Homo sapien
cgctcatcccttctcactgttccaccttctgctacccacctgtagtttcctacagtttggtccagggaaggtgtgggcttcggggcatgggtctgccaccgactgccttgctcgctctctctggccctgcagtctccccagctgctgtcttgtggtcagcagaacaatggcttccaagatgtgcatgtcgctaagccctggaacctgtgaatatgttgacatgcgtggcaaaagggactttgtagctgtgatgactttaaggatcctgcccagggaagatggtcccggatgatctgggcaggcccagtgtcatcacaagggtccttatgagtggaagaaggagacagaatagagagaaccagaaagatggcatcctgagaaagactcatctggccatgctgcctttgagaatggaggaaggaaggggctactagccaaggactacaggaggcctgtaggaggtggaaagggtacaggaacagattctccccagaacctccagaaggaatgcaggcccctggacccattttagacttctaatgttgagaactgtaagggaatccatttgtgttgtttaaagctacatggcccaggtgccatctctcaagggacccagcaggatacagtaggcgaaaagggaacaaaagctgggccgtgccttctttcttctctcccctctctggccctggaatgaccagcagtgtgtattcgtgtgctctgctgaaccaagaaatgtggtttgtgaagggcacgatctgcatctggcagctctctgggtggtggctgagggcagagaaagtgagtgactctggggttgatgctgttgcgggggtgggatgaagagacagtggcagctggcccaggaagtcccccaccttccaaaagcgctgtcaaacctccgctgtctccctaccagcttgttccctgaaggtcagcccgcttaggccatgtggattcatctggagcctggggctgaatgcattaaacttatccccagaaggtggtgaaaaagaccacttctttctttgcaggtgagcatgtgaggcgatgggagagcgctttggcaacatctctcaaatatttactgtcagctcctctctcttacttacagtaaagagcagaaagctgggacgtacctaagtggatgacccagggtgcctggtaaataagtgacgccgacagagctaaaagacgtgaggcaatacccaactgaaatgcaataagtttatgacattatatctagtatgatatgagctatggaaaaaatgtaggacaaagaagagagaaaaagaagctaaaatgtgaatccaaggcttctggatcttgagtggttatattccatgtagacattatgatctgaatttttgcatcaaatttaagatataggggtaaaacttcatatcctttgaccttgaaatttaattctgagaattttttcaaagaataattataagtacggcttatgagctttatagacacagatattccttctatcattaatataaaattgagatatatttcacatgtgccataatagtcaccatttcaaagtgtacagcagtggtttttagtatattcccaaggttgtacagccatcaccctatctaattccagaacattttcttcccactaaaaggaaaccctgtgctcgttaacagtcactcccattccctctttcccccagcccctggtcaccactgatccactttctgtctctctgggtttgcctattctggatatttcctttagatggaacctcacaatgtgtggcctctgtgtccggcctctttcacccagcacattgacttcagggttcatctgtgttgtagcatgtatcaatacagttgacccttaaacaacatgggtttgaactgcatgggtccacttattctcctgcctctgtcacccccgaatcggcaagaccaaccattccacgtccatgccggcctactcagtatgaagactaagatgaagacctttatgatgatctacttccacttaatgaatagtaaatatattttctcttccttgtgattttcttaataaattttctttatcttattttattgtaagaatatggtgtataatgtcaaaatatgtgttaatcaactgtttatgtaatcagtaagatttctggtcagtagtaggctgttagtaattaagtttttggagagtgaaaagttatacatggattttgaaagttcgtgggggtcagtgccccaacaattgcgtctattcctgcattcctttttatgtctgaatactattccatcgtatggctagaccatgttttatttatc

SEQ ID NO: 43408 - DNA, 2300 bp, Homo sapien
tctcgatctcttgacctcgtaatccgcctggctcggcctcccaaagtgctggaattagaggcgtgagccacggcgcctgaccggtactaatgtttagcattgcagtgaactttgttgaactttggtggtaggcttactttctacccttaatgggaaagatcccaggtgataactcttgggcttgtgttcctcccactgcaagttgacaagttgacacatgtgttgtagtgttgtaagccaggattcagcaagccctaacctcatagcctcatttgcatattatctctatcccaagtgaaagaaggcctttaagctcagatctgggaaacttaaagtcccaggagtttaatatggagatgttttctataagttatttctgccttttaaggacattgttggagatgttgctttcattactgattttaaatgaaaccaaagagtcaggcaagatggaagatgtaggatttggaaataggcagtcttgtctaagaaagaattgtttgtaaaatattttactccatgtctttgagagatcatgagtctaagtataagaaaattggagataaagttggcaaacatttagctcttccagttgtttatttccagtagattctgttgtttgaaattctgactgaatgggacttaaatagtagattttccatagaactgttattaaaataggagatccaactgctcaagtgaactttggatgtggttctaattgaggtttgaagtaattgtgctgttgaagctactcaatggtgttgagccatcctctgcagtacatagtccacaaatgattttgaattggtttctcattgttggcacctgagttatctgaatgacagccagcctttgattctcagatcaaaggcgttaaagaaaggactccgtccctgcagatgtgtcttctgagcaggtgatgttaatgacaatagctgggaggcagagggcaccagagtggggtggttcacagatgaagacagaccagcattccactagctaagcagaagaagggaagccatgcagcagtggtatagagcccatgccttcagaaacctaaagaaaggaggcagaagcatcaagaaaaagcaccgcagagcggtggatggggtggtagaaattaggaatagccactcgctgctccagcttccgtaacactggaaaaagcttgcagctctctgtgtgcacagaaatttgctgactgtgcctagcgtgtaaacagctctgtggctcttactcatccctaggtattggttactcacgataatgatgccatgtctgtaaaaagactttaaatcatatacactgcactgtttaggaaagcattgaggtatgtgatgtcttttagctaaacattcatcaaaacaaattattagagtaaaagcacgagtgcctcacttcagtttctgggacaaacaacttgggggcccatcttttttctcaagcctgccagatcctgacgtattactagaaatcttttttattttacaaatttctaatgtttttttcctttcttgtgtcaaaaattgttcatccggagaatataagtgtgaagaaaataaaaataaaatcatttttaatgcagccattgagaataactgcagttaactttttggttctatctttccagtgacgtctgtgtgtgtgtgttttaaaagaaagtaaaagtaggttcatactgcaagtactattcacgtattaagtacagtttcctatgtcataatcacacctcttccccctcaccccgtacccccgctgtgtctatatggtgtttaactgtagtagttttatagtagaactaaacagagttttgattgacctacagccatgtattttattatatgggatcctatagaaagtcctgatgcaaatatcaaacatcaggaagatttgaggatgttaaatgtcaattctttaggagccagtgaccacttgtaaatcagagatttagagtcctttaatgcagtaaatcagaagttccttgtgtgtatgtattttgaaggatccattataaaataaaatattttctttctatttagcattctctggatattcaacaaatacaaagtatgacccacaccaaattaaagcagaaatagcaagtcgtcgggatagggtgagtaaaaccgctgtttttacaaccaggtggacggaagcctggggccttatagcctaggccgctggtgttctactctggttgactcctcctggagggatcgctagcagtgttagactggaagagttctgagggttctgatgctcttccctggtgacccctgaattatctatgtgctacc

SEQ ID NO: 43409 - DNA, 2300 bp, Homo sapien
aatcccagcactttgggaggccaaggcaggaggattactttagttcaggagttagagaccagcctaggcaacatgacaaaacctcatctttacaaaaaatacaaaagttagctgggtatggtggcacatgcctgtggtcccagctacttgggagcctgaggtgggaggatggcttgagcccgggaggtggaggtggcagtgagctctgatcgcaccactgcactccagcctgcacaacagagcaaggccccatctcaataaataaaaaaagacaatacaaaccctattatgtgttaatattagtaacatttttatgactgataacttttttgaaacaaaaaactatagtgagaagagtggtattatttgcccttgctatccatctctttagcgtctggcttgctagaaggcagctgctttggccattggtgcattcggcctgttgagatagggtcattttgagtgaacacgtgaagaccatctagctgcttaccgatatgccattgggaaggaggggacctcataggacccctgaaggagttttggggatccgccaggggtctttggatcatgctttggaaaccattggtttcaatatatgatattgaacttgaaagtgggttgtgtcgtggctccatttaggacgatgcttgttactctcttgccagctgacctctgcatggcaccatttggaattttgtttgcatcaagagaaacaaaggctcatcagaatttatggcatgtggttgaaacttgtaaacaaactcagactggtttgtcttccttatcctaagttggtggcgcatctgtttcctttatgggtgatagcagctctttgtcaatcacgtgtcatctgccgtacattattttatctatgcagcatcagttccctgagctggagattgtggactccatttttacaggtaatgaaactaagggctcagagagggtgagacatttgcctaaggccacacagcttgtgagtgactggccaggtgggattctctgaatcccaggctgctgtcagacactgtgtctggtttcctctcactcccacctagccaagctctttaaaccccttcggcatgtccccttccctgttggtggaaagaggaaggtattaaaggggcctactgtggccacacgtcacagtgtcatttccatttgtaaaccaggagtgtttccttctagaggcaaacatatttattcatggagttgtccaacaactgtgtattgagtgcctatccacaataggctcgattctaggcggtgggcctactgcagtaggaataaattttattctacaaaattactaagtagaaaaaagtagaaggaaggaaaacaaaaatacctccaaccccatggcctggagatggcaacggctgctgttttgtttcatttgcttctaatgttttaactgtatagatcttagaattatatttgttcttctctagaaggtggcctagtatgagggaatctgatttgttccaaggaatttcaacagatgactgcgtgctctgcgtttgagctcatctgctagttatctgtccttctgctcacttaccactcctcccatccatccaagcagccatccccagccacccacccagccagccatctagccacccacccagccacccacccagccacccatccagccacccatccagccacctacccagccagccatccaccaacccagccacccatccagccacccacccagccacccagccacccatccagccacccacccacccatccagccacccacccatccagccacccacccacacattgacccatccctgtgcccactcctcttctcacgcatcccctcccccgtgcactgtgcctggcgcttccacagagtagcaggcactgctcagggtgccagggatgtatttttcaaacgggacaaaagcagtctctgtgatcttggcccttgtgacctgggtgcttttagaatgggtggtgattgcaacctaattcagctggagggaattgatagtggactgtcttgttatgaaaatattctccctgtctttgaaatgtactaatcgactgtcttcttacctacaggattctgcttcaggaaaaaaggaattgtctacttatgcagctggaagaagccacccgcttaacatcctacctccagtcccagttaaaaaggtaggttactttcaaagagaaaactgtacttgttcatcatgttccaatgactggtacatgaactcgtttcttgtagcttgacctgaaatgttgttaacacagaatggatacattatatttttaacatg

SEQ ID NO: 43410 - DNA, 2300 bp, Homo sapien
catttggaattttgtttgcatcaagagaaacaaaggctcatcagaatttatggcatgtggttgaaacttgtaaacaaactcagactggtttgtcttccttatcctaagttggtggcgcatctgtttcctttatgggtgatagcagctctttgtcaatcacgtgtcatctgccgtacattattttatctatgcagcatcagttccctgagctggagattgtggactccatttttacaggtaatgaaactaagggctcagagagggtgagacatttgcctaaggccacacagcttgtgagtgactggccaggtgggattctctgaatcccaggctgctgtcagacactgtgtctggtttcctctcactcccacctagccaagctctttaaaccccttcggcatgtccccttccctgttggtggaaagaggaaggtattaaaggggcctactgtggccacacgtcacagtgtcatttccatttgtaaaccaggagtgtttccttctagaggcaaacatatttattcatggagttgtccaacaactgtgtattgagtgcctatccacaataggctcgattctaggcggtgggcctactgcagtaggaataaattttattctacaaaattactaagtagaaaaaagtagaaggaaggaaaacaaaaatacctccaaccccatggcctggagatggcaacggctgctgttttgtttcatttgcttctaatgttttaactgtatagatcttagaattatatttgttcttctctagaaggtggcctagtatgagggaatctgatttgttccaaggaatttcaacagatgactgcgtgctctgcgtttgagctcatctgctagttatctgtccttctgctcacttaccactcctcccatccatccaagcagccatccccagccacccacccagccagccatctagccacccacccagccacccacccagccacccatccagccacccatccagccacctacccagccagccatccaccaacccagccacccatccagccacccacccagccacccagccacccatccagccacccacccacccatccagccacccacccatccagccacccacccacacattgacccatccctgtgcccactcctcttctcacgcatcccctcccccgtgcactgtgcctggcgcttccacagagtagcaggcactgctcagggtgccagggatgtatttttcaaacgggacaaaagcagtctctgtgatcttggcccttgtgacctgggtgcttttagaatgggtggtgattgcaacctaattcagctggagggaattgatagtggactgtcttgttatgaaaatattctccctgtctttgaaatgtactaatcgactgtcttcttacctacaggattctgcttcaggaaaaaaggaattgtctacttatgcagctggaagaagccacccgcttaacatcctacctccagtcccagttaaaaaggtaggttactttcaaagagaaaactgtacttgttcatcatgttccaatgactggtacatgaactcgtttcttgtagcttgacctgaaatgttgttaacacagaatggatacattatatttttaacatgctactactgtatgactcaaggaatatggagagaaccacatttggcttcagggtaaataagaggcctgaagtcagatgtattcaaggattttgtaacctaattaacagtttcagaagtgtacatctatacacgtgcgcatttttgttttgggttttttttaaaagcatacgaactttttaagctagtaagatttggctgctcaagaatggccaatgtcaagggcctcagatgtgtcattttctcagatattcctcctaacaatgccccaggtgggaactgttctcaccccagccccagtgggagcccagagggggtgaatggcttgaccaagtgtacctggctagtatgtgttccagccaggactgggactgggacttgggcacgggtctctgctgttgcccactgctctctgccaccctttccgtgctcacagggtgagcaggggtggctgccctgccatctcagatggccatgctgtctcatttcagcctgtgtgccagcaccctgacggtgtcctcggggagcagccgcgggtccctagcctccagccgtgggtctctggcctccagccggggctccctgagctcggtcagcttcacggacatctacggcctcccgcagtacgagaagcccgacgctgagggcagccagcttctacgcttcgacctcattcccttcgactctct

SEQ ID NO: 43411 - DNA, 2300 bp, Homo sapien
gtctaaaaatttggggtcagcagaaaagatagttagctctgacttgtaggtgtgactccctccagacccctcaggaagagattcagaataaagagcaagggtcagagtgcagtcctcagctcccccttatctgagatctgtgccagcgggtccctttggtgggggtctgggtttctgaaagacagtcggggacatatgttaagatgtctttggtttctttttttcttttctttttttttttgagatggagtctcgctctgtcacccaggccgcagtgcagtggcgtgatctcagctcactgcaacctctgcctcttgggttcaagcaattctcatggctcagcctcccaagtagctgggattacaggcgcccaccaccatgcccagatgaatttttttttttttttttaagtagagacggggtttcatcacgttggccaggctggtctccaactcctggcctcaaatgatccacctgccttggcctcccaaagtgctgggattacgggcgtgagccaccgcacctgaccaagatgtctttagtttctctaggcaaccaaacatctccagactctaacttccttggctattgttttaggctactattaccttcttgcttatcaggttacttacttacatctcagggatagcgaggtacctggaatttcccttgaaagaaattgattttcctttatttccatgctcgggaggtctgcaggcccctaaaatggggtctctgctctatctcaggagtgggaatggggagttgtttagtggagaggacagagtctcagatttacaaggtaaagaagttctggagatctgttgcccatcagtgtgaatggacgccactgaactgtgcctgtacaaatggttaatatggtaacttttgttgcgtgtttttttcccacaatattttaaaaaacagggccctgaagggcctcactgagaaggcagtgtttgagtagagatcgtcaaggaagggagctcagagctttgtgcagaagcatgggcaggtgtgggagcagccagtgtgtgttgtggggcggtgctgaggacgaagggagtgtgttgtggggcccactcaggacccttccttttctctgagggcatgagaagctggtgggttttgagcccagtggcaacatgatctgaccgtagcttttttgttagtgctttctaaaatttattgagttgaagttcacataaagggaagcattttaaagtgtatgcatcagtggcatttggtccacagtgttgctcacccgccacctctatctagtttcatgacgtttcaatcaccccagagtaaaacccgtccccattgagcagtcactcccattcccctccccctagccacctgcagccaccaaaatctttctagctgtgtggatttacctcttccggatgtttccagaagtggaatcatatactatgtggcctttgccgcatggcttctttcactcagcacgatattttcaaggtttatttacattttagcgtgtataaacactccgttggtttttatggctgaatgctattcccttgtgtggataagaccacatcttgttgatccattgatctgtcaatggacatttggggtgtttccacatttggccagttttcctgggatgtccctggttgctgtgttgagaatagatcgaagggcagagaggtgtggaattgggaagactggtgaggcacctactgcactcatccaggcatgagataatggcgactcaggtgaaaggttgctgacaagtgctcaaaacccccttgatcttgaacacagagccagcagggatcgctcttggaccagatatggggtgtgcaaaagagatcggaagtccgggatggccctaacgttctttgcatgaacaaatggaaagttgagatccctgtgagaggaggggccagggtggggttggggagatatcagcttttccattgtggacgtgccacatgtgaaacgccagctaaaccccaagtggagaagtgaaagacatggttgttcccataagtttattgctcacattatgaaagaagccatagtcatgagtgaaccactccctaggttgataaggaaaccaacacggaagatctctttctggaagaagcagccagcctcgtgaaggagcggcccagccgccgggcccgagggtcgccttttgttcggagtggcacgattgtccgttcccagacattctcgcctggagcacgaagccagtatgtttgcagagtaagttggaatccctttgtcacctgtctggaatgttttgtcttccatcccctttgtgattt

SEQ ID NO: 43412 - DNA, 2300 bp, Homo sapien
catcttgggcatcaaattatactccatcagtaattcaaaccagggtttctcgacttcagcactattgtactgatattttgggccgaaatgttcattgtcccgggaggtaggagtggagagggagctgtcctgtgcactgtaggatgttcagcagcagccctggcctctacccactcaatgccaggagcacacggctcctcccacttcagttgtggctgccaaaaatgtcccctgggggaaagggagcaacatcaccccattaagaaccgctgttctaaaccttgtatgacatctgtagaaaactggcagataagagaaaaaatgtagaagattcaaagggataggaaagagaaatctgtgaagacaatggaaagagcctgtagtcccagttacttgggaggctgaggcaggaggattgcttgagcccaggaatttgaggttgcagtgagccatgatcgtgccactgcactccagcctgggagacagggtgagaccctgtctcgaatgaacaaaaaactcaaaggttattattccgtaactattgaaagaatcttttcatgaaggatggtaataaccagctttctatctccacacagagcaaagtaaaaagaagtaggtttaaatggaagagaaattaaaactggacatacagatggttaaatattaacaacggcccctgaatggcactttctttcctaaagatcttcatgagcagaataatctaggatggctagggattgttccctcgggactttgtggttaagaattcaggatcttcaagtaatgaaatctgcattaaaaaattagccaaaactgtttgtttattccataatcatgtctatatggtgcttttaagaaaacaatttttttgttgctataaaagcaatacatattcactgtggaaaaattagacgatatctctaagcttaaaagaagaaaaatttaaaacacccttaatcccactaaccagtgagataccatgtttgatactttagtgaattcatttcctaatagttttctgtgttcgcaaaggtatatgtgtagatataaatatattacacctacatagaaacgacggatcactcagcacataatgctttgaagcttccattttttttcccatttaatccgctgcacatgtctttttccatccgtgtgtaccaccgtattagttttaattcttccactgcacagatggcttataatttaaaacatcccctgtttttggagatttaacttgtttccagtgctttgagatcataagtaatattgcagcaaactttccctagtcaggggtttgcacaccgttcttccccccacccccactccccacaccccaggacaaattcttggacatcaagttgctggagcacatgataccaacagctgtagggcccggagtaattggcgaaactgtgtatctgtaaggcatttggtaggaaaaatgctaaacagaccaccagaaagattgctcaacttacattcccatgggtggtattggtttttgctttttttggttttgttttttaatcttggctaaaatgacaatttgaaaggcgagggtggagggtgttcagacagctctctcattctgttgagaattgcttggcccagttctgggccttgtctgaattgccggtttgctgcaatgttttttacaattgagcaatcacctagaaaaaagagaaggtgaaactaacctactgcaaaaaaactgctccaggatgaagaaggttgcctgtatttcgtcatttcagccaagccggaatacggagcaaggctgtctgcaccgtgctaccatcctcttcaggctgcagggcattttgtatacccaccacctcccattgatgctggaaaatccggtcacagaattccgtgcagcccagcccctgagggtggggcgtcctgtctccgggacgccgggttttctctggacacgaatgctccgggggtaggaggcgaatgacactggcacggcggggctccggagccaagaggtgaccaggctggctgggcagggctgagtggctgggccgagcacgtgatgctcccagccggcctccggggccctccgggctgaaatcgacatttgcctctggcaggaaaatgagcttgtcagtttctgcctccattagaccctcaacccaaaggagcaggagatttcggtagcgttttaactttatctcagaatctgaaagcggaaggtaagctgcttatcactcagaaaaacaaatttgagaggagtgacctagtaaagtacactgcgactttgttgatttttaaaatctggtgttgaaaat

SEQ ID NO: 43413 - DNA, 2300 bp, Homo sapien
ttgttttttaatcttggctaaaatgacaatttgaaaggcgagggtggagggtgttcagacagctctctcattctgttgagaattgcttggcccagttctgggccttgtctgaattgccggtttgctgcaatgttttttacaattgagcaatcacctagaaaaaagagaaggtgaaactaacctactgcaaaaaaactgctccaggatgaagaaggttgcctgtatttcgtcatttcagccaagccggaatacggagcaaggctgtctgcaccgtgctaccatcctcttcaggctgcagggcattttgtatacccaccacctcccattgatgctggaaaatccggtcacagaattccgtgcagcccagcccctgagggtggggcgtcctgtctccgggacgccgggttttctctggacacgaatgctccgggggtaggaggcgaatgacactggcacggcggggctccggagccaagaggtgaccaggctggctgggcagggctgagtggctgggccgagcacgtgatgctcccagccggcctccggggccctccgggctgaaatcgacatttgcctctggcaggaaaatgagcttgtcagtttctgcctccattagaccctcaacccaaaggagcaggagatttcggtagcgttttaactttatctcagaatctgaaagcggaaggtaagctgcttatcactcagaaaaacaaatttgagaggagtgacctagtaaagtacactgcgactttgttgatttttaaaatctggtgttgaaaataattgatcgctgtgagagtcaagggctgtatttatccccaaattagagattaaccttctgaacagaaatttggttaatttggagggaatcacggtataagggccagggttaaatatagaaggacacgaaagctgatggaataaactgcaagtaaacttaactctagcctgcttgtaaaacaatctatttcatgtctccttcagggctgtgagcaaagggaatgttaaaattgtgatttttaactcaagtgaaagtaaatgaatctatttgcaattggaatacaaataaaagcagtctttgcttttgtccttttacatttcaaaaacgcttgtgtattttggcaaaagaaaagtttatatgtgcactgcttaagtttgaaatacgctatttcaaatttacaaaattatcacagttgtaattttctaaagtctttctaggcaaggctgtttcagttgtgaatgagaaatgttgacattgtacatattttctgtgatagtaaaatgactcacttcttcagaatgtgataaagattagaaaatgtgaaataatgagttattgtgaattaagtcatgtctcagagattaaatgccttgccagaagatgtaagaaaacagagacacaaatacaaccatgctcacgtagcagtgctttattttaaatcatcacatatttaagtaagtagtagaaatacgtggtgtcaccattttttcctttggcaaatacaaattaatattggaatgcagctattcagagtaattaaagcattattcatccgtgcaattagtataatgttccataatgaattgctttgaactaaagtgtttggtataatactcgatatacggcttgaaacatagaaactctaggcaaagtatgtccatgctatattttgtgtcattttgatttgcacaaaatgtttatttctccactgcatttgataaatactagttttaaaataaaacatgaaattgtatttcctttcactgtaatccctttattgctaattcttttgaaatcctattactcgcttggagcctgtaataatttggatttctcctcctgtgtgttgtttttcataattcttcgcgaaaggccaggcaagctgcacacatcaagcgaaacgcctgaggggcggccagcgcgagggtttctggccatcgaccctcacctcccgggacttccagggtcttccccccaccccgcgcacacctccctgcctcgccccgagggcgtcacgtggcagcgtggggcccgcctcctggtgatgtcacggcgctcgcagccgtcgcgctgaagaaaggatgctcgaggatgctgtccaggtgggcggccgcgggcgcgatgcggcactgcaggtaaggggcgcgcggcgcctggatgccctccccggcgcccccggcagcgcggacgctgcaggtggagcccggcccgcgggcctgcagcccggctgcgcccccagaaacccaaagtggggcctctggctgctgcggcgcctgctgcccacagctgcctgctgcag

SEQ ID NO: 43414 - DNA, 2300 bp, Homo sapien
ggcttgggaaaacacttataaataataattccacacatgtaagatggctaatcaacctaggtctgaaaatgacttaacaggaaaacattttcaatatcagtctctcatgattcccaaacacacacacacactcacaaactcaccacaacttcaaaattagcaaccaaaagacatctaaatgctgtgatctttccttttctcttccagatcagattagctttgctcttcactgtccttttgtcaaagcccctattgtacagctctccagtgtccttcctgcctgcccttctactgccattgtaacttttaccagccccactaccatttcagaagaaaactccaggaaagcaagtaagcatggatagctttaaagatcaatgctgaaggcccactaagaccaggatacaaagggagtcaattagaaaaaggtgggggtcaaggaagaactccccactcccaagttaaactcctcaatttgctgttttgttttagccagactctatggagctcagtcatggctagctctctgcaaatggcccccaaaaggcttttcacaaggggcagtaagatataactggcttcggtatttctgtctccccattcccagataaccaattcaagatgcatgcccactgtaccctgcatgttgttgaaacagaattttaatttcctctgtcttgcaaaaatgttcttttgcctctcttccctggtgccttttctcatcttcctcacccctgggtttcctaactctgtcttgcctactctgatctccaaagaccagtctctccttcatatttggcatgaaaccttcctcagctactcacacagtaattgcctcatttctcaaactctccagagtcacatcatccaatcaaagtactgtgtaatgtgagccacatatgtaattgaaaaattttcaagtaatcacattttttaagtaaaaataatcaggtaaaattaattgtactaatacattttatttgaccccgatatatttaaaatgttatcatgtcaacatgtaatcaatgtaaaaatgattaatgtatgcatttcatattcacagcacatctcaattcagactaaccatatttcaagtgctcaaaaccacaagtggctagtggtggccatattggaccacacagctctagaacttctgtagcccatggtttagcagttaattatgtgtgcacttggcatgttcgctgcttgttctctagtgaagtcattctttctagcaggccaagttctgtttctaccacaggtcctagcatggtgctttgcacattgtgggcactcaacaaatccctaagatttgcttcatagatgatccctgtacattgatagcatcttcctcattcatggaataacaagaatgacctcatctcctctcactttcattccttagctactaacactgttgcaaagatctctggaaaccggaaactttggtcacctatactttaaatggagagagaagtaaaacttgctgctgagaagcaaggactgcatagaaggtttagtttgctggtagaatcaaaataagcactgaatgaagatgtgtgtggttcccagttttataaataggttttgcaagaggagagtgtttgcttctttgtttttggtgcgaaacatttcttcttttagcatgttatctgaaagtattgctgccaaagggatgatttgccagagaaagatggtttctgtccagttccttcatatgtcaggcataacctccaattaatctgaatgaaagagtgggtgcccatgcagacaatgccaacaaatgcccctgtagagaggacacatacagatgccaacctgaaatcagacactggctactgaaacaaaggattgctttaatttttgcagaataaactatttttttcttctgcttttcacgaagtggccctaaagaattcctcttgtttgtggtctcgaaaaaattagaactatgccaatgaggcctgcctttaagggttctattaaacaataagaaggctttgttcttggcaataaaattaaagcaagcagtgtttccattacctggcaggctgccctctcccttcccacaaccctgaccccgatcctgacaaacctcaacagaccattctgtttcccaggtaggaaggttagatggtaacatctgtcaggtttgtttatagaaatatagttgaccttaatgataatgtataaagagggagagatgggggcggaggggggaggaaaaaaagggggtagggagagagagggacacttctccaaataatccttaactcaagctttaaaaaagtcaagtttac

SEQ ID NO: 43415 - DNA, 2300 bp, Homo sapien
cccataaatccggctgagaacgctctccccaccacccccgtgggtgatttgaacctcccgaccactgggtgaactgcactgttctcccacagcctgcaatgggctgcatgtaatattcccatcactggtctgcagacctctgctaatggtcttgaaagggagaaggttcaaagcggcttggttcccaggcctgctaatgagcatgaggcctcttcacccttaatgaactggggtttgtgtggaattctttctactactctttttgatgggaaggcagatgagagttcacaaaagcactcaggtctttatggcaaggggagcaggcagctgggccaccctcgggtggcctggaggagagcaacatagctagcagaggtcgtacccaggccaacatagctctgagtgtgaggctggacctcctgccagcctggcctgttgctggcaacagtgacaagcccgtggtgggagttttttggccaaaagggtccctcagcagttttgtaagcctccttaaattgctttctcaactgtaatcattatcattgtcataacataacttatcacatgaatatgatgaccactgaaatccttgttctaattaactaaatcattgctctaaatattagtcattggtactcaaacttactgcagccactgaaaaagcccccagatatttttctccacttcgttctgcctacccacgtcccactgctggattaaacaatagaattattcagaaacataatgaacacatgccaaaaatattgcctctatcacaatcatctttgtgaaagtcaatgttttttctcaggaatatattttggaaaatgacatcccacacttaaacacgatcatctctgctgaaatccccacatttgatttcatgtacatttcatgcccatttctatagttactgccttcctattgttctgaaacctggtttggtattgcagagtaaaagtccttaaatctcgtatacattaatacgtaagtttataaattcaaatttataaaagactctagtttattgatgaatatttctacattttaattttctgtgcgaggttaaacctgactctgacacaataagattattctgattaaatacaaattatggaaattacagtttcaattacattctagttttgaatgaagccttttaaaaaacaaaattgaaaaaaaaaattgcacattttcagttactgaactttgagaaaatgttaactggtatatgatggctcaggatgctttttcctccttttttccccagtgaatagaaagagaattatttggaatgtacacacacttaccctttcatgacctgtgtttggaattattctgagatgcattcaaagctgacacccccctatggttgacctccctgtgcctaatcaaatcttacattcttgtttccagatagctgatcagcttccttgggttttgctgatgacacaagagagctttgcctgaagatggaaacactggagtcagaactgacctgccctatttgtctggagctctttgaggaccctcttctactgccctgcgcacacagcctctgcttcaactgcgcccaccgcatcctagtatcacactgtgccaccaacgagtctgtggagtccatcaccgccttccagtgccccacctgccggcatgtcatcaccctcagccagcgaggtctagacgggctcaagcgcaacgtcaccctacagaacatcatcgacaggttccagaaagcatcagtgagcgggcccaactctcccagcgagacccgtcgggagcgggcctttgacgccaacaccatgacctccgccgagaaggtcctctgccagttttgtgaccaggatcctgcccaggacgctgtgaagacctgtgtcacttgtgaagtatcctactgtgacgagtgcctgaaagccactcacccgaataagaagccctttacaggccatcgtctgattgagccaattccggactctcacatccgggggctgatgtgcttggagcatgaggatgagaaggtgaatatgtactgtgtgaccgatgaccagttaatctgtgccttgtgtaaactggttgggcggcaccgcgatcatcaggtggcagctttgagtgagcgctatgacaaattgaaggttagtccgatccgccttaagccaacccctttctgccagaaaatgtcatggaaataaaaagtgtattcactgctagctacatggcaggtgaaggttttctcctcacctttgttatctgattagttttagcatgtttttggcaacctataaatgttacacaataagggt

SEQ ID NO: 43416 - DNA, 2300 bp, Homo sapien
tgtgtacttatgtatacatgcacattgtatataactacaaaaactaattccattatggacatatataggactttatacagacatagttatatgaatatatatagaaatacctatcaaactataaatacatttgagaaagcattcagggacagcagtgttaaaagcttttcatctgtgactggtttcacagaaattagtgacttccatttctgctaccatcacgctgttggtctgttcaccaggagggttgatttagacttctgccaggagactaggtgtggccatctctcaccctcttcctctctgtccagtctgctatcattgccttcagaaccaaattcttgcatgatacccagtacagcatagacctggaaaacatcggtcattttcaatataatgtaaaataggttctgtgtgcctttaaaactaaatgctttatttcttaaactgtaaaagacatgaaatgtctgagacattcagatagtgggaaatttcatctgcaagttgtcagattatgccctttagaagattgtaattttttttgttgtttatcattttctcttgaggggtggagtaaatatttctttcctgatgtttcaacttcagatgttcaggctaattttccactacagtgccaaaatagggaaaagttaggcctgtagaattttgacaatttaaatgttgttttaacaaaagccatgtcttgatgaaaagttctttagaattctacttgatgatctatgtgtgtctcttccgaggacaatgagaacttcttaaggaagtcatctatatgtgaaattgagtaatccttttattcattgttaaaagacaaatgaagttataatttggagagacataagccaaaaaatctatgtttgcatttttatgtcctaacatgtgaagcatgctttgatttactgtgaagtgttgcaatggcaataaagtagatgttgagacgtgcagactgggcagcccgaggaagcagttcttgcctctgcttcccctttatcatgaatgttccttaaacacctttggtggagtccaaatgtctggattatgaattgaattgtgcaagattctttttttaaacactttcctgatgatttactttacttgcagtttcttgtcttgcatggtgataagcaatatccttcaaagaactgcagcgcaggactttttttttttttttttcttttaggaagactacttccccttcctcctttagtcaatcaaattttaaaagattacttctttccattctcagttcaccctttctttgccattctggagactgaaattttggacacccatcacagatttgctattatatatataccgtgtatgtaatattaaatatatatatatatatacacacacgatgtttttatatatgtgtgtacataatgtatgcatacgtgtgtatgtgaaacctgtgtgtatatacatatattttaaattgtttatcaggatgatagattgctatttaggtcactatttttggaagaaataaatgactgttctttgtgtctgtactggagattgttcttcctgatataactttgaagaaaacttcttccagacattatacattaattcagaagataaaggcacaaaataatgtgtatattatttttttaaatgaacaagccagcatgcagagcataatgtgatcatgtgctcagtacgacactgaaaggccccaaaggcaaatgagtctagtgcctgttcccagccccaggagctgggcaggacggctcctattggtggcattgaaagctagcattcagccttctgccacaggacagtgtctcattcggccaagctgctgctggtccctgtaaggaatgagagtacagatcccgttgccaagtcctcatttttttggaccaggcagtgggtgttgagctgacctgagctacctttccatttgggttcagttgaacattgagtaggccagaggatagggaagttgtggcgggggccgtggaaaaggcagttgattcttcaactcgggcaaccctggcggagtggatgaggtggagctggccttcctggaattgttggaccgattttcctgttgtgtttcactgttgacgcactcacagacacacaggaccgctccagcactgcctgccacccaccgtctggtctcggtggcctgtctatcatttcgtgggtccccatcctctgcctacggcgatgtttcttcaaaaagaactagtgtgcagtccattggtgggtattcaaggtgatctctttgtcagaatctagagaggtgctcaaagaactattaaggacca

SEQ ID NO: 43417 - DNA, 2300 bp, Homo sapien
agaaggggcaaataggctctctgaaacctcttttataagggtattttgctttaagggcatagaagatggaagggattaatttttcttggggcatttggggaaatcacgaatgagtggtgacatttgagattgttggatagttggtgagtgagtcaaaggagaataaaaatggaaggaacattaaaagggctcagtccttgagagaggaaatcccagctcatatttacctttgaggtgatgaaagcagaaggcagacgcagttgtagcttctactgaaggtgataaacagatgtgccatgggattaagctccagtatttaatggcaggagccctgggtagcttcctgtgtcctgtggctggggcatacctagggctgggatagacgcaatatttctcaaagtaaatcagagtcctttgtcagtgggataaaatgctgattctcaggctcctcagcaaacctactgaatcagattattttggtgcaggggcctggagatttgcatttttaacaatctccccagaggtttccttgcaccctcaagtttaagaaccaccctttcaaagcgtgatttcatcacccaggagacatttggtaatgtctggagacattattggtcatcacgattgtgggggtgctactggcatctagtgtgcagaatccagggatgctgctacacatcttacagtgcacaggacagccctcacgacaaagaattatcctgcccaaaatgtcaatagtgctgagattgagaaatcctgaactccatcatatgaagggctctcaaggaaaagtacaagaagtggactgaagtcagtttgtgtcactaggtggctccttaggctactcaggcagggggctagcgttatgggcttccaggcccagttatcggaccaccaaattttcacagaactgggcagagctcacatgtattgaacccatgcagctgacactcctgaagccaccaatgcattatttgctaagtaattttttttcctctgataccaacacatttaaaatctttattgaattatcgtcacaaaattgcggtcatttcttgggggaaaatatgccattagttctacacaaagtactctttgctcaacttgcactttcttgaaatccagaaggtagatttacattaaaatcatgttggctaagagttgaaaaaagttattgcttatatggagttaagaaagcaaactttggaaattttttttggtctgagtttgtttctaagaagccaactacttctccagctctcctgcaatcctgccaaggtgatgtccagcttgtccctgttaataagttcaacagatcaaccctgtagggaagccaaaccatagagaaaggtggatgcactaaatttttttttttctgaacaaaatgtcagtgtgtattgttctatgacaatagtgttatttgaaattatgcctcgggccttcagtaggtaaagattcttgttcatttgctgcatttcaaaaaaattgtgtgcacgttcccattaagatttatttttcttaaattgaatatacagttaatctatatgcagatgaggtaggtaacaccctcctttctggattgttcgttttagttaaggtgttactcataacaatttggtttcctttccagtcttttgcaaaagtagggcttcagtgcaagatatccttttaaaaatacccttgggtcctgagtgttgaacttttctggctgaaataattttgcaccttccaaatgttttaatgctgttagggagctcttaaaatgcaaggatttaaggcccttagctagttaagcttttagcagaactagagctgttagataagaatagaactcatcctttacttttggagctttggacattgtttccagctgcttccagtcatttgaatcccgaaagcgcccctaatcctcgcggaggcagcctttctggctcccaggacccacccccttgcttctgattggcgaagctcctccgcggcccaagccagccacctacaacgtctctgagaactgatttgaaataagagccaggcggtcctcgcttccctgcgaccgacttttcataggctgggggagaaaaggttgagaaacttgacattgtctcgagcagagtgcgtgtagcaacagatcaaagaaaaagaggacgaaaacgtgctctttgctgcccgtagatttcgccgggttgcttttgtcttgcgggctcctgtcgggttcggtgtttccgctctgaagactgcgacgcgggctccgatgcagctcgctccctgccggatgggtcatgggattctaaacatgaggc

SEQ ID NO: 43418 - DNA, 2300 bp, Homo sapien
agtaacgaggcagagacagccaggactcaacttaagatcttttaaagtagaaaccacggaagtctatcccatcctcttcagtttgtctcttgacttatgctaaaactcattacacagcaataggggtcaacaaactttttgtggaaagggccagagagtaaacattttcagctctgtggaccaagcagttcaatactgcaactactcaacagtgccattgttgcacaaacacagccatggacaatactcaaatgaacggacatggctgtgtactaatacacctttatttataccaacaggcaaaggatcgatttggccctcagaccatagtttgcccactcctgacataagaggatgagtaaacctacaggaatctcacgtctgtttctgcccttttaaccacaatccttcccttcccctataagaaactatctttattagattcttattgatccttcgagagttcctgtttttgcaaatacaagcctatgcatatatagacttcatcctcccactgcacctctcttatttccctcagccccatgccctcttcagcactttgttttcattgcctgggcatctgtctatattagtacatagagatctgatattccattttgccattgcatagtacttcactatatagatatgccacagattagtcaatctactgctgcccatttgtgtgggttccttgtattgcttgaaaatatgacatttcttgctttctctggtgattgtgtagaataggtgcctagaagtgggattgctgggaggaagggtccatgcatctataaatttgttagattgccaaatctctcccccaaccccagattggtggtggtatattatactcccagcagcaacctataaaagtgcccatttccccagagcctcatcaatggtgtatgagccaaacctttgaatttagtccactctgacaggcaataaattatacttcggtgtagttttaatttacattgattttattgcaagtgagaaagaacacctttccatgcatttaaagactaattatatgtctccttttgtttcataacctttgcccgtttttcttttgggtggtaggtttttttctcttttccaagtttaggcattcattaaacatgaaggagatgggccctctgtcccagttcattatttcttttgacttgacatatgctgttttattttgccatggaaaaggtttttaaaatgtttatgtagatacatttattgatcatagagatatataggtgtagctatagatacagacataaatatcttctagattttttactctctttgtactggacatctgagatgaatgtaggtgaaaaggatagaggtgatggtgagagtcagaaagatattagagcttttactcacaagtaagtttgtatccaaaattcaaatggattatccaggtattattttaaatgttaagaccggtggcaggtactggtacagagaacaactgagaatagagcaaaatggccaaggaaaaggagggaaaggaaactattttatatcaagaaaattatgatgctaaatgagttctagtaaggctgaaacacatgatatagacactttaagtatttttgtagttgcttacatataattttatggcaaaatgtcttaaattgcgtataacaaagatattagtatcattgagctagtgttcagtagtgctccttttgaaggttattattctgctatcatgttacaaactttttagaatattgagttctgtgcttttgtttggttttgtctgaattctctgcctagtatgttcatctcatcctactcccattactccagcaaaggggaatcagaaaactgaggttaagaaagatagctaagttatagcatttgctatgcacctcagactcatttttgctattgagatggcattgtcaccaagcagaggcaatttttttttctggagaggagaggcaggacaggggcctggggtggggggtgcggccagaactgtgatgtcacagattgcattgtctcttgggaaactcatccatcaaaccgtcacctctgattctatgcagggtcactatgaaagaggcagcctgccccagtttgggtattctgaagtgttagtatgtagtggagctggtggtgtgaagctgattcattttgtttcaaagccccaaatggcatgctgccgaacacaggcacaagcacagcagcgtctccttagaaataatgactccaaggcaaacagccctcattgcaaaatgtagaagactgccatctgcttgtctccactgtggtttattcgtttcagg

SEQ ID NO: 43419 - DNA, 2300 bp, Homo sapien
gcctatgatattttgtgtttaaagcctaaatgattgtttgcttagaattgtaagaacaggccaggcacagtggctcatgcctataatcccagcactttggtaggccgaggcgggaggaacacctgaggtcaggagtttgagaccagcctggccaacatggtgaaactccatctctactaaaaatacaaaaagtagctgggcgttgtggcaggggcctgtaatcccagctactcaggaggctgaggcaggagaattgcttgaccccaggaggcagaggtggcggtgagccgagatcgtgccactgcactccagcctgaatgacagagcaagactccatctcaaaaaaaaagagaaagaaaaaaaaaagaattgtaagaacaaatttggaggccagcttaaggcatttagaggtttagcctgccctgggaaaaaaaaatgcattctttgtcttgcaacaacctgttaataaagtctaaagtttctacataaacagaacttacttcagtgggaattatgaggacacaaagagtgcagatcataaatggactatattagtgaaagccatttacctagcatggtacagagtttcatttaagattaatgaaaacccagtaagtagaaaacactgatattccttccagtggaggaatcaggatgaatcttaacttgatacaatagagatgtgagtactgtgaacagaaaaatgtgtgcaatatttgccaagttatattttcataatattttataacccaaatttatattcaataaaaatacactctctatctcattttatgatctttctggagacatttaaagggagtcatgttaacagtaagttatgactttataaaaagtattttaataagtttgtatattgcatttaaattctctggacatatgattattaaaaattatatttgaaaatggaaaattgccattttaatgttcttctgtctcttaaagttgattctattttgggaaatgctattggagttaaattctttatctggggttttggatttgccaaaaactgatcatgagactttggaccaatcactttatctctgtaagccaactttattattgtgaagaggaaatactacacacttcacagtgttcctgcagagataagaagagaaattgtatgcaaaagtttttcccagtggaaattgctattcaaaaatagttacccttcctggcagtgcaatttttgttccttactcatctcggcagaaactttttgacattggtttgtgttggtgctcacttaggtggcatcagaagattcattatctcgcctgtcctaaacagagacctaaaacagccttgagctgtttttaataaggttgtcactactcaaggagcagtcaacccatggatgaaataaaaacaagtgtttcattttgagataggtcctttttagcagacaatcttcatctctagtacacaggaaagtctcaagtctccatattgtcttcagtggaattggctagaattttttaaaattattactttactaagtagtagataaaatgtaaggggaagagctatagagttcttttgaagatatattttcttatcttcttaaatcgaggaagttgtttaaaaatgtttacatacaagtatgcaaattcgcaagtcttagatttctttcctgaaaccatcaaataacacatcagcatgtgggcttaggagggttgttattggaatagatgtcattatctgtcattttgcccatcaaaaaatacagtagcaattactgcattgtaaagggagaaaacgcaaaatgattgtattgcattatctaccaaaggcctgggaaagttgaataactattcgttactatgctcaaataaggatttgagccttatttgatggaggtttattcacattctctttctgtcacatgttctattcacttctttgaaaataatctcaagttcaattaccctggttttaaaaacatgaaagacaacttataaaatgttacacttttttcccctacaatgccttcagataatatgaggctggtcacagcccatgatataaaatactaactgttgactcacagtcacactacaagggccaattttacagactgccaggataaagatgattttaattaaattgcacaaatccctttgtactgcaaccaaacccctacgcaggctgatcaactctgagccattctggtgtgtatagagttaaccaggttaccaggattcctagttaacttctttcaccaggaatgcaattcatgtttacctatataaggaaacctgttaggctgacctgagttt

SEQ ID NO: 43420 - DNA, 2300 bp, Homo sapien
acagcacaaagaattgtgggagagacacaggattgtgggagagaacaaaaaattgtggaagagacacaaaattgtgggagaaaagggacacttgtgggatagaaaattgtgaacgagaatattgtgagaaaacagaattatgagagagaatgggagttaggggagagactggggaattgtgaacaatcatggagtattttgagggaatggagaattgtaagagtggagaattctgcgaaagaacaaagaattgtgggggagatggggaattataggaaagataggaaattgtagcatagaatacagaattatggttgagataaggaattgtgggagagaacagagaattgtgagaggaaaccaaaaattgtggggagaaacatggaattatgggagacacagggaattgtgggagaacagagaactcagggagagacaggaaattgggggagagaacagagagttctgggagatacagggaaccatgggagagaatacagtgttgtgggagagacggaataattatgagaatgaagggagaattgtgggagaaaggaaatcatgaaaaagaatattgtgaaagaacagaattatgagagataatggggaattatgggagagactggggaataagaacagagtattgtgaatgaacagaacattgtggaaatgaataattttgaggaattgtgacagacagagtcatagggaatgatggaaaagacagagaactgtgggaggaatggaactgtgggaaacagaattttgagagatacaagaatttgtaggaaagaataaaggcttgctgggaaacccagcaaattttgggaaaaacaacagaattacgggcaagacagggaattgtgggacagaaaagtgaattgtgggagacacaaggaatcatgggagaaacaagagaattgtgagcaagacaaggaattgtgggacagaaaaatgaattgtgggaaggaatagaattttgggagtgacatgggattgtgggagaaataaggaattgtgggagagacagaagattgtggaaagaactgagaattgtgggagacagaactgtgggtaacaaaacagaattgcgggagtgaaaaggaattgtgggagggacaaaagaattgtgggtaaagagagaagttgagctgtgatagttgaaatggaatccttgggctatcctgtaggcagttctgatgctgggatggcccttctgagttgtcccctttggggctaggggcctggacttatgtgcccttgcagagaccctcataggatgcagatcgtccccaaggaggggaagtgattttgtgtgaggcaattctcttaggcagaggacaattcctggagactcagctgaaagctgtgagcccccaacactttctgcaccaggggacatctggacgtatttcacagagccactatagttatatagaaagatatatgtttctttattaacactttaagtaacaagatcaaattaccttaatttcaaagtagtggatggatgatattttgagacaggcacaacaaccatatgtgacataatttatctgtaatgtgtattagtgccacatacagctaatagtactaggatttattgcctacatccctgatggaagaaaatgctaaatttctgttggaggtaaatgaaaatacagacattcaaaatcacatacccagttaagaagaatttagcagccagaacactgtcttgttcacttttggatctccaccaccgaagttatgggcacctactaacgtttcttgaatcattgctacaattaaaaccgataagatttaaaaaaaaaacaaatttaaaaactcctccaaagcactccttctgccgcataaagcatacatagtagagctcttcactctagggaagcctctggagcagacaaccttccctgccaccgccacattttgaaaaaggctcctggcctggaggggcgggcccagaaagcggcccccgcagcagttacaggccggggcgaggaggggacggaacccgctctccgtgattgacggaaaatattactcttcagcccgcctcccgcgtgcccggaagtcccgccttctaaaaaggaagtaggggtgcgtgagaacgccggcggtgaccgcagccacagcggtgaccgagtgagaggaaggcggcggcggcggcggcggcggcgtgaagtcactgctgctctgggttcgggttggcgactgaaggcggtaccggcctcccggaacagcccgggggagggcttaggtgcagaagggcaggctggccgcggccggtttggtctggg

SEQ ID NO: 43421 - DNA, 2300 bp, Homo sapien
actgaagaaatgaataacagcgcaaacattagtactcagtaagcacaccatgttgcttctgcccttcacgacttactgattcaagccacactttaatataaaaaatctaaagtagacatgaatgaattaaaaatgaaagacagcttttccattttcattttcttatctaaagaatggacagcaagcccgttaagtgatggcttacttttatatacgaaaatactgaaatggctatacgagcaaaagttatttattaagacagctagatctagactaaggtttctcaaccttggccctcttgatatttggggccagctgattctttgttggggggctgttctgtacattgtaggatgtttaggagcactcctgccctctattcactttcctctcagttgtgacaaccaaaaatgcctccagatattggcaaatgtcccctgtgggaaggggggattgcccccctccagttaagaaccactgatgtaggcacaagtaaactttgggaagttggggctggtttagagtactcactacgttctcatgtactacctcaatcatcatgacaggcctgtgaaacattattatatcttcatcttacagatgacagactgaggctaacagagttaacttgtttagagtcacaaacctcaataagacgcaaaataacgaccagacccagggtgcctgactcccatgcctaccagcctcagcagcatactacactgcctcttcctttagaggctttccagactttttttaagacacagtctcactctgtcacccaggctggagtgcagtggcacaatcttggctcactgcaaccttggcctcccaggcgatcctacccacctcaacctccaaagtcgctggtactacgggcacccaccagcacgtctggctaatgtttgtatttttttgtagagggaggtttttgccatgttgcccaggctggtctcgaagtcctgagctcaagcaatccacccacctcggcctcccaaagtgctgtcacaggcgtgaaccaccgcacccagccgtgaattatcttttgtttttattttctaggcaaagggccgattacctttcattttcccttcatgcatcgggcatcctgaaggtggggacgctgaagcatttgaggcctgaactgcaacagcaggagcagatggagacaaacccatggctggaaacagtgttgactgtaaacaattttaaatttccacctgccaaaacaaagagacagattaatgtctctggactcagactattctctcgttagtcctaatctggtcaacccttgttcctcctctttgtcatcccatgggcatctaccaggcagggtactaacttcgaaggacagctttaatatattgcccccttagggaaatactgtgaaacccaggccaacctctgggggcacgtatgtatctaaggcagtgaggattttgggactgaggtgaggcagtcgctgagaaaccacgtcacagccaggaggtacaggcctgaggcgggagtggggcgaggatttccgaggagtggtgacccgggtggaggaggggaggtccattgagcctagacttgacccccatccccagagccttagcgaggggctgggggtccgagaagggtgcggcgcatgaataggaattcgaagaaacgaagggacaccagaggtcgagaagctgccaagtgtcttccccacaccgtcccggcgcttgcccacctgctccagcccgtggtccccagaccaaaccggccgcggccagcctgcccttctgcacctaagccctcccccgggctgttccgggaggccggtaccgccttcagtcgccaacccgaacccagagcagcagtgacttcacgccgccgccgccgccgccgccgccttcctctcactcggtcaccgctgtggctgcggtcaccgccggcgttctcacgcacccctacttcctttttagaaggcgggacttccgggcacgcgggaggcgggctgaagagtaatattttccgtcaatcacggagagcgggttccgtcccctcctcgccccggcctgtaactgctgcgggggccgctttctgggcccgcccctccaggccaggagcctttttcaaaatgtggcggtggcagggaaggttgtctgctccagaggcttccctagagtgaagagctctactatgtatgctttatgcggcagaaggagtgctttggaggagtttttaaatttgttttttttttaaatcttatcggttttaattgtagcaatgattcaagaaacgttagtaggtgcccataacttcggtgg

SEQ ID NO: 43422 - DNA, 2300 bp, Homo sapien
aatatgaccaagcagcttaccatggagtagaggaaaaatacatgtctgtcaacttgtattaatccaatattggtagattcatccaatgatccacgtggcaaatgcagagatagtgatatattttccaaataaaaatagatttttgaagaaagaaggagacagtctgaggagacgctgatggcaagcacagagacatggtctctcaaccagccctcctctgcagagatgtaccacctcagctctgtactgtatgggacagaggaagtgggtggctttccattcttaagatgaaaatttgaatggtaaatgacataagtaaatgtatagttctatgctccctggtaagcatgcaatagatacttagtgatcaaaaagacaaggatgtttcaagatatgggcctcagcatccaagagaacaaggtttgattgctgtctttcccatttatcagctgggtgacctcaagaaagttgctttaatctgcagactctccattttatcagaatagttggagcataaaaacaccaaactgccaggattcttctgaggattatatgaaacaatacgtagagcagtgctagccacataacaaatattcgacaaatggcagtgtaattggtgtcctatgtgagaccattttagaaacaaaaattgggaagcttgtggtgaaatgcagtagtagtaactaacatttattaacaacttctgctctagtctcagtgttttgtgcactttcactcatttaaccccctcattttccagagggcacaattggctcaaagtgacattaaatgagttgcccaaagccatacatctagaaggtgcagaaccaggatttggtcacaggccatccaactgtgccacctgctgtttgtataatgcagagtctatgaacaaagctctgtggttatttattggagcccctgggtatctctcataaagaagagggcttagctggaccatcccctggggagggctcctgcctccgggatgatccacagcttcaggggagcattgaagggctctgggttccctgcccatttcctactgaagtaagggaaattaaagctgaaatttaaaaaggtctaaagagggttttatttttgaaaagttttggatagcaaaaccacagggaaaaatgggtgtgatttagtcattgaactctcctggttgaattatacttaagaatattcaatttgcgtatttattaatttgacaccttgcacttaattagtttagcattatctttagattttcctttggctcatacagctataatagccatgcaatggctttattaggtcaattggttggttgatggattcatccaataacttatctagtcaatatttaccagtggcctactggcttccaagcccattagaaagacagataagacaagtccaaatctgccttcaaagatatctcagctaataaaatggtcactcttgtaaactgtactgcaagaagggcagcagatgctgtcaagtcccacaaatccagcaaatgtgccagtgtctggtgtctggtaggcaaaccataaatcgttgcataaatttatcaatagataaatcaatcaatcaatcaatccatccatccaaccaaccaaccatccatccatccatcattctgtctgtcccagggtgaaaagtcagagaaatgaccatagcacaaaatgctgcttggattttgaagttaaaccccaaacaggaaagacagtctctggaagtggagcaaacaccttagaaagaacttggcagaaatcagggatggtgtggtcacaattagggttggtttcctttgcagtcacagaggaccccatgcttggaagagcccagcacctatttgaatactctgtcagtgccatcttggaattttcatacttttgaacaagcagccccacattttcattttccactggaacttgcaaatgatgtaggcagatctggtcacgttctttgctagataaagagaaggacccagtttcagaacaggaagcccctcatagtacaggtgagccacctgaggcccaaggaggttaaagggccttttgcctgaggccattttacgaagttcctaactcctccacagagctcttttccatcggaacataattccaaaatgtaaaataaggtaaaactgtaccttgctccatcccagggagtatgagcaatgtttatgatatgcaaaacctgttccacttatttccttccatacttttcttcctgtgtttctatttctgccatcatatttttttgtattcttatgtctgagtcactgtttctctggcattatcttttag

SEQ ID NO: 43423 - DNA, 2300 bp, Homo sapien
gctataaattgtttcttggtatgcttagatatggagggttaaatgggaaaaaaatgaccattgtgctctcagcactttttgtgattagcgaaactcttccacagatggaaccttttagttgcttcctgatatttatttccaaggctctttcagtgactctttggtctcttattggttttacttaaagagttgttatttaaatcttaaaaaggattccttatctttatgttttgtttttctggtttgaatgcattttccaaagaataccaaatatacacaccttctccattatttctgcacttcctcttaaggcctgccttgcttccactcttaaaacagactaggaatttcacaagatgttgtctctcgggattatttgagattattcacttagtcaccttcttacgaaacatttattgacctgacagtgtatgtctccatcaaataattgatttaacagaccactctagtgttaggtaaacattcttatttcatcactgtctcttccttattagatacttataacatggctcctactagtactgactctgaactgtggttttgtcttccagttaatttgtaagctcatagtggttgggatgacagccgcattacttatgagctgtgaatctttgagcaagtcacttaactcctctgcgcttctgtttcctcatctgtaatatgaggataataatgtaacctactgctaagaattattttgatggttagataagtcagtgcccataaaatgcctaaaacaatgcctgacacttagtaagtgctcagtcagaactacatgttgctgtcatctatttataaactaaaggatcatttgcctaataataaaaaatgaattacatatttatcaatttcatgtgaaataatatattaagatattagatatattgatattaagatattagatatctttaaatgaggatgtaacttccattgatgagtatccagtatgagccatgttgactgtctactggaataatgcgtattttcaacatcagtttttaggatagtggtggtggaggtatgtgcagtaacaggtagattttactctgaatctctgtttaagtttaatcattctagtaaagaaaaccacctggaatattttactgctttaaaattccttccttagcagcagcagcagcagaggctatgtgtggcttacatgattagtttcacagaatcctagtaaaagcataccgagtccttaattttgaatcagtaagatcttccatgaaatcatttcccggtttgtaaattataatcacagtgattcttttgttggaattcacttgagacccatgagagaactataacttcctattgactgggaaacaaagatgtcttttcgagttgtatttggttcagtgccatgtggaatgcatggagatcaaggtaattcgcgattggaattaatcttcccttttctctctgctcttcatggatgccacccccaacccccaccccaacctgaaccctcttagatatggccatgtgggtatattcactctgacctccacaccctctgttcaggaaatgaacaacttctcaaggactgctgtcccacaaagaggataaaatacagagcatgtgttatgcttcagtgtgaaagagaatgaaaacttttgctttttagtgtgtgtggctagtgttagaaaaatggagtcagtagttttaaaatataatttaagaactgagaatttgtcctaaacaaagaaggcatcctatgtgctttatcttgctctcaggggtttcaccagtggcttccaacattctttggttgattcctaataaggacagtttgcacagttacaatccaattaccgtttgtagatccctgtggaaaagaggattttttttagaggaatccttttctaactcgagtatatttcttcaaaatactctcattctttttgtcccttccctcccctctttcctcctccccaactctctctctctctcaccctctctctctctctctctctctcacacacacacacacacacacacacacacacacacacacaggcacacacgcatacaaacacacgcactcactcatttgtgcacttactcagggacacagcctgcctctgttctgaaaggacaggaacttctcaatgatccgatgaaaagattgcatatttttggtcccaagattcacagtagcggaggtctctggcaacaaaaggtatcgtgggagtcacagctatgccagctgggccatttctcagacattcaatatgatctgccatttcaggatgcattttttaccaaaaaaataa

SEQ ID NO: 43424 - DNA, 2300 bp, Homo sapien
tgcccatatccttctggcccaatcccactttctcatacaggcaaacccaaattcctctctatttttcagagtctcttaactgtctggctagctactttgtttccatgttctcagcagcctcccctttccctaagcaatgaccaaagctattcactttctaaaagaacctctgatcatctacctattaaattcatgtgtgttttacccctctaccttggtataacacatgggctttttctttcattctggaatttgattagattgatctaattgagcaaagttgtaattagtggcaggagctaactgacgagtcgtccatcaatattagatcaataaaggagatactgaatatctacccagatacagttgatgttatacttggatctctttgaatacacaagtaatacttataaagtttgtatatatacatatgtttatacgtatatatacaaattacttagcctgtctgagcctcaatttcctgatatgtagaatggaaataataacagaacctagctcagggaattcatgtgaaaagtagatgagtgacatctctggggaaatggaagtctatttattactctccccaaccctgtcagctggcatacagtaaatgtttaaagaatgctaataaacaagattccaagatgatctttggggataaatcagtagggatgaatattgcaaagaaaggtaagaccttccaatcagggagagagagattgcaaagaaggaagtagaagattataacaggtaaaatgtatgcatgaaaagaaacatagaatatgattctaaaagccaaatgtccccaggatttggctttatttatgaatatatttattggtgaattttatagcagagacaagaaggattccctttgaaggaagttggaaaatggaccttaggaggattggcaggggtgtacagcaaggtggtaagggagaggaaggaaaatgtggatcacattttattcactttcaatctttttcccccattttatataattacatatattggagtgtctgaaaggattcaggatattttttttttctacaaagttgtgggtaatctctactaatgaagtcaatgatgaattactagtagccttgtagttttagaaagattgatcttatactttttctcaccttctaagaatgagaggatgatatatttggccataatgatcaacaggatgctgccttaatgtggcattaattcctctggaccactggatagtgagttaccgctaattcaccatggacagttgaacaagctttgatggccgattccatagaaataattgattttcccctactgcatatcctgaatcataggacattaaaatatggatctctgtttgaaatctcttccactaatttaggccccacttacacagcttaaaaattggtaaatgttttgaggaaaatgaaatttcaattgaaatatttttcctataagcaattattttatttatgaataaattgactgcataaaatagttcttttgctcatttttttgtagtaggtattctttttcttgacttgcagcccagtacgttttgctgttctcacaatgcttatgttagcaacttccccacttctaatttgctgcttctaatttacagtatgctagaaaatcatatgcccaagcttgttaaaagtatgcgtgaactgaaagtaaaggaacactctaagtggggctggcctgggagggcctcgcctgtgagaaaagcaaatgaatttcggttttgtgacacttatttttgactgctgggagggtgtttggtttgttttggggttcctctccactggcttactgcctgggtttcaacagcactcggggtatgagggtggcctttggataagtcaggtattatgagtttgcaaagcctttcctatcatctgtaagagttcaactcttgagccttcttttaaagcatccccagggttatccaatattctggaataatttcaacagtgagtcttcttaagtagctggagccaaagctggcttttaaatattttctctgtagatgtttacttacaagaaaacatcattctctaggatagcttttttttttttttttttgctggggtagagttggagttgtatgatcttcagatcttaggcacaaaaccaccgatgaattccgatacacatcgtaactttgaccccaccgcaacccttagaaatcaggtattgtgtcttatactttcttgggagctccttggtacctagaaaaagctcttatacaaagtaggtgctagataaatgtgttgatgaattaatgaaaatgtaga

SEQ ID NO: 43425 - DNA, 2300 bp, Homo sapien
aactgtccatggtgaattagcggtaactcactatccagtggtccagaggaattaatgccacattaaggcagcatcctgttgatcattatggccaaatatatcatcctctcattcttagaaggtgagaaaaagtataagatcaatctttctaaaactacaaggctactagtaattcatcattgacttcattagtagagattacccacaactttgtagaaaaaaaaaatatcctgaatcctttcagacactccaatatatgtaattatataaaatgggggaaaaagattgaaagtgaataaaatgtgatccacattttccttcctctcccttaccaccttgctgtacacccctgccaatcctcctaaggtccattttccaacttccttcaaagggaatccttcttgtctctgctataaaattcaccaataaatatattcataaataaagccaaatcctggggacatttggcttttagaatcatattctatgtttcttttcatgcatacattttacctgttataatcttctacttccttctttgcaatctctctctccctgattggaaggtcttacctttctttgcaatattcatccctactgatttatccccaaagatcatcttggaatcttgtttattagcattctttaaacatttactgtatgccagctgacagggttggggagagtaataaatagacttccatttccccagagatgtcactcatctacttttcacatgaattccctgagctaggttctgttattatttccattctacatatcaggaaattgaggctcagacaggctaagtaatttgtatatatacgtataaacatatgtatatatacaaactttataagtattacttgtgtattcaaagagatccaagtataacatcaactgtatctgggtagatattcagtatctcctttattgatctaatattgatggacgactcgtcagttagctcctgccactaattacaactttgctcaattagatcaatctaatcaaattccagaatgaaagaaaaagcccatgtgttataccaaggtagaggggtaaaacacacatgaatttaataggtagatgatcagaggttcttttagaaagtgaatagctttggtcattgcttagggaaaggggaggctgctgagaacatggaaacaaagtagctagccagacagttaagagactctgaaaaatagagaggaatttgggtttgcctgtatgagaaagtgggattgggccagaaggatatgggcaaagaagggccgccatactgagaggccaagctgctctgtgagatgggaggcaaaggacaacatcccctgtgacatgagtttgcttgtaaaaaacaaaatttactttaaaatgtgctgtctggtgtgcactccttgccttgtagtatagatcatcagtaaaagctttgctactgcaagaaccttaagttcctgattgtttttacggtagatgggtttcagcatggggccgagaaggggctttgtcccctgttttggtggacaccagaggggtgataaaggagtagccaaggggaacagagaaaaaataccttcaatggaagcagataatagagcagtggtgatcccaaaattataattcctcagagagaaactagagagagctttggggttttacccaaatgggaatttgaatcaatttctcctgatctgaaagggctggaaaaatcctggaggatatccagattacactagagaatctcaaccacctaccttgatttttgtaaagaacaacgttgtttgctagaactgaggaaaaggcgatggcagagaagctttttaaaaataaatctgaatatatcaacatgtacagtcaactaatttgctgacttcaaaatagcgtgatgaaactctttgcctgttaaacctattattgcccataatgaaagattccatatgcactaatcacaacatacagccttatgtctgatcatagcttctaaaaaatcatgatacagggatttttagttatactcaacacatttttcctttagaaactggattggttgttacagatgccatgaatgatataaattgagcttatagttggaagaaatctaaaggatcaagcatccctgagtttcaaacagaaacttgcactgaatacattcaaaggtatgtggattttatttataatttgatatcctttttattgtgcttatttctttctctgcatttcttttaaaagatataaatgtattctacatttctaatactatatgccatcaatagttactttttagttggcccataattaaa

SEQ ID NO: 43426 - DNA, 2300 bp, Homo sapien
tgaaagatgccagatggtgaagctcaagctggttctctgtcttattctgaggatctttgatgactttgctctaaaggttgcttttagcagcagaacagagtgagagtaaagagggaactttagtgtgtcatttttcgagctctgcctggacatgtcacagagcaaggaaggcctccaaggtcaatgggcatgctcatttctcctacaaagcagaagaaaggagacttgggtagatcaggctgtgggagaatgaaagacttgggcaaatagttcaattgactttctcataagacaggcaacactgtttggaagttcctgggtttggcaagggattgattttaaatttatttttatttttattttttatttttgcagtataaaatacatgtagtgaagggtgtaaattacactagtctgaactgtactgcacagtgaatgtttacatatgggtgtactctagtagctgccatacagatcaagatatagatcatttccagcaccctagaaggttcccttgtaccaccttcctagtcaataccaccttcccactttggtaaccactgttatgacacctattaccatggattccatttgcctattgcacttaaacatttgaatttcagttgcagaataaataagtgaaatcttacagtatgtacacttgtgtctgatttctttctcccaacataatgtttgtgagattaatccatttgttctgtgcatcagtagcattttcctttttattgctgaatagtattccatcatgtgcacagactacagttggtttgtcatgcatcagttggtgtacatttggatcgcttttatttggggcaattatgcctcaacacagtatgagcattctggtatatgatgagattattgtactctgtatatctaggggtggaatttgctggattggaaggtaggcctatgattgactttagcagatataaccatccagttttccaggtggataaactgtcatgggactatctaatggtagattcctcaggccacttgcacccctggcttcacattcccactgctaattataattatgctgtgattgttttaaaatattacatgccagtggatggttcattcaactaaattgtaagggctgaaattccggggccacatccaactttcctcccctctcctcccctctcctcttacacagagcaagtggagagtcattcagccggttcagtacagtgggaccctgacaaactggcacaagctacccccaagcacatcttccactttgtagccacccctctggggcttgcattgattgattcatgagtctggagtctctactctggccccaggcctggccttcctctgggctcaacttgtgggaggctggacgtaaattacagaaggacaaggctgtggagggaactcgctgatcttctccaaggtgttttaaagtgcaggtttccatgaggggatttcagagcagaggccagttttaagggttattgtgaacctacagaatgtgccctgcaagcccccctggaactcgggtcaccctaagtgaccagcatcctgggcagccttgtccccgcagcagttctcctgggtagcatgacttggttcctctcagtcctgccctccccaagggtccccacaatttgagactctcacagaagaaggctttctagaaagggaaactctgccctcccaggagaaggctctgaatctccttccactgtcaggcccacacctccttcaaagttagtgaaagtctctctttcttggaaacccaagttcgccttctcgctggcattaaaggctttggcagtccccgcctcagcagccggggtcccacgggtccggggagggtggggtggcaggaggcaggcgtgccggccagcctgacacctgtcgtgggcgcgttcggcctccgcagcccccaacagctgtcagcggcggcggccgccggagggacccgccaggagcggaaggaattaaacgcccgcccatcgcatcagactcggccgctccctcctcctcctcctcctcctcctcctcctcctcctcctcctcctcctcttccccctcccccttcgcgccgctgccttctccaggtccccaccggctccgcagcggcagcgggacgctgtgccaggggcgctttgcacagcactcggcacgcacggagcagggctcgcgcccaggggctgccccaggatggcagtgaagtgcggggaactcagagagacaccgtgaccccaggctgagcccaaggcgcgccactcctcccggaggcgacatggggcacccggtgtaccgcg

SEQ ID NO: 43427 - DNA, 2300 bp, Homo sapien
attcactgttcccaacaatgacacaagtttccagtttcctggagggtcaggaacacttggaaactagatgatgaattaactggcatgtgtgtgttccaagccctaggagtgctaatagaagaatccctctgctggttggctctccaacacccatgagcaagaatgtatgcccttgtgcctgggggcattcatactagcctatacagtcatggcaggggttcatttgctaccccatggttatcatatggggttagagaaatatataaatcatcaaatacaatcatcaagttgctcaccccccttgagttataagtgattctgtgaagtgactctgttaaccatctaccccgaatgccaaactccactgaggcataaccatgcaatgaggcataaccatgcattcgtatcccagtggtagagacattaagtgtttccattaccagtgataaattacagttttgttactaaagaaagggcagacaagacccacacacttttacttctaatgtgacttgtatgaggagggaagaaagccaatgccaacaagcccccaaatgtaacttggcctgggtgtagttaggcaggggagcaagagctctttttaaacactgtgcctgtcagcagcacacctgattgacagccgctgaaaatacttaagaagctcagggtgagaagagatggacagcgatgggggatgggaaactagaatcgaactctgtcttcagacagcagatagctcattaaagctaccggaaaaaaaatctctaagggtgcagtctgttcggctgcgtttacaaaaaacgagtacagccaagacctgggagcccgacgccctttgtggagacaacgaattctcctaattagatttcatgacgtacctcctccaaaatagctgaacacctaggaacaccaaacacgcttttcaaagagtctaagtaaattaacttttcccctgaatatgtcatagggaataaaggaagtcttccagaatcaaacttggacaattctggtagatatgcaagaggaatgttcgtgtccaacatctgtatttataatttcattgtattttttctccaaaataaaagaaatggtagagtcacctttacatttatataaaattatcttcatccctaagtgataaaagaggacacaaacacaaagtagacatttccaacattctgtctgctccctgctgagatggttgtaagttgcattgcaaagcttaactgttacatcaaaaagccctccaagagggcgaggctttgcgctttatagattccaggggtccgacagcgggagaagctgctttcagactcatctccttgccgggaagattgatttccccagcgttctccagcttcccaggactgtggccaccgcgctgagacccgaggcgtcccagagcgggacgcggagacagatcgctttgtgagcgccaatctctgcagcctctgggctgaagctgcgcccggcgcctgccccctacccggcctcactcacccctcctcctagagcacgtttccgcacgtgctcaggaccccttccacggcaaaggctcctccccctccactttcttagtaggtctccatctccagctcattcatcggcagccactgcttttagacagtttcctatctatccttcctttttaaaaacaaaaacagccgggacagggcggggtgggggggcgcggggagaaaaggcaggagatttaactccaacttcagagcaatcgtccccggctgcccatctgacaccagtgggtggggtgcaatctgacacttcccttcctttccagaaacgtgagtggagctggcgcgacccttgatctgggggtggggagacgggggagaaggtccgcacttccgtcctcacgactttctccccaggagacccggtatcagtggcgagctgccttctctcctcgccgcttgcaggtttggcgcctggaaaactcttcacgttctgctttctcctgctcctggctccgccccagctccagccccggcattcctccagctctacacgtcctggccgcccccttcccgctgcctctagagcgagcgtacggggtcatctccgcgtctgccctgggcccaaggctgggctgcgaatagcgtgttcctctccggcggaacacacacacccggccttggggctgtctcctgagctccctcctccacggagagcgctgagcgccgccgggaattccatcccaccgtgggcacgcagtctttggaggtcccgggcgcagcacgctcggtgtccccacactgcagcaagacagagaccccgcggga

SEQ ID NO: 43428 - DNA, 2300 bp, Homo sapien
tcaacagcagaagtgtctggctcatctggctaattgcatcctccaactcctctacttggagtgtgtgggtgggggttccactgatctccaggatgtggtccctggggtggatggcattgcagctgttgggactgatgtgcatctggttgacctcttttacttgcacggtggtaacatagttggagcaggcattctccacggacacggagaagctccgcctgccctctgtgatggccagcatggacatgagcatgacagagtagggcagctggtcctgaatggactctgtggagagtatctcaaatatgggtgccagcaccacctcatttgtggcactttccacagtatagggtgacacgcagcaccagggcgtatgcatccccatcctcaatggtcaccttatagctcacacaggcaaagcattctggatggtacttgaactccctattagcagcagcaaatctgcatgggtctgcagcaacctcaattcttcctcctcagaagaaagaattcgactgaggggcataagagagagtgagagaccaaggcaagtttcagagcaggaatgaaagtttattaaaaagctttagagcaggaatgaaaggaagtaaagcacacttggaagagggccaagcaggagacttcagagatcaagtgtgcagtttgacctttgacttggggttttacatgttggcattcttctggggtctgcatcttgtctcccctgattcgtcccttggggtgggctgtccgcatgcgcagtgggctgctaacacttgggaggggctgcatgcacagtgtgtttactgaagttgtgcacatgctcacttgaggtgctttatgtggtccccacagccctgacacctccaggcatcttcaccttggtcctggcattaccactagttgagtgacctggacaacttcattttcttccctaagccccagtttcttcatatgtaaaatgaggagattgtacattatctcaaaagtctctcctggctctagcacccaccagtgcagacatggtcccaggagcatagaaacggggaggaggaagcagggccgcagcagcaccaataagctcccacctctgcctaggcgagggaggacctcaaccccaggcacgaatgggcggatttttaaatctatgattaatctaggattcctttgagtaagacttcaaaaaataactttaatattagaaaagggttttgattgttttcctaataaatgtgaaaggaaaacattagatcatttttcatggtttgagctttaatctgatatttaattatgtttctgctttgctacaatcaatgaaagtatgttgcttttgtttttgaaatcttgacatcaacccaggataaatgaataaaatttcaaaaaattaatttgctaacacaaaaggctttagttattttacttttaaacgtaaagttacagaatagccaccattacataattcgagctttaataaactctaataagaaacatatccttgtttaaaatattagaacataatggctctatgcacattgattttcttcttttctataactgctatgcattttgattcaaaattagtttttacaggatttcttttataaattattatcttggagcctataagtaacaaatttcttttctctgatcattccataagccaaaatatttcaaaccagatgtacatgtgagttgtgtgtgtattctttatccactgacatttcaaaattctatttaattatatcttcatattttaaaaatcagatgattcaggggactgattcgataagttgtcttacttccactagtggaataccatgcaactgcaaatccaaggactaagaagttctcttaagttccaatgtgggaagatgtccaggtaatattgttgagtgaaaaatccaaggcactgaacaatgtgtgtgtatatttatatatatagaacaccaccttttgtaaagaaaaggtggaaaataagaataaatattcataggagtaaaacttcttgaggaataatgtttcgtgtattttgccttttgaaccaagtaaatcaaagaactattcaaaaataacaataagggggggaggagccaagatggccgaataggaacagctccggtctacagctcccagcgtgagcgacgcagaagacggtgatttctgcatttccatctgaggtaccgggttcatctcactagggagtgccagacagtgggcgcaggcgagtgtgtgtgcgcaccgtgcgcgagccgaagcagggcgaggcattgcctcacctgggaagcgcaaggggtcaggga

SEQ ID NO: 43429 - DNA, 2300 bp, Homo sapien
ctatgaagtaggagccactatttccttcattttaaacatgaacaaagtgcattacaaagagactaaccagttgtccatggtcacaagctagaaagtgacaagcatgggactgggtcctggagagtggtttgcagagctggccatgttcttaacctttacacccgagaggaaaaatgatgtcctgcattaagggtggagccctctctagtggatcctaatctggaggaggactgtaaggggtgctgccattggcaggctttttaacttttaggttcctgaaggcttttgcattcttggactttttagagggacggggaaagaggaattcctcaatgacataagaaggggtggaaatgcggagaaacaaaggaaagcatctaaaatcctatccctgaaagggtagagcctgcagcagaactctctccaatcatgggcaggaaaaataaaaaggtgaatacttcagttacggtttacacaggacgtgcaattacatgtgcttccaagccgcccctgccatttgtggggaacaccaccatctactgttctcatctctgatacaccacaacctggagaggaatcatggttccagttctagtttctgcaccgtattaccccaaaggccatttgaccatcttcccccaacctttaactcctctgtatagccttattctggcggatgcagctattactcacccaattccttgggccagaaaacctggaagtctctcaagattcctccttccctctccttcacatccaattggccactgagttttgtgggttctatttcctaaatcaatctgttcattcattccatattatgtgccacgaatacgccgtgatgaattggataagacccctacccccagcttcaaagagcttactgtcttaatgaggtcattttgcaaatgaacaacccattctatagcacagtggtacatgcaagaaaggggttaagcagagtcctgggagggaacacctcagggctttatgattcatcttgggaagcctgagggcttttctgttggcatgcccacgctgaaatgtgaaggatgtataccaggaacctggtgaaggaagcgtgcagaggggaagcaaatgcaactttctggaggctagaacagagaaggggaagttcaccaggtccgcagagattagcctggaagctggtctccagcccggtcctaatccagtaattacactgcccaacggctttccaaaactcaaaagaaaaagcccagcactgtccttcctgtccctggaagtttgtccttcaagtctcccatcacttgtcattcgctcatcaagtatttacttaacatccactctgtgcaggtaccatattgatagcggcctcaagggtgcttctatttagggaatttttagtctattggagcagatagaccgtggggggcattccggggatgctgggggctgtcaggccacgctagaagctgacactgaagacgtcagctactctttaaggacccatctgcctcgctgcccactgctcaacccgtcactgggggctccaggcctgccaccggcttgtcctctgaagggataagcaagtgttctattcacagcccggagtgcccttctgccctcgcccgaggccactgcccgcctggggccagctccagcgctgcgttctccaagcgtggccacactcatcggcgcgctgctctgccaagggggctgacgcggcgcgcacggccagggagctcttgggggcagacgccgtccagcctcccggccgccgggtgcctactccagaccggctctctctctccctaggcgcctcccacgcccgggccggagagcgggcgctcggggcgacggacgaccctgcgcgcacgtgggcgcagcctggaggccgcggggaccctctcccatgggggcgacgggagacgtcctgccggtagaccttggccagggggtcgcgctccccgcccgcacccctcccggagccccggcggggacgtgcggggacgcgcccgggcgggagcgcgcgcgccaggcgcctccgaggtcccggcagcggctcggggcgggcggaggaggggccgagggcggggcggccgcagcctccgccattcccggccccccccggccacggcgcaccgcctccccgcccccgcccgccctcccccaccgcgcgcgctccgcccgccccggagcctcgccctccgccacgatgagcaaatgagcgcgagcgagggcatgaaatttaaattccactcaggggagaaagtgctgtgcttcgagcctgaccccaccaaggcgcgagtgctgtacga

SEQ ID NO: 43430 - DNA, 2300 bp, Homo sapien
aggacccatctgcctcgctgcccactgctcaacccgtcactgggggctccaggcctgccaccggcttgtcctctgaagggataagcaagtgttctattcacagcccggagtgcccttctgccctcgcccgaggccactgcccgcctggggccagctccagcgctgcgttctccaagcgtggccacactcatcggcgcgctgctctgccaagggggctgacgcggcgcgcacggccagggagctcttgggggcagacgccgtccagcctcccggccgccgggtgcctactccagaccggctctctctctccctaggcgcctcccacgcccgggccggagagcgggcgctcggggcgacggacgaccctgcgcgcacgtgggcgcagcctggaggccgcggggaccctctcccatgggggcgacgggagacgtcctgccggtagaccttggccagggggtcgcgctccccgcccgcacccctcccggagccccggcggggacgtgcggggacgcgcccgggcgggagcgcgcgcgccaggcgcctccgaggtcccggcagcggctcggggcgggcggaggaggggccgagggcggggcggccgcagcctccgccattcccggccccccccggccacggcgcaccgcctccccgcccccgcccgccctcccccaccgcgcgcgctccgcccgccccggagcctcgccctccgccacgatgagcaaatgagcgcgagcgagggcatgaaatttaaattccactcaggggagaaagtgctgtgcttcgagcctgaccccaccaaggcgcgagtgctgtacgatgccaaggtgccgccgcggagggacagggaggaggcgcgggctgggggacccgggaccgggggcgggggcgggggcggacggccgcgcggagctgagggaccggccgggctcctcggcctgcgaggagcggtgcggccggcagggggcgctcacagggcgctacgcccgggagtcggggcggggtctgggatgcttccacttccttccgtcaggccgggcggcgcacgcgcggttgggagcctcgcccatgctttgtcgcgttaccggggctaccgtttgcgcccccgactgcaacggtggccgctgagggaggaggcttctcgaatacggtttctgtcttcgcgttaaatgtctccttctgtgcggcctggtgccgggtgggctcctgtgggacgccctggccgtccgatccaggttctaattcatagttacacggcgctggccgctgacttgcgacgttgtgtccctgggaccctagtccagtttaggccccatcccgcctgtaggccgtgaaccccatcccgagggcaaggttggcccagtgttttcgtaccccagggccttgcagcatttacgttttcaaactctgaaggatttacgtgggtctgaccatagttgatgggaatcgcgccccgggccggtccacctaagtctccgggagctgagccacatcttgcagctcctcagatttgggtggcgggcaggagttggcaccaggtctcccagatccccaaggaaagcacccaggtgctttcatttcagagacctgggttcctagggccacctgggcgaagccttaggcggcagggacaggggcagtcccaggtgtgtctttggcgatgtctggacagctctgtccattagagatgctaaaggacatccctaaagggatgagcatattctgccttcagttccctcccctgctgctcctgtcttttaaccgcgtctgctatccctctttctcctcgccctccagcctcctcggggcggaggggggggggcacgccccatcattagttttagttgttccctctagggacacaacagggagggattccagagtctccagctagccatcctggcactggacataggggagcccaggagactacaactcccagagctctcagggctgcagctttcatctagcctggagtctctccttagtgacaaatcggctggccaatggcttcagaagcctcacactgtctcacgctcagagaccaatcacggggtggttggacggatgtttcctattttgaaggcgtccacttgggggaaaaaaatgaaaggaaaaatatttcaacccggctgtcggtctaaaagaggagagaatgctttctttaaaaaagggtctgtgaattagttttcctgatctaacttctaattttctgtatgttctgccatttgtgggaaatatttcttcgtttcagattgttgatgttattgttgggaaagacgaaaaaggcagaaagatcccag

SEQ ID NO: 43431 - DNA, 2300 bp, Homo sapien
aggttgcctggtgtggactctgtcttaaaaggcctccccactgaagaaaaagatgaaaatgatgaaaactgtgagtagcttcacttcatttcttttggctgaaagaacttccacctagactgagagaaggattcactgaaattctagacagggaaacacttcaagctcattatgtataatatttgccccatttatttttgacaattaaagtagcagtcaatataagtcagtaaatcagtaatagaacgttagcagagtcatgcttgtgactactgccctctcggccagcatctttgtacaaacccctcatgggtgtgttctcatgggatctgttctctttttggcacctcccaggccttggtcccatttatgaatgcaacaggaaactgtaggatcctaactgacaatacactttccgatcattagctagtgtgatttttgcatccattgaaattggttgtcaaaataaatttctattgtgaaagatacagtatttgtgtttggcatttaaaaatacatggaattgcagtttattatttccagtagcacccacactacacgtgaagatctgtagacataagggttggtgaagtataaaatgcgagtttaccggatgcttttgtttcacctagcattaagcagttcctctgactgtagtgaaaacaaggatgaagaaataagtgaagaaagtgatattgaagaaaagactgaagtggtataaagtttttattgtaaaaactttctctttgttatatattttagtggtaaaaattcacagtgaaatactccagttgtgaattgttttctaaagatacatcttttaaaccaataatgtaaatttttatttgacatttaaagaaaaacaacccttatttatagtcgccgtatgagtctctcagtggctctttatgcccctaaaatgtttccacaaattatagttatctttctttccagtcaaattatttgttttataatgattaattttttaatggagcctacagactgtgatgtcttctgcctgcatccaaagttaatataaatccgagtggtaaactgaaatgggaaagaaatgaaatacatatttgcattgtgtttagtgcccccaaacaagttaacttttggcctttaacatacttttaattagaacacgtggcatactatgattgttgaggattagctgggtttgtttcatagcaggccttccttggatattgactcttctactgttttaaatagttaaaaatggaattttgatattgcagaaagaagaaccagagcttcaaacaagaagggaaatggaagaaagaacaataactatagaaatccctgaagttctgaagaagcagctggaggatgattgttactacattaacaggaggaaacgggtatgtagggagaatgtataaaacattaatttgtttggcattttcattttgccatagtttgcaatcatagacgtaagcaatagcgaatcttggtggaacgaaatttatatttttcagctttgtattgagtcaggttttaaagttctctgccagtggtgctgtgcagctgataaaaattgaaactcacacagctctggctgcccattagggttgtgttgggagctttccagaatgctgctgcttgtgcttcagcccagaaattaagaattaattgatctgtggtggagtccaactgcaggtatacttgaagaagttccccaggttgttctcacagatcactgagattaagaatcactgcttacatctattcaaaaaagtaatattgtaatctacataaggttatgatcagtagagaaaaaaagatcaaagagattgcgaacatatttaagaagttctattcaaacagaattggctttggtttatttttgagttaaaaaatgatacagacatgaccagtgtttcttggaatatgtggtttgttacattaggatgcatacatcagatgtctatgtttttgttaacagttagtgaaacttccatgccagaccaacatcataacgattttggaatcctatgtgaagcattttgctatcaatgcagccttttcagccaatgagaggcctcgtcaccatcacgttatgccacatgccaacatgaacgtgcattatatcccagcagaaaagaagtgagtactggcatgtttggtgttttgtggttctctctgtattagagaggtggcttccatttagaacaggtgacacttgtctctattccgttattttgaattcatttaatatttaataatttattgataattcattgaatcatctaatattaaaaccttgtcacttttgt

SEQ ID NO: 43432 - DNA, 2300 bp, Homo sapien
caattaaaaaaaaagtaaataaaaataaatagtatggagtaaatgccctaaaagtagagggggaagaaatgacaaaggatcagcagcccagtgatccaaaatcagaatgtaataaaaattttctgtctttactccagaaagagtaaaaagaaaaaggcaggcagaaaattatcgatgaaatgatttttaaaatttctgggacacaggaattcacctgaaattctaggctctcatctatagtacctaggtattccaacgctcatttctgttcaataatcaagatgtgcctgtttgtccttcacttatggtatggctagcttgcagaaggaaaggtctactgattgtgaaatccgactatttgcttttatgccacttaccaaatgataactatggctagctttgattttctccttttaaaaaatagatccaatttatatgaaatatccaggataggcagatacaaaagacagaaagtagcttttaccagttgcctaagtctggtacttggttgccaggggttaggaggagaggggaatggggagtgacaacttaatagatacaagatttccttttgaagtgatgaaaatgttattgaactagctagtgctgacagtcgcacaacattgcactaaaaggccctgggactgtatactttaaaatggttaaaattgaattttatgtatattttatcacaataaaaaattgatcttgtgctttccttttacatattctaaaaataagagaccaacattgtggaagacaatcaaatccttaacacccctttgtcaggcaaaaatctgatcctaaatggataacaaatgttactgtgtttggggaaacttccactttctcatttccattagatttcatgaggcaggaggttactacgtcacccttaattttactacaactagagttctccttgtgcttcctctctgccttaacttttatttaagtcattacactttaagtaatgataaattttaaactgcaccttgcaattagaaaaacaatcaacatagctgggcacagtggtgcacacctataatcccagctactcaggaggctgaggcaggaggatcacttgagcacaggagttcgagactagcctgggcaacatacaacatagtgagacccctgtctctcaaaaaaaaaaaaaaaaaaaaggaaagaaaaacaatcaacataattgcctatgaaattcccccagggtaagaggttgaaacaaatttaccataaaaatgtaaaatctagcacacaattatgctaaaatatgactctttttaaatacgtaagtttatactgagaaagaacagtataggctttgaccttgctatttcattacatcaaaaccagaagctaatttctttaacctttgtctatctttaaagctttaacattcatatgcatctggaaagtgtgttttcttcttatctccactgcacgttctttccagaagcctctggtcacaactgacgagtgacaactgacaagactcctattagcctcacaaacactggcttagaagctagtgttgccttgggaggaaggagacctcatgttttaagcacagcagaaaaaccttctcaacttgcagagcagtaaaattgtccctccacaatttcagtggtgctaaaaataacttccatgcctttagtctcccttgcctaagtcttttaaactatgggataaatctagacgcttgcttgaagccgaccggatttcttcaaactttgaacactggatttattccaactaaggtactgctctctttaagcttttaagtacttgaggctgaagtatttcttaaacacattttagaataagccactgtatattggagctgtttttcctctccaagagggagtgatgtgtacaaagcacctacagatataaagtggcatacggctaactgtgggagaggaagagtagaatgcttctgtattttatcaagtgctgggggctgtggagaatgcaattgtaagcaaataccagaatgacctataggtaaacatatgggatttctcataataatcacctcttaaacctcccaacaatactgttaaaaaaaatcaccagggagggaggagccaagatggccgaataggaacagctccggtctacagctcccagcgtgagcgacgcagaagacggtgatttctgcatttccatctgaggtaccgggttcatctcactagggagtgccagacagtgggcgcaggccagtgtgtgtgcgcaccgtgcgcgagccgaagcagggcgaggcattgcctcacctgggaagcgcaaggggtcaggga

SEQ ID NO: 43433 - DNA, 2300 bp, Homo sapien
atatagtgtgctagtgggtgataaatgctatggaaacaagaaaaaagaataaaacagttaatagggactcggagtccagggtgtgagaaccttttgcaattttaaattggctttctagagggggcattttggaagtggtattggtgcatacatttgacagggtggagaagccggccatgcagatatcccaggaaagagcattccaggctgagggaacaaccattgcaaagagcctaaggtgggaagattacctgtagagtttgaaggatagcaagaagtccagaattgctggagcccagtgagtgtatgtgtgtgagagaggaggggctcggggtaggggatgaggagggacagagaaaaacgggagagggaagtgggcagtaatagttgaggtaagaaagatcaaaggatacgggatctagggtcctgttggcccttgcaggagcgcaactttagcttgacggacaatggggagcttttacatattttagatcagacaagtagccttatgtgatctacgttaaaacacacacacacacacacacacacacacacacacatacacacacacaaaacatctttttgtctggtatgttgagaatagattatggcataaaaataaaagatttctaaatatattgccttatatgaaaaggttgcgatgagactccaatgcaaaaaaaagctttaaaaattataaagcacagtgcagacccaaactataattattttacaaacaatagagttcaaaagccaaggtccctctcgccccttccgatccttgagtagtaactgcgttcatgcaattaaactagcctgtttaatagaagctgcaggaaaactgataactatgtattcaaaaacatgtaattttatgcctgagttttaagtcatttagattttgcagattgctatttattttatgttcagtttttgaaataaatgcttaaaaaaaacgctttagtactaggcttgaatactgaagactttaaatataacaacagaccaggagaggagcagaagtgtgggaactttaaacctatttctttcttaatcccctcggagagctagactggaacactggctggatcttccaacatttctgggggtgctctctgttctttgcggtggccctgccgccaggtgaacgctgccggtgggagagcacacacttagtgcggccagctgaccttcacagtctggggggaaattttaaaggattgtggagaagaggccttgagacttcaagaggaagaagaaaaaggggcccaatgaagcctgagcctcccaggaggtagaactgagttaatgaacagggctgattatccaaggtaattatgtaaaagagaaggctaggaggagttctagatggctgcaacttggagtttactctgcctaaggtgagtgtttatgtttctgtgtttttgcttctccggcaaggttttgttttgttttgtttttttcttccctgttcccttcacccaaggctcagtgtgcaaaagcagctcgctctgcgtggcagaccccattctaatccttctctttccttagattctgagcccggttagaattagcctccgcatcacgggctcctgggaccctccgctctatgctcctcgaggagggagcagctgtgttcatccccctacccgcaaatgcctccggttcttatttggcagacactcccgcggtgctgctgtccaaagacacaccttcccagccagcccagtggtcacgtctcgccccagcgattcgggagaagcagtgggaactctgagctccccgaatcgagcccgctgcgcctggcatctcccttcccttccccttgacaaacgacccaacctcaatcatccctgctccttccgaacgctagttttgtttacggagcaaaccgaggctttgagcaacctgcggttgcacggctctccttcggcttggggagggaggggtagcgttcacagttctccagtgtgccatagactgttagaccagatccttcagatctagaggcacacgcagtgggtgacaggagagtgccccctccccccgggcgggtgggggtggggagaggagcagggactcggcttggagaaggaggcagggaggcagctgcagtgctgcgaggggtgcgtgcgcgtgtgcccagctcgcctgccgtctcccggctccgtctgcgctcctcggtgcgtggggcacgagggtccgagggccgggaagccagagcagcgcctctcgcccaggcctcgctttctctggacgcccggcagtccccggggctagagcgcacggggcggggcgcg

SEQ ID NO: 43434 - DNA, 2300 bp, Homo sapien
aatcccagctacttgggagactgaggcacaagaatcacttgaacccaggaggcagaggctacagtgagccaagattgcaccactgtactctagcctgggtgacagagcaagacttggtttcaaaaaaaaaaaaagaaaaaaaaataactgtcactttagttgccagtgctaaaggaactccagctcctaccctttaccaattttagtcttgttattctagacaaagaggactttataggatagtaagtactttttggtttgtttttgttttacaaaatgaacgccttaaaaagcattaggaaagtgcccataaacatggaattttgaaagtgttaacaagtaaatgtctaaaattgttaaataagaaggttgctgtccattttagtcaatttgcttatgtgttatattttctgccaaatacagtatgacttttttaagcacttacggtaatttggctttcaaatcagacacattcaaagacaccagaaattttgcaagcataaaagttgacacagattattttccaaatacagattgtttcagaaataaaataatgaaaatggcataaataatattttatatgaatgcagtatataatcatatgatatgctaagatgatagtgccctcttaatttctagaagcttctggttccttgcagtgtcaatctcattagtggcggtgatattttagtagaagcacactagaatatatactgccagttattaaggatatttttcatgttttgcttttaagtgcccatcccctgctaagagcatgaaaatctgtatgtggctcttttatgcttcatgcacagagttactttggaaagatttttctcattgtactgagttttcatctctgggtatcaaaactgcatgcaatttattttgcctttttgaccgaaatgtttttttattgtgtggtcactttcactttgttttcttccacaggggtgacattatttccatgctgttacgtgatttttgtaaaagtaccagtttcgtcagtatggaatactatgatatcataaaatttcactcatgtagtcattcacagattcattcattcaatacatttcatgggtctttcatgtgcagaagagggcacctacgaagaatgtaaaatgtggagtcaacacattcctatgggttcggggggcccctaaatggcctctaggattttttttttttaagattgaagaaatagacttaggtatctactctttctaattaaaaattaaaagagaaataaaatcaggcacaaatccaggttttatggagccagaaacttttgcattacaagaaaccctcttagggaagaatacaaaatcatggctacaaatcgccagaactccacccagagtttctgaagtagccttgcaactggggtccttacactgaaacgtcattagcctcacagtcaattcactgtggaataaaaataggctattttactctgaacaaatgcatgttcattcttaacttctgtgaaaaagagatagtgcttatggaacaataaagcaaagaaacaacatgttgactttcgtagtttcggtaagcagctaaataatccattgaatgaagcttttgtttcatattttcctgcattaggatttgtttctcaagagatgttaggagggagcaaggagggaaaggggcccagtctgtgatccttctgcttccagtatggagcaatgtactcattccatttgggaagtaaagatgggttgggatttttaggagcatgttcgggagataaaacatgtacagaaggcggggcgcggtggcccacgcctgtaatcccagcactttgggaggccgaggcgggcggatcacgaggtcaggagatcgagaccatcctggctaacatggtgaaaccccgtctctactaaaaatacaaaaaattagccagacgcggtggtgggcacctgtagtcccagctactcgggaggctgaggcaggagaatggcgtgaacccgggaggcggagcttgcagtgagcggtgatcgcgccactgcactccagcccgggcaacagagcgagactccatctcaaaaaaataaaccacatgtacagaaataactgtagccccagatagaatgtgatattgtttagctatttgtccccacccaaatttcatgttgaattgcaatccctaatgctggaggtggggcctggtgggaggtgtttggatcatgggggtgaatccctcatggcttggtgctgtctttgagatagtgagtgagttctcacaaaatctggtcatttagaagtgtgtggcaggcccctccccctctctt

SEQ ID NO: 43435 - DNA, 2300 bp, Homo sapien
ttcccattagtattctcatcaaccccaatggcacatttcaccttgtttacatttagcatttaagcagagtaactcatcaaactattgaaccaacaatcattgtattagttgccccaactgagatattgtttctccttggtgctatcaagtccatggtttgtcacaattcaatccgagcttccaaatctgcagccatttacccacccaaagaccaggggctttaacttttactgttttatagtccatcagctttggttctgtgttaccaaagaaccacagccccatcatgctaagaggatgccactttccctttgagaagagcatctatatatttagaagaaaccattattagtcaattttatctatgagagaaatattaagaatataaaaattatagtaatttgctgatagtaaattttattagaagagtttaaatataactacattagcagactcaataaaaattttaaacatagtgggtcaagtataaatctcattgctatggtaattagctgtgaaatacatagataataaaccattgcagataggggtttttgtttgttttctcacataatagggcacatatgcatctctaggcggaatgaaaaagggccagaaatgctgctaaaattgtcagtttgaataactttttgataggctggcagatacaaaagtttacaagaaacactcgatgtgccaagtaatctccttgcaaagtacaaggacccagatgaaaaatcccaatgatgcgaatcatccctgtaatctcccaaatcccattatgaagtctgattagagtaggctacaacccaattgcaagtgggctttgctgttgatggagagccaattcgtggcaaacattagtaaaaccaagccatttatctacccggttgaatcagcctttgttgaggagtgtgaaactgtgaccagcatcaccaaccagccctctatagacagggactgctttcctttctcctacacttggtttgtgccctgaagttggctctggtactgcattggcatcttgagaaaacctttttgctggtttctagcaggaaagagaggaaggaggccctgactccagggatgtggagggactgagctggattgtctagggagatctgtgttcctgggatcaggcccttgagcacccaacaggcagaaggttgtgaagtgccccaaggaccatcacatctaccgaaaaatggtgaatctgggggacttggtttgatccagtgagccaccaagagcaatacttcccctcagcctgtgatgaggactcacatagtggttggattttttaaggacacatggtgcaggggcaactctgtagttcaggggtcatcaagtttgaactatgagggaccacatggccaatatttacattttgcagaccaagcaagaaaagggaagatattacgtaggaacttacataacaagagagaaaaaattgtcacaatgtttttattgatataatccaaaatacggtaatatttgagtacaattatttgcaactcacatctattaatgagagaaaaggaattcttttgcgggggggatatttctcttaattggagttcaaaggcggtgtctgctatcatcacataaagtgcaaatgttcatgtatgaaaaccatgcttagctctctggtacaaacacagggagctctcgcgatctggcccataggctgtagtttgcagacccttgctatagctgaacaccagtcgcccacactgggtttgcggtgttccggggtgggaagtcgctccgggctgcgaagcacctcgagggatccccccggcccgaactctccctctgtgcccagctaaccgcggttcattggctctccccgcgaggcaggtctggaagatcaagaatgaagctcggagctctctcgcggagcaaggacaccttcgggcttcaggaccacccagggcgtccaaaactgctgccagggctgtgcccccgccccccggcactttccagctccccctccacgcccgctcttcctccctctctgccccctctagctcctcctccggctcctccccctccgctcctccccttccctacatctagccgccgcgctttcccgctcccgcagcagcagcctcccgcgtcgctgtcgctgttgcctccgccacctcctccgccgccgcgcgcccctcggagttccgcgccccaccatgcccaacatcgtgctgttcagcggcagctcgcatcaggacctgtcccagcgcgtggccgaccgcctgggcctggagctgggcaaggtggtcacgaagaagttcagcaaccag

SEQ ID NO: 43436 - DNA, 2300 bp, Homo sapien
tatgccattggaggcaatacagcattctaatgcatttacagatatggaagagaaatcctccccttttattttcattcagaaattgcctggctattctcacatgtggtcttaccccagtcagacccaacacctcacttttataacaaatatttggtaatgcaccctttgttatatgaaaggagatatttgtggataatgtaaccccagtcttcatgataaacaaaaaggcccagctgatttccaaaatgcaccccagtttagaatcagtctggcaagtatcacatgaaatcctattggtatttgattgggatcacacagcatttgcaaatcaatttaagcaacatttctatttttacaatattgtggcctctagccccaataacaattatttctcttcatttacttatatctttgtgtctgggcagggtcctgccaggaaacagacggcatgttaaagtgagaaactgatgagttcagcaaagtgactatttatatatttggacaggatttaaggaagtaagaaaggatgatgcaacacttcagaggggagtctttccgacctcaggctgaaggagaaggaacgattactggaattcagggaggagagcatcaccaaacaagagcttcattagaggactgcagccaacgcagggccaggcggagggagccagagggaggcaggctctgctctccctcttcctgcccttcagtttccaaccacggcctcctattggccaaacccaaccagaagccagcgagcaaggggctactgatgaagcacatatagctcagcctccagagacacagaacaggataaaaggctgagacagtgggtctggtggggcaaagagaaagcttgcacctgccaggtaaagcattatagtccccatcctccccccaccaccttagttcttgtgcatttcccatcagttttcttccaaagcatttcagatctcactgatttgaatgggacctcttcttctattaccaatttggatcagtaattatttatgtatgagaaaactattgatttttacatatcgttgcatagcagagtggtttaataaggagacatttggtttttactgcctgtgtgggtatcacttgctatgtgacttgaggcaaatccaatatttcttctgttataaattccagtatttgtaaaaaatgggtaataagatctctattttatatagttttagtatttaatgagataatacatataaagtcattaaaacagtgtctggctcataaaaaaccctcaataaatgtcacttattactgtatctggtttttgagctgctctattgcaccattgagttttcagcccagtatatgttaaccctgatcattatctgcagaagtccccgtgccacactctacatcatccaaattctctccaggtggactaagtagattaaagaactttaaacataactaccatattttggctctatctacaaaatgtccaataatcagttaagaaaggaacaattctcttggggcccacactttgagaagcaaatgcagctgaacttttttagaggaaagtgagtgaaccaactggtagctttgccactgcttaaaaaccagcatcctttccagctgggtctaagacagaataaggtaaatttagatatgtctctaatatatctatagaacagtggttctcaacccggggtgtttttgccccttaggggataatttgcaatgtctggagacatctgtgattgtcataactggaagggggcagtgctattggcatctagtgggtatagagcaagggtgctaccaaatatcctatggtgcaacagagaattatctggtcaaaaatgtaaatagtgctgagggtgagaaaccctgctataaaaacgaaagaaatttggtctacagagttgtttggatttagacaagacgttgccccaatagtggtgatagaaataagaggaaccccgtgcttttgcaaagcccatatctggggtggcttaaataatcatgctcctccccatcccccgacctgatctttgtagttggaaactccagggctggctgcctgtagtctttgtgactacacttcctgcctcccatcacttcatctcagaagactccagatataggatcactccatgccatcaagaaaggtattttaaacattggaacacatatagataatttaagtaggtagatgtatgtgctgttataaggaagtggggaggagagaagagggaaccgaaatcatatgcacaaaaattttttttagaatataaataaaaaatgtggtagtctaaaatgtcaattct

SEQ ID NO: 43437 - DNA, 2300 bp, Homo sapien
tataagtaagtaactcatttttatgagtttgcttgacatagatactagactgtatgtgtgtatatatacatataaacatgcatatgtacataaaaaatatatatatatcatatatacatgatgatacacacacacacacacacacacacacacacacatatatatatatacgtatacaagcatgctttacaaggccaattgactggtctacaattggctgacacttggtggcctagaagccagggtatgtgagtctcgcttttctagaaagctgacaaactctccagttccaaggatccttgctcagtcaacggctggaagtcatttttacttcgctgttttttgtttgtttgtttgtttgtttttttagacaaagtctcattctgtcacccaggctagagtgcagtggcactatcatggctcactgcaatctccacctcctgggctcaagcgatcctcccacctcagccacccgagtaactgggactacaggtgcacaccaccatgcctggctaatttttgtatttttttagagacaaggttttgccatgttgcccgggttggtctcaaacccctgagcacaagtgatcctcctgcctcggcctctacaaagtgctggaattacaggtgtgagccactgcactcgatccattcttacttactttctttactttatttccaagcaaatgtttggagggaaaccaagagacttggatgcggccagccgaggcctttgggtttacaatcacaaatgtttttggtttgcccatgaaggcccaggctgcactctctgatgtcacaggaatcacctctcaaaccatgcaccaggtcttgaattcccttagggtgtgatctttagaggtccatctaggtatacccacccaagccattctttgactgctgacaggccttccttcataacaaggtgttccacagtccatttatatatggatgtcatctctgcccaccctgctgccaatttggttttctcccactcctggggtgtaaggcaagatgaaacatatcacatcccgttctaaactttattcttgtggccaggggtcagcaaactttttctgtaaagggccagatggcaaatatcttaggttttacaggccaagaagcaaatttggcatattatgtagctacttatatagtaaaataaaaatttccacaattatgtaattgatgaaactcaaaatgtaataataataatcgaaggcagtttttttgtagtataggtttaataatgagaagaatggaatcatttttggaggtgctaacattctgcttggttggaatttaaagttagtgttctgtatcagcaaatccattgccaatgttcatctaaaaatgttttcacttctgggccggatttcgttcaaaggctgcagtttgctgacctctgctcttggttacaccttttgaggcccttgctctccgagcataaaatggaatccatttatcagactaaatcgggaagattaaattttccagcctcacgaatgctcagccattgactcactcgttcatacaatgaacactcattgagcttatactacatgccaggtgctggaggaggcatggggcgcccaggagaaagatgctcgctttgcggccacagcccagtgggagggagacccatacctaccggtgctgtctcagaaacttgtggaacaaagatgaagcaatgttcatgttattcgcctacatctgtgaattacacaaggaagacgagtttgagaaatccgaagttcagtacaaatttatggtaacttttttaaaaaagaatacactgaagttttcttagtgaatggaataatgttccctttttctcccctgtacacacaaatacacaaaaactaacaaaaatacgtcgtgtgtgtctgatttgggttgtatttaaatcatttcataaatgactttttcccataacttcagtttcaaagttttaaagcacagtcaattaatgatttggcaacagctaagaaatcacaagttcccttcttttcatgtaaacttctgtaaaacacacgctacgttctgctgatggtaaatagagccatttcaggaagttagccagtttctcttctcggccacctcctgcatagagggtaccattctgcgctgctgcaagttacggaatgaaaaattagaacaacagaaacatggtaagccacttctatttctttagcaaagctttccaacagaatatggggtttctgacccagaaatctgggttggtggcaaatggtgtgagcctagaaagtaataaatgggcaaataaggataaaaattaa

SEQ ID NO: 43438 - DNA, 2300 bp, Homo sapien
atttgggtagataaaggaaaattacagtcaaagggggctgttctctggcgggcaggagtgggggtcacaatgtactcagtgggggagcttttgagccaggatgagccaggagaaggaatttcacaagacaatgtcatcagttaaggcacgaacaggtcattttcacttctttcgtggtggaatgtcatcagttaaggcaggaaccggccatctggatgtgtacgtgcaggtcacaggggatatgatggcttagcttgagctcagaggcctgacattcctgtcttcttatattaataagaaaaataaaacgaaatagtggtaaagtgttgggacggtgaaaattttggggggtggtgtggagagataatggacgatgtttctcagggctgcttcgagcgggattaggggcggcgtgggaacctagagtgggagagattaagctgaaggaagtttttgtggtaaggggtgatattgtggggttgttagaagaaacatttgtcatttagaattattggtgatggcctggatacagttttgtatgaattgaaaaactaaacggaataagagaaggagaaaacaggtattaaaggactaagaattgggaggacctaggacatctaattagagagtgcctaaggaggttcagcatagccttgccagtaaagattatttatttacttcaagagtttagagtggcagtttggggatagcaccaggagatatcagctgtgatgtcttggagaaacagtgtaaaccggcagtgtaaacaagagcagggcatgtatgagtagttgagaacggtgaataggagtatgactagacagaagatagtagggatgacaagttttttggggcacagtctaagttggtctggtgtctggaatgagactggggcctaataaaaaggagcgtctatacaggagctcaaatgggctgtaccctgtagcattctgagcacaggtctgacttctgagaaggaaaagtggtaaaagtattgtccagtcctttttaagctggtggctgagcttggtgaggtgtgtttttaaaagacctttagtccgttctacttttcctgaagacggaggaccgtaagggacataaaggtttccttgaatactaagagcctgaaaaactgcttggctgatttgactaataaaggctggtctgttatcagactgtatagaggtgggaaggctaaactgaggaattatgtctgacagaagggaagaaatgactgcggtggccttctcagaccctgtaggaaaggcctgtacctatccagtgaaagtgtctacctagactaagaggtattttagttatctgactcggggcatgttgagtaaagctaatttgccagtcctgggtgggggcaaatcctcgagcttaatgtgtagggaagggagggggcctgaataatccctgaggagtagtagaatagcagacggaacactgagaagttatttccttgatgatagatttccacaatggaaagaaaatgaggagagattctaagaggcaggctagtggcttgtactatagcatagcctgcctttgctggtgtgtggcgattaggcctggtggaactgccatcaataaatcaagcgtgatcgggggaggaacaggaaagaaggaaatatggggaaatggggtgaatgtcaggtggatcagagagatacagtcatgggggtcaggtgtggtatcaggaataatgtgggaggccggattgaagtctgggccaggaacaatggtaattgtgggacttaacaaagagtgagtacagctgaaggagccggggagcagaaagtatatgcatcaggtatgaggaagaaaatagattttggaagttatgagaaatgtagagagtgagttgagcatagtttgatttttaggacctctaaaagtattaaagcagcggcagccgctgcccacagacatgagggctaggctaaaacagtaaggtcaagttgtctggacagaaaggctacagggtgcggtcctggctcttgtgtaagaattctgaccacactaaccatgcctaggaaggaaaggagttgttgttttgtaagggattgaggtttgggagattaatcggacacgatcagcagggagagcacgtgtgtttttatgaaaattatgccaagataggtaacagacgaggatgaaatttgggcttgactgaagtaatgggggctgcctgtgaagccttgcggcagtacagcccaggtaatttcctgagcctaatgggtgtcagggtcagtctaagcgaaagcgaagagaggctgggatgaagggtacaaagg

SEQ ID NO: 43439 - DNA, 2300 bp, Homo sapien
tcccaacaaccctgtgaggtcggtgttgcaatgaacccattttacagatgagaaaactccagcacagaaagattcattcacatggccagagtcatgcaacttttaagaatattcctttggtttgcatttccttgtatctgcaccacccttccctttcctgtctctctaggtctcctgaccggttggcaggtcagtcccaatcatgggaactcttttcctttaagcagtcgtctctctttctcttcctctctgtttccacctgccctccatcagtgtctcagcacagtggaaggctgcttgctaccgcactggaaaacttctccagacatttccaagtttgcattcgtccatctcctttggagaattgcttcagtgaggcctaaccctttctgaggaaaggcccttgggagaagaagccaggagaaggtagtggcactcctttgtcatcaggagacattgggaggaaagaaatgattttcgacagcagctgggtgaggggaaacagaatcacagaacctgcggaaacggtgtcggtacaacggcagctgccagctaaacgggcgaaaaggcaccctgcaagatcttttctgtgtttcaacgatgaagtagactcccaacatggaacaggggcgggggggctgttaccagacaggtgacatttggtgcatgcacgaacaggtccagtgccccattcggaggccaggaaggcagccacccagcagagcattaactaggggaccagacggtcacctgcccctgctcacccccacctccttcctccccaggaaaaaggaagtcaagtagatggagaaacggggaagtccaagctgctggcagtggcattcaagggtctatatataaggttgactctaatccccagcgagacaaaagcctgtgccataaaaatgattagcaaggggtttctaaaaacatttccccaggccacggaaaaggagaaggaatattttgcacactgccttgtctcttagaaataatcacagctaggcctctttataaccggcgagtctttttcctttcacacgccatttgcaggcgcgtggcatggtatttgtaactaattttcagtagcaagtgggtcactggtattcacagagtcaggtgccattttgaaaactgcttccctctacccgaatctcttatatttccagatgcagatgcacttcagcgatgtcctagtgctggaaacgctcccttgaaaatataatttgatttttgaatttcatcttaagacattagagataatgtaactgtagtctttggaattcaacgctggcctccttagccatcacttttaaaatttatgaaaataaggaagaggaaggtaaagaacttcctcattgtccggcagtaaagtcaatggcagagcttgagcttgacttattttgctaagagggaggtgttttaccctataaactccaaattaccttacacccagcaaatactactgttgagtgctcacaaaaattatgctgatgaaacaatatggatgtttcagtgatgaaactttctcttttaaaatcacttaagggtgctttacgtcccacccaaggcaagaggaacgccagcgaggaagacaaagaggcccggggtggggcgcatgcccgccactggactgaaagctgagtcacaggaatcgtacccctgcagcgggccaggccctccagggagggacaccgcgcccttgtgtggagatgtccacagtagacaaaggcagtttcgaaataaaagaatgcctgtcaccccaggtgccaccccgacccttagttattatgcactggtccccaagagcaatttctgcgctgctgttgcaaaaattcatcgtaatgaaataaacgtaaaaggggaaaatgtgttatgaagtgttggagggtgctttgctcatttttttcgccatcgttgtggttagggtgcatgcactagtggaccccgggtgggggtggggctcccctccccaaaagcccggcaggcctccggatgccgttccgagacgcggcgcgaaggagttaagcgggccggcgggtgacatcacctcatttacataggagcgcccataaagctgcgcccgccgcaccccgcccgacaactcggtggtggccactgcgcagaccagacttcgctcgtactcgtgcgcctcgcttcggtgagccccagggcccctgcctccttcctcctgccgtcctgcctccgtccccgccctttcatcatccgcgtccctgtgaaggcattccctaaatccgagcccgagtggttctccccgggaaggctactttggggagctg

SEQ ID NO: 43440 - DNA, 2300 bp, Homo sapien
tctaataactcttgagaaatctcctttaaatttgcttaaacatttcctgtggtctttgtagataacctctagtgggaaaaaaaaaaaattgaagtgaccatgtttgccctaaaggctttggttagttcacaaaacctgtttccgcaacccagagttgcttcaaatagacttcctccctttacaaaggcttaatgatttgtgtattgagttgtttctttctgggagacatctcacaaatactccagttgggaaaaagagataaattgctccatccaaagtttaaaagaatttcttcagggttttgtaacttggacacttggtgttctgaaaagaatgtctttgtgcctatttaaaattgcagaatccttttcagtttgtttctaggctgttatgccaaagaagtagctctgtaatccccatttgtcttcacctgacatcaaattccactttgtgatggagaattgttccttgatttgacattcttttaaagaaaaatgagccagcattgaattcttagctgaataccagtagttggtgtatgtgtgtatgtgtttccaattatagacagaacctggtatagtactttcagctgaaatctttgatgaagcatatgaaaattacattgatccagatgggatagaaagctgtaagactggttgcacaaagccctctgcaagatttgtcttctttcttaatgttacacatcttaagctcgaaagagagagaaacctgaagcaatcatggcttaaaattccccaagatgtctcattggctaatttgggtaccaagtagattgtggggaaatggggacagctggtggtatttagtgtcagtaattagggattctctttaggttatagagaactcttagatataaaggtgagctgccttgtcagggaaagatggcttccaacccagctgtggaaataatcgggctgggcacgatggctcaagcctgtaaccccagcactttaggaggctgaggcgggcggatcgcttgagcccaggagttgcagaccagcctgggcaacatagtgagacctcatctctgcaaaaaataaacaaaattggccaggagcggtggttcatgcctgtaatcctagcactttgggaggctgaggcgggcagactgactgagctcaggagttcgagaccagcctgggcaacacggtgaaaccctgtctctactaaaatacaaaaaaaaaaaaaaaaaaatcagccaggcgtggcggcgtgcgcctatagtcccagctacttgggaggctgaggcaggagaattgcttgaaccagggaggcagaggttgcaggaagccgagatcgtgccactgcactccagcctggggacagagtaagactctgtctctaaaaataaataaataaataaaataaaattagctgggcatggtgggacatgcctgtagtcccagctacttgggaggctgtggtgggaggatcccttgagcgcgggcagttgaggctacagtgagtagtgattacaccattgcagcccagcctgggtgacagagcaagaccctgtcaaaaaaaaaaaaaaaaagaaaaaagaaaaatgaaagaaaagaaatgaccacatcatgagaaatctagacataaagtctttaactttgtatatccactgcagaatcatgcaatgcccagtgtgagggaatggagtaggataggagaaaactacctgcccctgctgggagtcaacaattttcttagataaaacataaaagcacaatccattgataaaaaggatgcagctgggcgtgttggaagcacacaggacatgggagggagcctgggctccacccgcagggtgatggccattccacccaaaggggcaggagtggctggaacgagcctgggggcaaggtcctaggccccgttcacttggcctccattccttagggcagggtcccctggcactcaccactcccgagtccttgcttccttcaccaggatgaggagctggaatatcgtggggacagaggcctcagagagccacccaatgagtccacagcagccatggacagtccgtgagggggagggtgtgcctgcagggggcgtggccccatgccgcccgccacctgcatgcgcactgggccgaccaatcagcgaggagcgcgggcagccggggcggctgctgctctcgtgagaacagaggacccaggccctcggaggagcttcgcggtgccagcctctgcaggtcctctgagggagcaacatcagggctccctcaggtgagacgccctcggtggggatgcggggaaggcgggccagaggccctttggggaaga

SEQ ID NO: 43441 - DNA, 2300 bp, Homo sapien
agaaagaatatatttaccattaagtggaagtggctcatgataaaggtcttcatcctcactgtctttgtgttaagtagacaaaggaggaggaggaagaggataggttgatctcgctgccttggggtggcagaggcagaaggaaatctgcataaaagtggacctgcacagcaacccttgttcttcaagggtccactgcatatatcatatataaaaataacagttacatagtattgcaattatatccagacataataggcaagacatgagacataaaatatagaattaattttggaagtcatctaaatcatgctctgagggaaggtacaaggctactaaaggcaaagagccttgctaagtcagggtgtggcataactgaaagcccaaatgccagactttgtcctctgcttagcctaaaccagaggtcagatgtctcttgtcgccagatgttgataaacacagagaggtaagctcttcagttaccctatcaccaccttactaatacatatgactgcaaaacgttgccttcatgtaagtcagaatatgaaggaaaagcccctaatgaatatgatttcatgaactttggacataaaaactcacttggtagtacattataattttaaatcacatttaattccctgccagccaggaaataattccatgggaagtcaatcaatgaaagttaacaaaatcattactagaaaaaaaggtaatatttttcattttcaaaaagtaaagggttgggttgaatgagaagtagatataggagacagagcagcattctcaggtgttgttcatgcccctgccattgttttaattatggcctcaatattctttctcatggctgatggttgactttggtgagtagaagtaggtagtagctaagaataatcatgaaaaaatagaacattttctttaaaaaggaaaaattgcctaatgatatatcagttttgtatctacaatcaccatagaacatttaggttatttgtactctattatcaggaaagattggggaaaagtggagtggcaaagagaaataaagaagtattaattggaaaccacctcaaacatgagaaaaatagcctttatttatttcattctgcatctgctagtctctgggcaatctaaaaaaacagtcttcagaattatagccacatggtgatttttttcctctccagaattacaagaaaattggctcccacactgtggaactaaaaagaggggctatagggtgctgcttctctctcttgacattttacttggttttcaaaggaattcgtgactaagaatctcatggaatctaaatgcggtcactgatggaaatttaggtttccacaaagagtgcaggaagaaatttacatggcaaaaaaaaagaaaagatttgctctggcaaatgggtgaggtaaggatgtgtgtgtgtgtgtgtgtgtgtgtgtggtgtatatatgtacacgtcacatacatatatcagtgagtatgtatatctcaatgattttcatttgctaggtctagtaatacatctaatttttaaaataacgagtttttttccagcagttgtataaaaataattacttaattattgtttttctttttcagcaagtttatgaactttggacatattgagattatgtaagtccttggacagcattaatataatattatctaatttgtaataaaagtgtatacccattttattcattaagtataaatatttggaaagacgatagattttaagccaggtatggagtgaactgacacattcatccacaaaagtcagatcaagttaatgaaaaaagagaagattgaggtgttactattcagtagtacttctttttatttattactttattcatcagcacatccaggagagcttaataactcgctctcctagaataaaaatcctagttggtactcccaccatggccaattttaaggacaaggaacactaagttacaaggaaatgacaataatcagttctcattagatggtaaggacaggtgtgaacactgtgttacagctaaccaggagaaaaaggaatgttacggaacttaaactgcttagaatgttgatataataaagggggatagggaaacagcaagcactgaggctggtgagccaggcagaagtcagagtgggaggagccttgaggtctctccaggagattcagggaccataggatttggtagtgattcaggtatgggatgatcatggccctcatcattgtagtgaccacagtattttgcaggaatccaaaaaacagatgatagacatgtccgtaaccatgatagtgcccatgggatttt

SEQ ID NO: 43442 - DNA, 2300 bp, Homo sapien
cccgtatcccctcaggccttacatttcagtaggaccttcaacagtcagtatcactagccatttgcctgagggctttctttggctgtaagccccactctgtcttcagcacagaagactgagttctaggatcagtaccacagttgaagctttcaggtaatgagtgaatggaagtggtgtataaatacccagttcccttgccttttaggtaaaatcatttggagatgcttgttctatgctggctctgggagatccccagcagcatgaacctccagttgctcacaatgataacttaatatatgcctgatattgtcttctttcccaactcatttcctcactcacctacccatgttctctgtacctccagaataaactacttttacttgaatccttgcctcagggcctgcttgtggggaaacccacaacaagacaaattttatattccattttctttaagatcctcacaggtatagagttcataacttatattattttcttttagttttaatatttcagtaaataaaataagttatggtatgaagagttcaaagtgttttgatgacaaccttgaagagctcatcttattaccttattcatgatactcatctgacatgtgaatctgccaatacgtgagaagatgagaaaagagattgatataacagcagcagagcccaatggggaaaagccctggtttccagttctggttctatacttgttagctgtatgaccttggtcgggcaagctgcttaacctctccgactcagtttcttgacacttcaaacatgggggaactaatggtctccatccacaggcttgtggatgttcaatcagataacatatgtgtttaggacaaggtctgacactattaattacgagcagctcaatggtctaactagttacccaagaatactgaatccatggggataccttcaactgtaaaatagaagtcccaactaaacatggcttgcaccaataagaacatctattacaatgtaaagcaagattctgcagcaagaatctcccccctccctacttctcacatttcattggccagaattaaggcatatgcctataaaaccatgaatcaagcttccaatcaagataaacctcctctttctctgtatcctttttcatttcatttctcacactgggccactgtgtgtcagaggactatcacaataagcctcagtagattggctggtgccgggcaaccttagctgagctcattcatatacgtgtggattgggtaatatacatgaggctccaccgagtagctctgcttcaagctatagatctgcaggttgacgaggtagctttttcacctgtttctcattcgccttggaccaccaggctaggtggtgcaaggtcttctcatgtccatgatagagggtcaggtgtgttaagacctaggcttggaactggaacactgcaacttttctgcccttaaaccattgatcaaacaagtcacacggccaagtccaaagccaaggtgtggggtcatagtgtctgcctaccatgaagccaaagggtgtggacgtaggaaggacagaaagggatcagtcattcattctaatgtaacacgttgtcagaacaaagaatgtgtcagtacccaaatggatctgaattcatatagcattcatgtttctgccatgaatttctgcactggttactatattgggatgtcatctggggtcccatgtaagtaagctgttgcaaatgggcctgagagattacttgccaaatgacagggttgcccaggacttagtgaccttccagctctagcatcccattatttgcagtttgtagaagaaaaccgggagaacgtgaaaacccaaagagaagtgagggatcatgtcttaggaacctgcatccttccatcctgcttcgacttctcaactaaattcttaagtcctggagtgcaggtatcaccgaaatttgccccatgcctgaaatacatggtagtagatggtgactctgacaagcgtgaagtgacctgaatctgggggaagtttctgggtgaacagagagcgcggaggatgcgcgggtcatgctggaggcgggtcccagccagatgtgcacagcccgccccgccctccctcgctcaccccgtccagcttcatccgcagaggagcctcggccaggcttgccagggcgcccccagcccctccccaggccgcgagcgcccctgccgcggtgcctggcctcccctcccagactgcagggacagcacccggtaactgcgagtggagcggaggacccgagcggctgaggagagaggaggcggcggcttagctgctacgggg

SEQ ID NO: 43443 - DNA, 2300 bp, Homo sapien
ctgagtcctacatttttaaccaccagagggagctggaatgtagaaaacctggggcagtcagttttgttttgttttaaagttagtttcacaaagggccatcaattcaggatcttatgtaattttcctaattattgtgaaccagcacttaaaagataattcttttttgcctttttaaaattccacttttaaagactgcatacagtaaaagaggtcttcctaagaatcaaactcttaataaacaacaggcaagacagcacagaaaaataaaaaatattcacaccctctattagcgaacatttctctcagaattgtctgcttcagatcttgaagtcacgcagttgtgtcacagtgataaagtttcaagttattcaatatacttgagccctccccgactcgttgaaaagtttcctaacaaagaagaaacattcaatgtgcctgcattctatatgcattactattgaaatcaggatggaggtttgctaggcattgagaaagatggtgaataagagatgggcctacagcgcccaaaaggaagttaagcaatatttgactcaggtcagaatttctcaactgaaggtctgagtttcaaggtaattcttaaagggaattgtaattatagcttcggggtttcagtggggtgaaagcagcaatttgtcttaccagcaaaatgagtaaatctatagaagttaatgtatttatgtataaacaaccaaaaagcactttgctcttcattttatatgttcttttattgaccttttcttcatatttctttaaaaaattttaattgtgataaaatatacaaaacataaaatttactgtgttaagcccttttttttttttttttttgacagagtctcgctctgtcgccaggttggagtgcagtggcatgatctcggctcaccgcaaactctgcctcccgggttcaagcaattctcctgcctcggccttccgagtagctgggactacaggtatgcgccactacatccagctaactttttgtatttttggtggagacaaggtttcaccatgttggccaggatagactcgatctcttgacctcatgatccacccaccttggcctcccaaagtgctgggattgcaggtgtgagccaccacgcccagcctgtcttaagcctttttaagtatacagttcagtagtgttatgtacattctcgttccagaggggaggtgggtagaaggtgattgattcattgctcataccatttttcagtaggtatatcttaagtgcatatagtttatcatgaaattgcgttagaccaataacttttctgattatgaaagcaatacatgctcatcacagaaaatacagaagaggaaaataacaaatgaaaattacctaaaatcttaccattcagaaaatgcccctctttaaaattttgtgtatctcttttcagtcttttcacatgtaattcttaaataaaatttggatcaaattctatttttaaataacacctttattcagatgtaattcacgcaccatacagttcacctaaagtgtacaattcagtgttttttagtatactcagttgtataacccatcaccacaaataaatcttgagaagatttatgtgtgccaccacctcccaagaaaatccctgaactttatcagctgctcctcctccttcaccccactgcccttctgccctaccctacctagtcaacaactgatctattttctgtctctatagatttgcctgttttggacatttcatgtaaataaaatcatacaatatgtggacttttctgtctggctgcttctgctcagcataatgttttcaaggttcatccatgttgtaactgtatcaatacttcattccttttcatggcagaataatattctgttgtgtggataaatcacattttatttatccattcatcagttgatggacatttcgattatttcccatttttggctattgtgaataatactgctatgaacatttgtatacaagtttttgtgtggacatatgttttcatttctcttggatctgctgggtcatatgataactggtttattcatttatttattattatttttttttagacagagtcttgctgtgttgcccaggctggagtgcagtggcacgatcttggctcactgcaaactccgccttccaggttcatgccattctcctgcttcagcctcccaagtagctaggactacaggtgcccgccaccacacccggctaattttttgtatttttagtagagatggggtttcaccatgttagccaggatggtctcgatctcctgacctcgtgatctgcctgcctcggcct

SEQ ID NO: 43444 - DNA, 2300 bp, Homo sapien
atggcagaataatattctgttgtgtggataaatcacattttatttatccattcatcagttgatggacatttcgattatttcccatttttggctattgtgaataatactgctatgaacatttgtatacaagtttttgtgtggacatatgttttcatttctcttggatctgctgggtcatatgataactggtttattcatttatttattattatttttttttagacagagtcttgctgtgttgcccaggctggagtgcagtggcacgatcttggctcactgcaaactccgccttccaggttcatgccattctcctgcttcagcctcccaagtagctaggactacaggtgcccgccaccacacccggctaattttttgtatttttagtagagatggggtttcaccatgttagccaggatggtctcgatctcctgacctcgtgatctgcctgcctcggcctcccaaagtgctgggattacagggtgagtcaccatgcccggcccatatgttaactgtttagtcttttatatagttttacatcttgattgtttttcacctaactttatgaccatttttccatgtcgttaaatattatctaaatacatgatttttaaatggttatattactgtatcctaggagtgtgccatatttttaaccattctccatttaaccatttgagggccttctaatttctccttagaagaaaattcttacatatgcagtctccacatctctcatttccttaaagtaaatttatggaagtagaattactaaaaggtcattatgttttatgtcacttgtcatatggtgtctgggaagactgcgtgaattctctctctaaacacttcagtgttcttagcctgtgtatgttcggtggtgattatttaatatcaagtgctataaaacagagcccatggatttttgaaaagacacagtccctgccatcaagatgcttatgttcacatttagaccagacagataaatatagatccaagggtattatatagacaagattatgtacattatgtggagggaaaaaatagactgcatagataaaagtaaacatttgcctgcctaggatgaaattcacacagacataatcattgagcaactctttacacttaaaaattttttaaaaattaacaaaaccaaaatgtaagaaccagttagtctaaagtcataaatcatctggatcattgagtctgaacctttcccttgttcagaagactcctaaggcagcacagtgtagcctgttggcttttgggacccgcagacgtatctctagctgcttttcaacctgtgctgtctcacattttccttagattgcttgagacattagcaaaccctttctgtcttgtttctcttttattttcagaagagtaccactttaaagattatgaaatgagcaagtagttcagttatatagctgactctggggaaaaattgtctagcactgttcagcattgccatattgatgctgacaccggcatgatttcacctccaacatgaccaccggattccgcccaaatggattgactaatctagaaagatcattgatttgtaaaattggaggtggaaaagctatagcagatcctccggcaagcctcttaagcagatgttatgtagaggctctgcaatgctgtttgtttgtttttcactcgtaggaattaaactcttgagagtaaaccataccgtcaccttaaagattccattttctagcgtgtcgcatacatttgtattacatgactctttcggaaaacattgcctaggtaactgacagaaagtgctattttagtatccagaagctgcgactagcaacggcaaacttaagaaaactgaaacctcttttttctttgcagctgtaaagatgtctgacaagaaccagatagctgccagagcttctcttattgagcaactgatgtccaaaaggaattttgaggatcttggcaaccaccttactgagctagaaacaatttatgtgactaaggagcatctccaggagacagatgtggtcagagctgtgtacagagtcctcaaaaactgcccctctgtggctttgaaaaagaaagccaagtgtttgctatcaaagtggaaagctgtttataagcagactcactccaaagcgaggaacagccctaaattatttcctgtgaggggtaataaagaagaaaattcaggaccttctcatgacccaagtcagaatgagacactgggcatctgcagctcgaattctctgtcttcccaagacgttgcaaaactcagtgaaatgattgtgcctgaaaatagagccattcaattgaaa

SEQ ID NO: 43445 - DNA, 2300 bp, Homo sapien
ttaaaatcatctgggaagctttgaaaacccactggtgctgagaccccaccctagaacaattcagttggaacctatgagatgggacccaggcatcaacatttcttttttcattcctcaagttattttaagatgcagtcagagttgagaactactcagaaataggctctcatttgatcctttttacagctctaagacaagaatgttattccaggcacttcacgaatgaggaaacaggtccacagaggtgtggtgacatgtccaagtgacacaaccataaatagtaccaattctgacagatcccagattttctccctcctgactcactgagactggctcaatatcgacttctgagaaatgtattcctggaggtcggggacaaaatgaagaatgtgtttaaactccaacattgggtgactagatcttcattcttttcccctctcttttctcatttataggtctcccttcaaccacaaaagtcaccctggaactcatcccgcagttagaattttgtttggagccctcttgcttagttgaaggagtttcgtagttgttttttgtttttgtttttgtttttgttttttccccctgtgaacaggtttttcgggggtatgtaaactctaggatgtttagtttctgatgtcaggagtcttcatgttctcaaggacaagtgtccttgagatggacattaatggtcattagtctgtcagaggaagcccatcactttagcctttgaatgtagtaacagacgtttatctaataaatgaattgaagataaaattacctctttgaggcctttgcaaacagtgtttaaccagtttatataattgtttgactacaacacgccttctatgtgattatggctgattttttttccttaaaaaactcatggaatgttcaccgttttatagttttaaaaagtttactttggcggtctctacaaacctaccatttcactttctcaccagttcttttctcctaactctcttcctttgttggagctctgaaggcctaactgtgtgtacactttacctgcctgacagaattctccaaaacatgcataaaagtaaaatatgttcgtattttcaaataatttggaagagtcggctcaatgccatcaagtgtaaaatctattttgatatacttgctctccgtgtcttcccagggctgctttttgtgatgcaacatgtttagtccttaacttgcaaggtcatctaaaacttgaagtttcacaaagtgtggtttcatatgacttggaataatctgaaaaactattcagtggttacgaaagagcacagcacataaaaaccaaatttgattagttcaagtcggtgtttatgttttgctttgggggtttgtgtgtatgtgtgtagtttttatttatattggaatttggcaaactaaatgttcagacaaataaaagtaattaaaatggaaatttccttactctccaaaatataaaaaccttcatggtctggccgggtgcggtggctcatgcttgtaatcccagcattttgggaggccgaggcgggcggattgcctgaggtcaggagttcaagaccagcctggccaatatggtgaaaccccgtctctactaaaaatacaaaaattagctgtgcatgatggcgggtgcctgtaatcccagctactcgggaggctgaggccggagaatcacttgaacccagaaggcagaggttgcggtgagccaagatcacgccattgcattccagcctgggcaacgagagaaactccacctcaagcaaacaaacaaaaaaaccaatctgcgtggtcttcctcatttcatttcatctttattcgtgagttttgcaacttgagataggaaaatagtaatctgtgtgtttttcttttggttaatgagacagcattacattttctgcctataggtaattctttcagatcctatgtcctttcccctaaaaggaaaggactttctttaaaattgactgcagggtaaagatttttttttttttttttttttttttttttttttttttttttttagacaggttctcactctgtcatcaaggctggagtgcagtggcgccatctcagctcactgcagcctcaacctcccgggctcaagcaatcctccaacctcagcatccccactcccttgagtagctgggactgcaggcacgtgccaccatgcccagctaatttttgtattttttgtagagacagggtttcttcatgttgccaggctggtttcaaactcctgggctcaagcgatcctcccaaagtgttcggcctcccaaagtgctggtattataggcatgagttac

SEQ ID NO: 43446 - DNA, 2300 bp, Homo sapien
agtaggtgttatttaagtaaaagaatcatttatgcatagcaactttggcctctttctctcccgtgagtgatgcattggtgtttacagaatataaagatgaaaatcttcgttagatgaagggagtcaaactaggttagttctttaatgttttcatcaaggaacaagtttatggagcaagagagatagcaactgtctatccaacttgcatcagcttaccaaccacacacatccaataacaaaaatcccccaaacttgcccttcagagaaaaatcttttaacccactttactcttgcactgacatagaaatgtggttaagaagtgaatggtggaagagaccagaatatactaactttcttaaatgtcagttggctagtatccaactgatagtaattttagagaaagtaactttctaagcttattctttcttaaggtactataagctacactcaaatatgtttgaatgccttcttacattttggaacagcctgagagtcacttatggaaccttcttagaacatttttatgaaagctgttgggtttgtcaaggtttattttaactcaaaatacaataattttatgagatcacttgttaatagctagttggcattagcagttgcacagataaactcctatttgatcactccttgactatggttaggatatacgattttcaggtggcatttctttaattaccctgtggattgcttgttgcaatttgacccaatgtacatgacttttttttctattggaaaattaactctagtgttcatatataatgttttactgtgtacttttaatatgtgttttaaaacaagatagtgtatatttcttcttccccccaatttaacagatttgtattttataaacgtttatacatatttccttggggaaatgacctgcagataagaaatagatttctgtttatgagaaaacaattatttaagcttatgtgtcgttttcagaagcattctaaaattgcctttttaatttgtgaggaactttctcaaacatgacctttctagtgctgaatgaaaagtcattacctgaaaatgactccccaaaaagctggagattatttaacttgttgtgagccccagcatcataaaagtgagatctttgtcttggaaaataaacagactaaatcttttttaaaaagcttttattttaggtttaggggtacatgtgtaggtttgtcatgtaggtaaactgcctgttgcaagggcttggtgtacggattatttagttacccaggtaataagcatagtacttgatacctagtttttttctgctccttttcctcctcacaccctcaaccctcaagtgggccctggtgtctcttgttcctctctatgtgaccatgagttctcatcatttagcttctacttatgagtgagaacacgcagtatttggttttctgataaacaaactaaatcaccgtacaaaacgtattgagatgtccctatgagtccctcccgcctgtagggttctgtatcataggatccatgcactcaacttcatacataaagcaaggacttaaggagagcttctccaataccaccttttgcaccatcgctttctattcagagatgacagaggcagtattttaacaagattaaaggaaagttttaatagcttcatttaaaaagttcttgtttttccacagtatcacaactgttttcatttttcatccacctgtttgttctttgtccgtttgactagtcgtttttatcattgtaatcacgacatcctgtgactgtgctcatgaggtctgtttatttccactttacgtaaacttttcaaaatgacagttatttcgtactcgctgtcgcccgaacgcagacgggaggacacttcaggagcaatcgacccgaaggaaaagcacgatccaggccccgcctgcctcggctccaccttccccgcgcccgtcccccagggtctcggccgcgggaccccgccttccaggccccgccccgctttttccctggccccgccccggcccgtcgccatgttgttccctccgcgctggacgggagcagctggagcgggagcctggctgcgctaccgcggctgcctcctgctgtgcaggtccccgaccctctctctgtcctcattgcgcccagacgggccggcccagagctcccgggtcgtctttcgtgtggccgcgaggtgagcgggactcgggactccttcgggaccgggcggagtgcgcgggtgtcggggtctgagggggcggctcgggcctcgggcagctggggcggggtgcggtgcgcgcggggctagcgcgggtcacaaggccgcc

SEQ ID NO: 43447 - DNA, 2300 bp, Homo sapien
ctggtcccgtttttatgttcattactagttagtgtcctacttcttacatcttccatgtggcctctttaaatttaaggtagtcagagagctctttgtatcaccaagtttatttctttagtcttctccttctcaaaagcccaggtttccctagccactgaagacagctgctgtttccaccacaagtgagagttctggctctcacttgagagccaaacaagaatctgtttccttgtactttccagcttctgggggcctcctgcattccttggctgtggccccttccttcattttcaaagctgtcaagatcacattgctgtgaccattcttctgtcacttccccctgactttcctcttttgcttccctattctacttttaaggcccttgtcatgacattgggtccacctggatgatccaggacaatgttcctatcttaaggtcagctgatgagcaaccttaattcctctttgccgtgggccctaacatactcacaagttgcagagattaggatgtggatgtcttaggagaggggccactgttctgcttgttcacctcagctagacatatggaaaccatcctagattctcctcttgtcctcaatttcccagtttaatctattcccaaattctgtgtagctacctcctcaacacctctgggccaagcctctcttggagatgcttcaaaggcccctatttaaggcgatgggaaaatcgagcagaccatacatacacagtcatgtcaacgcaggtaattcagtaatggcagttgctttatctgtattatatattggaattctaagtaatacttgtttttgttggtgaagggaaggtggaggaagtcacagaacttttataaaacgtttggaatcaggccgggcatggtggctcatgcctgtaatcccagcactttgggaggccaaggtgggcagatcacttgaggccaggagtgtgagaccagcctggccaacacggtgaatccccgtctctactaaaaatacaaaaattagccgggcatggtggcacatgcctatactcctggctactcaagaggctgaggcaggagaatctcctgaacctgggaggcggaggttgcagtgcgctaagattgtgccactagtttggaatcattgatctagagctgtgctgtctagtactgtggccactagccacatatggctatttatgtttaattaaaattcagttctacattctcactagccacatttttttttttttttttttgagatggagtcttgctctgtcaccaggctggagtgtgcagtggcacgatcttggctcactgcaagctccgcctcccgggttcacaccattcttctggctccgcctcccaggttcacaccattcttctgcctcagcctcccgagtagctgggactacaggtgcccaccaccacactcggctaattttttgtatttttagtagagatggggtttcaccatgttagccaggatggtctcgatctcctgacctcgtgatccgcccaccttggcctcccaaagtgctgggattacaggcgtgagccaccgcgcctggcctacactagccacatttctaatgcacactagctcacatattggacagcacaggtgtagaacatttctgtcctcgcagaaagttccatagattggacagcgcagaatcctagcgtgtgtcttacctttgctccataccctcaagtatttgctaagtgtttgcagctgttcccctcccgagacaatgaggtcattttctcccagggttttcagttcttccacttcacctgtcagtttttccttggcagaactgaatgaaaagctacagcccttcttgcttcttcagctgtttacaaaatcaaataattggcagctgaagtcaagcatggaatgtatataaagaaagctctgtctcatcttttgcgcagctgggtagttggtaacagcatcctcatgcagtcggtctttgagttccctttctgtcttcctgctgacttagcgccatgctgcttgcccattcgtggctttccatataggggtgagtgtggggatgcatgttatcttgcttatacatatgtgtacatatatttccttctgctgctgcttttgcttttttttttttttttttttttttttgctgctgcttaaatgtactgaagaaagtaagaagcccttcccttggcaaactccagctctgaaatctagtccagcaagaattcatgatatcattgtttacttggttcaaatttcaactccctgtccttcccttcactttggagaattattgccagttcttctagttttgcatag

SEQ ID NO: 43448 - DNA, 2300 bp, Homo sapien
gttccataggccaagcccagggctgctcatttgaagtcactgggaaactagaaactaaggggtgggtggaacaccaacagtgccagagtgggaggatgctcagtgaacttggaagtctcttaagttgtagacaaatgcaagataaaactcatggactccagttccaaagacatccatttttgtagcatgcctctttacaacctctatagaagagcttctagaaaaactgccctgtgctcgcgagagcagtgatttcagttgttccataaacctggggtcatgagactaaactggtatggcatgggacatgtctattacaatgaggaggggcagtaggaatactactgataggtctttaatgtgacatttttctattaatattataagcaattctccctcccctagaagttatgctagtttttggagaacattttatctaattatattcatgtattcaactgtgggaccaaaggtggaggtgggagtaagggggtcttcaggaacattttttttttttaaacagtggacaagtgattctacttaacaacatttacaacatatcaacatctttttagaacactgttttcatcattccactcaaaagcctttgatgcatctcagctacaggatcatgtactagtattcaagattcccacattgctccacgtgtcttttctcagccctattgttccacctctgctagcgttgactcgtttacttattttttctcccaaattcactttgactatatcgagttcagagctactatcatttctctcttcatgcctggaatgttctcctttattctgtctgcaaccactacccatcctttaaaatccaactaagcctctcctccttttccattgtttccaacaaaaacttacaggttctccacctcctatgaagtcctgtcactcttactgcctcttaaatactttaagtttttcacagccagagatcaaaactcatcgtactcatcttcaatgctgtacacaaagctgacatccaattctgtcctcacaggacttagataccatataaggcttatattcccagcacacaactctggagtcaggctagattcctcactgctcccaagaaggtcgtggcttttttttttcttttaatgattcctttgctcatttttccccttcctgtgatgttctcctttttgctcaccacccgaatcctacccatcaaggccccgataaagacacactttttccacagagatgatctggatcacttccatcttcaaccacctcccctttaaactctttatccagtctacaatgtatcttagttcttgttcaattctctggctgtaacattttcattatcgcttctgagaggtttggttcctttcctttctaattacatttaagcatcatgaggactggctcacctttacctcacagcacacaatggttggtactctaaaacgtttagctctgtggatctcaacccggagcgatcttgcttccaagaggacatctggcaatatctggagacatctttggttgtcacacttgggggagaaggtgatactgacaaaatagagagcaaggatacagctaaacctacaatgcacaggacagcctcccaaaacaaagaatcttccggctccaaaaggcaacagtgcagccgttaagaaaccctgggttagctgaatgacccagtgaaccgcgaaaccacagcccccgagagggcggacgtctgcaggtggaagggctgcgcggatgagccagcggagggctggcaggtccggcccggccaccccggggaggggtggaggtacaggaccaacatccgcgtcacgcaggggctacgaagtcctccagggactcaaaacacccgccccccgccgcacttgctccattccctacctgcagtgggaggccgacaacggaaacgcaatgtcagtttccgcggaagagacccgcgccccgaacctgtagccagaacgccgaagcagttctcgcgataccctgggatgtgctctcgcgatacgtaggcggagcttccggccggtgctgggcaaccaagctcatgcgccgtagctcttcagctcgggaaggctatatttagcaggtttccggaagttgccggactggctgtgaggcggtcctgcctcgctgccttcagtccctagtgtctgggtccccgccctccagccgcctttgagtcgtgcctgggtcctcgcccttgcctcagaaccgcgaagaaaggaagctcgcgtgtttgctagaaaacctagttgggagtgcgaggcagagaacgttcagcacctttgttcctcc

SEQ ID NO: 43449 - DNA, 2300 bp, Homo sapien
acttcagaaacagaaaaggaaagactttaccttttcttttgccaaaccactttctggaaagaaaacagaaagtgaatattcatagccacatctttgtaagtgatctgccactaaagagttagaggcgcctattaagagggagctcccttctactgaaatggaccgaggctgcagttctccactcaatacagggtgcatcaactcatgaattagctggtttcgaagttgtgtctagcataaaataaaaacaaaaataaaaaagaaacacaagggaaagaaatttcagcaggactgtttcattagagatatacacagatgagctacattcattggaaaccttccttctatttccataatggttctagatccatggccagaagttagaaaccttcccctgcacactttgtcttaccccgtgagacaagcagtccagtgggttctagaaaaagctttctttccccagcttccaaatgaaacgggtggttagccagatccacttgcagactcataacttcacttccctagaagcccatttcagcagcttacgattgggatattaagtataggaaaaaattctgccacttcatcacacctctgtggactgttggagaatataaccaaaatattcaacaacaggggactgctatatacattacaaaaatatccaaagataagcctgttgccactgaaaatgaagatttcaaaaaacttttaaggaaacagggaaatgctcaccatataatttaaattaaaaaaggatacatacacaggatatagctacatattttaaacgtaaaatatgcttttgaaatgcatatttcaatgaaaacacgttgagctaatcctactcctggctgttaatccaaatataaagcatactaataggtattttctgcccaaactaaacattcatacatttcaatatagtttaaagataaaatttttcatttcccaaactattattaagcagtacactagtattttctatatggtgtcaatgtccttcatccaaatgtattacaaacccacttattaatttaggaacctataagccatatttataaaacaagcctaatcttactgtgttcattatacaaatatttccttctcctatcttattgtcagttcaattaattatttgaatatgctcctttaagacgactcaaactcaacattttctcaaacattttcaagagactgtaatgtttcaggatacagagttattcgggaatataaaaatgtaattcaccaatacaatctatgtatcatacgattattaaaacctaaaccttgattgaatttgaactacctgttacaggttacacttgtaaaagctgacacagatacgcctaaatccgataccttgagtgtatccagtataccccgatccttaaacgtctggtatagctttttgcgcagttcatcttgactcaacacatcagccacggtaaacatgttggactaaaagacaaaatggttataggttacctgcggggcagagggaacgtgaacgtctgaaaacagaccagtggcctccggggaagccataagaggcctagcggcgaaagtttaacgaacacaaaacaagactttatttccgcccgagaaggggcaggtgtgtctacctgcgccatcatcaggcgtcagctccctccggagcccgcctcgctcgccccgccgcggcccgagtttagtgcccagcccgggcggtggggccaagacgagggggaatccctgccctcagaaccctgcctctgtcccgagggttcgggaggaacaaaggtgctgaacgttctctgcctcgcactcccaactaggttttctagcaaacacgcgagcttcctttcttcgcggttctgaggcaagggcgaggacccaggcacgactcaaaggcggctggagggcggggacccagacactagggactgaaggcagcgaggcaggaccgcctcacagccagtccggcaacttccggaaacctgctaaatatagccttcccgagctgaagagctacggcgcatgagcttggttgcccagcaccggccggaagctccgcctacgtatcgcgagagcacatcccagggtatcgcgagaactgcttcggcgttctggctacaggttcggggcgcgggtctcttccgcggaaactgacattgcgtttccgttgtcggcctcccactgcaggtagggaatggagcaagtgcggcggggggcgggtgttttgagtccctggaggacttcgtagcccctgcgtgacgcggatgttggtcctgtacctccacccctccccggggtggccg

SEQ ID NO: 43450 - DNA, 2300 bp, Homo sapien
tcagtgagatcttgaggctgttataaagtgatataatggtaatttctagaattgtaatacattatcctagtgaaaagaaaatgatgaagttgtgaatcaggcaaaagtgatgaattgctcatttccatgtagtttttcaggtggaaagtagatgcaggtatcaactggaggatgtgtgaatattttgtctaatggttttgatctcgatatagaactagagttgttcttaaattaagaatgtctttcatattctgccttttcaccagcatcactattaaaataatattcttaagcaacagccaaaaaattattaggatctgctggttctataatcagatgtttttgctggacactttaaaaaccaataacagctaatcacagtgtcctcttttgtgctgaattgaattttgttttggttttaattctcatttgaactgctgggaaagcaagcctgttacataccaacacttgccacctttctatatttgaatggacctaagtagtctttgcaaaaaatgtctaagactgtcctatccggacacaccatagggttttcccatggaaataattatatcacaaacgaatcttttttctaaagtctgtggttttaggctgccatacttctcaatcccctgaccaggagacaataaaattggctggggccttaatttgagggaatacatatttgattgtgggcgtggtcttctaagacaatggtaaagggaaaagcaagatgtaaaattaaacgttgaaacaagctaaactggttttcaaaatcttctcgactgtaacacatctagaagttctaaatataagaaggtttgagggattatctaaaaccaaggtattaaaagatcaggtttttagaagattttgattcagtaccttatacttttttttcaaggagttgagcaagaaaccatcaaaacttaggagagtgattttaggagagggtggtctccaacttgtctttatgtttgcttccaagataagtgttaagcccaaccaactagcagactattcatgatctgggaatcctatcagtggtcatccctgtatttgacttgagtctctctaattttttatagggacggcgaaggccagttggtcagccaaatgcataaaaaatggtgcagaaattagtgatgcttggaaacatggctcataatcatgataaaggcttatatgttggtatgggttgagaatgttggcctcatggtatctgggtatgcaagaaggcaaatcattattggtatactagcctttatgttgaatatttagagagctcttgaaaacaccccttcgatttggagtgaggaattctaatgagtaaaactccatgtagaaataaccatatccgattaaaaaactattttgattttcattccaagaaactaccaaaatgtcagctcgatatacttgtgaacatgttatgcttatttttaaataaggaagggtgcctttttacaaattaggcttgagtttctcttactatcatatatattaactatagacaagggagtgggttctaataacaaattgctacattgctatcgttaaatccgtgtttgagttttcttccctctaatgtattttctccccctctttaatttatatttttaaaaagcaatgtacttatctagaaattgtatgaaagacaaatatttaagaaagtaaatagagactatgggcacgtcctttgaatatgttttgccagggtcgaggggtaaatgaaataaactgatacatcataaatggaccacacaggaaagaaagtgtcatgcctatgcaaagacatgcattctccttagagacgacatatattgctgtcgaccaacaaagtcacgtggtgggagggggctcttttctttctccttcacatcccctcctctgatgtcacaaatctattttttcctgggagaattaattagcattcattgggtgtacttggctagaagaaatgaggtggggagaaagagagagagagagagagatcgagattgagatcttaagaaagagagcaaggaggaagagcccggtggggagcaggtccttctcccccacccccctacccccaactcccactggagccgcattgagactgtaggcaccaccgggcgccgaatggctgttttctaactgggatcctcggtgacgtatggctgcctgccccttggcagctgtctttatggaccagtaggcagagcgaaattgacgctgacaagacttttgcatcttggaagggactgtaatctactgtagtgaagaacagagcctctcaatcagacgggtgtaaataa

SEQ ID NO: 43451 - DNA, 2300 bp, Homo sapien
ctcttggtagtacagccaaatggctttccagaaaggctagaccaattgactcacccacctgcaggtgtaatcttgctttaatttttaaagatttcagttacttgagaaaaatggtttattattttaagatagcatttctttgaataatagtgaaatgaaatatacttactagccatcatctgcatcgtctatagcagccttcactaatttcccaaatgctatttttttttcttaagggttttagggacaattgcttgttgaaatcaatccatgatactcacaaagtgaggaaaattttctgttaaaatgtggctttcccctgattgtatacacaattgttagaactcagtttttatcacagcatccattgtggctagctccaatatttagacagctgttctttctttggggaaaaaaaagacaaaaaaaaaaaaacaaaaaaaaaaacgtaagacttctagggaatgacagaaagtagaccaaggagtttactttcatctcagtacataaaaccttagagttcctcgttccagagaggctcattaaggtcatgtcttgccaaagtactatttcagatggtcatgcctgagttcccttctgttgttttcagggtctcctaggaaaccctcaagatgtaggaaccgaccaaactcacccttccctcaactaggacttagcatgaattcctcattgctctcacccagtccacctttgtcttcctctaccttacaggcagcctctgttattgttggattcctacatacacttgcactcaggaatggcgcaaatggattacttcctcttaacaggaggacaacaagttatacctatgagctccctgttgttttatgactgcatgaagattggttagaaatgactattcccgtgggattgtgaaaatgagccactgatccgcctagcacaaatctctgtcctttcatgtaaaatattattaggctttctagagctctgccttgataaaatctttcctaatccaataaatttcaatagatgaaatgtttgcctcctccatcctttctcagtcctaaagcctctcttttggcttaaatgtccctaaagtgtactatctattgtcactgtttatgtaaccctctgttcaaataacatgatgtattttcagaacaataaaagaacacaacaaaaaatatcaggggggaacatcaggctcagaaatgtcacagagagcgttagtcctacaaaaactgcaagggtcccatgactcttctaatacctttggagacaggaaaattctctaaggagacagaaggaatttaagccctggacactgttaaaccatttaattcacttaaaggctcaagcgcgaggcctgagcagcgggagaaatggttgactggagctagcctgcaaagtctccaagagccttccaggggtggacttccaggaatcaagaggggtgataacggacaccagcaaatctggcaccactctagattggagggtgctacctgtgtctttctaagtcattagccaccgacaagttacttatgtcaatgtttcgcaaccttggatgcacattggaatcacctggggagcttttaaagaacggatgcctgggtcccacccgcagaggccatgatgaaatccggtttccagaagctccccagctgatttctcctctgcagccagggttgagaccactgaattaagtaacgactcgtatctgaacaaaaggaactgagactgtggattgaggcaacgctaagtactaagtgcccttggtccagtgtcccgggcctcagtttctttatctatacaacgggtgtggctaagacctcaaagccccccgctccccccaacctccccaggccataatagttttcatctgggacgcggatcgccgcctccgcgatcctagaagcccactcccctctctacccatccccctcgctggcttttccggttcccgcgaccctcggcgctcgcccgggggggtcccagaggaagccgcgagctttgcctgcagactccgcgcgcccgctgcccccaatcgggccctagctccgggcgcacaaagcccccggcgctgacgtcagggcccctctccgcgcggccggcccccagtgcaggcggagccgcgccgcgctcccaccccggccgggagctaggagccagcggccagccccgcgcagcgcagcgcagcccgcagaagcccggtcagcgcacgtgcccgcgagacctgcaaacttgtgccaccggctctgcccgtccccggggagcccgaacgccccgcagccctcacccctcccgccagtctccag

SEQ ID NO: 43452 - DNA, 2300 bp, Homo sapien
aattacaaacatattagtactaatgttttgtctgctgcaatgcatcaggcactctgcattaggttatgcatatcttatagatgagacacacgaggcttggggaagttacaaacttagcactggactcgcactcaaactgagatctgggttaatctattttcaaagactgggtgttttacgctgggacaaattaagaaactaaaactgttttagttaagaaagaaaacagaaaggaagaaagaaaaggctaagtaaagacaagggaaggaaaacgaagaaagctgaggaaaggacaaaaagttaaaggctggaaacccgggcggtgcagaagcgacccttatctcgccggtgcagaagcaccgtccgacccccggcgcgggtgcccgccacagtcccagtgccccgcccggtgcagctccctctccgccggccccgccacccgcagccatcccacgcctgccgccccggcgctccactcggggtagccgattagcaggcagcttccggcctccagcactgcaccgcctgcggtgcgaacgtgacgtccgcgacacagggggggacttccggcgcgccgcgccacgccacgtgttccgcaccggaagcgcgcttccagtcgccccggcaacagccgcctccctcgcgtcccccactccccctctgtctctccaaggaaaactaggcccctgcgcggccaacgcccaggatccgcaagctgcgcgcccacgaggtgacttcggggacggctgggtttcctttggggagtgagggaggagcttagacgccccgggccctggcttcttctgatgcgcagagagccgaggtcttggacgtcacgttgctctcataattatcttaatcccgcgacaaaaggtggggccggaggcccatgagattcctaaatcattgcaggttaattgtgagaggggaccagtcccagaggctctcagctctgcagtgcttccgaatcactggacgactctttaagaattctgatccccgggcccccatcccggaccaatgaaatcagaatctctaatagtggggccctggcatcggtagtttttaaagctgcccaggtgattctggggtgccgagaaccaccgtgttaaggtctgtaggtgaattcggattttgcccatccagtccagtatctgaatagaagatcgcccaggacagccacatacttgaaggatgtctaggatattgccctctctgctcaaaaattcgggtttctttcttttctcttgcactttaacctctgcaggaggtcagcttttggtgggagttatcttgagacatctggcgcctacagtttatgggccttgtgtctctgcccacttatcagtaatgagctgtaattgaaccagtggccaacgaagtgcattttagctctgaaatcttgatgttcccttagtacagatcagatggttctgaacaattttatttttttcaggaatgatgtttttaaactcgtttgacaggctaggctgtgtattcagctgttcttcatctcaaatcagaacaatattacttaaaaaatctagactaaagattagtaacgcaacacttctaggattatttatgctcacagcccccatgaattgtaggatgagagctaccctttaaaaatactatttttgctagcataatttatcggaataacagtctctttgtaatttcaatgtgaacagaaaccatatatttttaaagactgctggttagtaacttggaataagcataactgaaagcaagttcacaggtgtataaatcccctctgtgtgttcattgctgtgctggggaagtatacaaactaaagttccagagagaaatgttcattctgaaactgttctatagatggtgattaatcattttgggtttttttttaaaggatagggtgagatgagaatgacgggggaaagttttgaacagttaaggctagagtgtaaattggagagtttgcaaagtaggtacagaactttttttgaacaacttctctacaagaggaaattcagccacggaacagctggacaagtgaaaaaagaatgtagttgatcaaatatcagatgaattgaaaagatctttgaaaacataatgtatttaaatatttgcttcctgaaaagatttggtgctttatagtcagttttttgagttactaggtcctcagagattttggggagtagatgcaggaggagagaacgttatcaggaaacaacagacaagctcaacaatttcagcagcatctaagagcatgaaatattagctattatttttatgctggaaggaaaataggaaactta

SEQ ID NO: 43453 - DNA, 2300 bp, Homo sapien
aggacaacccccaaaacacagaattatccaaccccaaatgtgaatagtgccaaggtggagaaatccttagagggaaagggcatgcccttggctttctctttcccactggctgaaaggtgcagtggtgcaccatcttggaccatgtgggccaaggcaagaaaccagggagggtggagctatgagacaggtggagctgccatactctggactccttacacccagactgccatgagatagaaatacacttctcaacagtttgagccactcctcttctgggtctctgtgacagcagccaactaatattctatctaatgccatagtataccatatatattgtattttttcattcatagaaccaggaatcactctacctgaactatatccactctaggcctgcatccttctgcctttcccaggaaccccctaagctctttctccctatcttacccctctccatctttctttcctgcctctctagatgctggcttcttccttgaggtagagattgcaccaggccccatctgacttatctgtctcaatccacacctgacttttcccataagacttcaccctcctaccatctcctgcttctatccatagatatctcatttcctcccacatccattttctgaggtggaggaataatcttttctaaaataatccccctctatatacacatactttctggcccttaccctgctatactgtcttcatataactcaccacaacatacaattctatttatctgcttattgtctatgttctacacaaaagatttaattttatgagccccaaaactgtattgtttactactgtgtatccggtaaatagaataccacggtacaatagaaatgcaatgcatgccacatatataattttaaatgttctagtagccacactaataaagtaaaaagataaagatcaaattttagtctttaacctcaatagtccttctctaagatgttatcactataaagaaattgaggtattttacattctttttctcattcttcttcaaaatctagagtgtaatttacccttacagtgtatctcagttcagactactacaattcaggttctcagggccacatgtagtggttacaatggacagcgctaacatagaatacttggcacatagccggcatccagtaaatatttgttaaagttaatattcttctataccattttaattcttctgtagtccaggaataatacagtaatgtcacgtcattaataccacccaattgacttagccatttccttgttgggcatttaggtcttttccaattttcactttttaaaataattctgtaataaacatctatctggttcgtacctgtttttccttggaataaattcccagaaagtattaaatatggtaattgccccagaaatgatatgtcacgtaagacttctaattgtttatgcttggttcttgttaatgactcttgtaatgttaacagggcaggtattgctgtgatggttataattacaaacatattagtactaatgttttgtctgctgcaatgcatcaggcactctgcattaggttatgcatatcttatagatgagacacacgaggcttggggaagttacaaacttagcactggactcgcactcaaactgagatctgggttaatctattttcaaagactgggtgttttacgctgggacaaattaagaaactaaaactgttttagttaagaaagaaaacagaaaggaagaaagaaaaggctaagtaaagacaagggaaggaaaacgaagaaagctgaggaaaggacaaaaagttaaaggctggaaacccgggcggtgcagaagcgacccttatctcgccggtgcagaagcaccgtccgacccccggcgcgggtgcccgccacagtcccagtgccccgcccggtgcagctccctctccgccggccccgccacccgcagccatcccacgcctgccgccccggcgctccactcggggtagccgattagcaggcagcttccggcctccagcactgcaccgcctgcggtgcgaacgtgacgtccgcgacacagggggggacttccggcgcgccgcgccacgccacgtgttccgcaccggaagcgcgcttccagtcgccccggcaacagccgcctccctcgcgtcccccactccccctctgtctctccaaggaaaactaggcccctgcgcggccaacgcccaggatccgcaagctgcgcgcccacgaggtgacttcggggacggctgggtttcctttggggagtgagggaggagcttagacgccccgggccctggcttcttctgatgcgca

SEQ ID NO: 43454 - DNA, 2300 bp, Homo sapien
ctggccaacatggtgaaaccctgtctctattaaaaatacaaaaattagctgggtatggtggcatgtgattgtagtcccagctactcaggaggctgagacaggagaatcgcttgaacccgggaggtggaggttgcagtgagctgagatgacgccactgcactccagcccggtgacagagtgagactccatctcgggaaaaaaaaaaaaagagaaatgatttacaaagactatattatttaagcatcgttacaaccttaaatttgagagaaataattttcttctatctttatacctaattttcttttggaaagaatcttgaacacaaaaaaatctgtgctatttttccatgtagaaccaattgaagaaatatttccaggaattgattttatatatttttttgggtcaggacagcagggataaaatcaggtctagagtttccatgtggatgaatttggaagtgaacagatttgaagctgcagtccagggatgtctcacactacaccatactgtttttcttttaaattgaatcattttctctaggctttgaaagttaagaaaacatatttgaagaattgattttgtatgtaaatagaatgcttgggcactactgcatttcatctaaaaagagattcctgtattttcactgtcttactgggatagacatcttatgaaagggcatatagactcttgctactcaaagtgtgaactgtggacaagcagcatcaacttcagctaggaacttcttagaaatgcagaatctcaggccccaccccagacctactggatcataatctgcatttcaataagatcctctggtgatttatattaacattaaaaggtaaaaagaacttgccatcttttttctctgaatctacttcttaaaaacatagaattcattgttactctactatgatatttaaactgatccaaagttagtcatttacggagtaaaaattaatcatattattttgttttaaaattaagacctccagtaaagcacataggtgactaacaaggaatattccacaaaaagtaggttactctcctagcttatggtaggacatgcatttttcattcccccttcccagaagctgctaattatccgcattggactatctacccttcctcttttttattaataataatatttgtaattttgatttgaaatagcagggttactcgtcagacttttgtacagatttatgaacttccactattttcagtccctttagccaatttaggagaatagcatatgcactttattacatgactgttcctagtgattaacatctggaatgggcagatgaactaaactcccagttgcacttttccttgctccatttctaacatggagccctgctctaacctttaaccatggcaagaaaagattgctactgccccctgccggcccattgtctcatttccttttctacaaatctgtgacttgcggatgcccaaggattttgagccactgaagaaagctcagttggaaggggctttccctagtacagaggtagagagatcctttgggactaggcggctaaaatcaaatgaaaacattaaaaaggcgaggaaggcataaaggacttctaaattaaattatcgatcttcatgaaccttcttctgcacgcgggcttctctgtgccaaggaaatgttcccttctcttcggcacaggactcctctttgcctccggcttgcactgacaaagagtgaactgtccacacccttattataatttcagtactctgaatcctgttctctgtttcccccaatttcgttttcccacgattaaaccttattcccttcccttttctgcttcaaattcccgtcccgcccacccaccgacagcctagcatttccaggagctcagaccccacttccctcaccctctccgtctcccgacctctcttctcctcttgctgtcatcgtacccccttcagtatcccctcgctgaacggccagtcactctttgccttcgaacagcaggcacgtcccctcttgaatgcttttccccgacccccgccccaagcaactgaaaaaggaaacatgcgcacttcagagcttggagctgtccgagtgctgaaatttataggctgggtaagatcacgtctccgtctcattctatagccctcattccagcacaggatctcagcaatttttccctcttccccccacccactccagcgcgcagagtcctttcttctctctcatttacaacttctttttaaaagaaaacattttctagaaaaagggctttgctaaacagaaaagatataaaacaaaagccacagctatctag

SEQ ID NO: 43455 - DNA, 2300 bp, Homo sapien
caattagaagaaaattatgagtacttaaataaaagggagagatgactctgaaggtaatttggcagtcaactgaaatgcatatacccagtagtttcatttgtagatataaacccagagacataatcccacatatgaatgaatacattgctctagaagctcactgtgctgatatttgcaatataaaaaaagtaaaaacctcaatgaacaccaataggggaatgagtatagatggactatcaaacaagagttaaaaggaatgaattagatctatctatctatatatgtgtgtgtgtgtgtgtgtatatatatatataatcatggttaaatttcaaaaataaaatgaattaaaaattaagttgcagacaaatgtacactgcagcatattatttatgtaaaacaaataaaacagcattatatatgttctatttacctacaatgactacagtccctgagtgctttctcaagaaatagtgccatgtactattttttttttttttcctgaagaaacagtgccaggtactgctctaagcactttggattaactcgtttcttcctcacaacatccttatgacataggcactgttactatcccattttatagatggagaaactgaggcaaggagtttcaggatcttctcaaaggcttgcagataagaagtgacagagccaggattcaaacccaggcagtatgatccaaaataaaaaaatgtaaaactgtaaacatttcatgccaaattctgaatgctgttgattctggacaaggaagtgtccaggataggtgagtagaggtagaaggagactttagttatatctgaaatatcttttaaggatgtagtcaaacaacgtttaaacaatgtgttcattttttcccataaaaaatgtaaatatatttaaaagtctaggacaaaagatgctaacatgccattctgtcatggatgactacggttgatggaaatatgggggactattcttacaacttgtttgtagttttcagtatctttcaactttaaaaaaggcaatattgtatgcgcaactattttctttcaattgtttttaactgacgaataaaatttgttccagtccctttaaatctaaatctttctcaaccttgacactattgacattttgggctggataactgttgtgaattttcatgtacactggaggatgtttggcagcttccctggtctctatccactagtagccagtgagcatctcttttgcccccggcccctagcagtggtgactaaaaatgtctccagaggttgccaaaggtcccctgggtggtaaaaccgccccccccacacacacccccccacccccccggctgaacacaactaccttaataagccgaaacacgctttttttaactttatataattatttgagattaaagatttcagagatattttgctcattaagcatctcacactccaagttggaaggatactgaagggatgaaaaaaacttcaagcgaatgtagcacttaaaatccaattatcattgcaaggaatgacagacccaggtctcgggatgcccgcttccttccctctctcccgcaatgcggggacaaggggaggaaatccagccccatcgccccctctgcgaagtcctgggaagggaagactcgccagccccatcctacctcaacgcagcggcaacataccggaggccccacgtcgatacggtatccatctgctccaaacctcccgccagcgcgctgcatcctgggaggccgggcggaggctgcgtcgaacgcagaggaggcggagcctagaagccagccaggagaggtggccaagggaggctgaggaggcggggccctggggagtgttgtgaaagcagagagcccgcgagctctctagggcggagctccgcgggggaagcgccggcgatctcgcggctggcgggggcgggaccgcagtgcgggggatgtcgcggggcgaggccagacgagaatcgaatgggacctaggctgagggcctggtcccgcctccagacccaggcgtccgcattggattgggcggtgcggcggcgcttctgtccgccttccggtgtcacgcgaccgcctccccctcccacccttctctgtctacctctgggcgggactgccgggtgatgagatactcggtcggcgacggtagaacgggcgacggcgacaaccgcaatcacatccacgacggtgatcatggcagaggtgaggagcctattgcaccgccgctggccccccggacccggaagccgcctctgaggcccggggaccgagcgcccgtgtgcaggtgggctgggttgagggtaag

SEQ ID NO: 43456 - DNA, 2300 bp, Homo sapien
agcaaatctcttaatctctctagacctcactttcttcattttaaaaatgaggaggttgccccaagatgacctttaagatcttgtttattgcctaatttctgcctgtattctgcttcctcccttgggcataaataaatgactattggggtgttactagctcattaggtcgaattctgagttacttcttaaaatattataaaccatgtattaacagctataatagttacatttctgtagaaagcaattgaagaaggatctctttattggaaccagctatattattagaaatgggaactctgggtgaaaagtgaatcaagtgcttttgcaactctctggaacaaagtttggggtgtgaagaaaattggcaaggaggtatgaaaagatttactgacaagtatttgaaaccgatttccatatttgttctatgtcatcaactgatgtataatctaggatggtttaaagttgcagggaacctctgctgagtactagtcaagatgtagaagcttaactcctttcacagtaaccaaaatgacaactgaggcaaaatattcactgagaatccactatattttaagacatgctagatggtttatgtttttttaaaaaatttaatcctactaactttattatttgcacttcacagatatgaaaacgggctcagaatagacaagtaagctatgtagtggcagggttaggattacaatcaatcttaaggtaggcaacatataaatccttatttaattccatatttacaataagttattccgtatgttttacaaaattactgtacaagcattaaatattcagttaagtacctgacaactcaagtatctgtgacatctggacacagaatgttcaaccaataaatcaattctggactcataggtactttgcaagatacagtttgggataagaacttgttccagcattggagggcctattttgtgggtagcatgctgggttgtatgaaagccaaatcaaacaaaatatccaaggaatttgtatacccaattaagtacacatcaatagtattatggcagtttccaggtacattttcgctagtgttgctggtgaaaggccagcagtggaaccgtggactggacaatgtcacccgtgttgtgggcctaacaagtatcctgcaagttccataaacacgagggcatgctaaaaacttaaccgatttccaacttacattaaccctttaaagggagcatgggacacaccacttgaccatttgaagcagtgcacacggcttgtcatggagaggaaaacctttgagacgtgcccagcatcattcctgtgagggtcgaaagggtccctaacacctcccacaaatacactcacaaacactccagcaaagttggggatgctcactgcacacctttcttaatacctggaacagagtacccacctgtcacatactcagcttcgaacctcctccgggtctcagagatgagcttggctttattctgggcgtgattctggatgggagacacgatgggaccttagatactacttgcatcaacccgcttaccctcaacccagcccacctgcacacgggcgctcggtccccgggcctcagaggcggcttccgggtccggggggccagcggcggtgcaataggctcctcacctctgccatgatcaccgtcgtggatgtgattgcggttgtcgccgtcgcccgttctaccgtcgccgaccgagtatctcatcacccggcagtcccgcccagaggtagacagagaagggtgggagggggaggcggtcgcgtgacaccggaaggcggacagaagcgccgccgcaccgcccaatccaatgcggacgcctgggtctggaggcgggaccaggccctcagcctaggtcccattcgattctcgtctggcctcgccccgcgacatcccccgcactgcggtcccgcccccgccagccgcgagatcgccggcgcttcccccgcggagctccgccctagagagctcgcgggctctctgctttcacaacactccccagggccccgcctcctcagcctcccttggccacctctcctggctggcttctaggctccgcctcctctgcgttcgacgcagcctccgcccggcctcccaggatgcagcgcgctggcgggaggtttggagcagatggataccgtatcgacgtggggcctccggtatgttgccgctgcgttgaggtaggatggggctggcgagtcttcccttcccaggacttcgcagagggggcgatggggctggatttcctccccttgtccccgcattgcgggagagagggaaggaagcgggcatcccg

SEQ ID NO: 43457 - DNA, 2300 bp, Homo sapien
ctcgaaaaaaaaaaagagtctgttactagaatactgtcatttctaagatgtgaatttgtttttagtcattgtcatttggaaagcttgcatgagaggagtggtctgtttaccaaatctactgtgtgctcttgatagtagtactctatcatatgaatgtttttcattactgaaaatttaccctctaacaagaattttggtttgataagatctctaggagattgagtagtgctcacagaaattcctaaaggattttttcttcctgtagccattttgcaaggaataggaggacaaaaatttgctacatttcaatcaaaactagtttaagctgaacttgtagtgactataaagatttggcatatatgtgtagaattttctttgatattagatactagtacttactagctgggccatgatttgcagaagcttttctttacccattatactgctatatattcacaactgacataggacattcacagactattttaaagtttttctacaagtacttactctatacccagatcattggaggaagaaaacagataaaaatgtgtaaggaaaaataaaaggcatgagaaacacaatatacatttaatcaaacttccagaaggaaaaaaagagtgatattagaagaaataatcattgacagttacccagaatttataaaagatatcaaatcctcagattaaagaaccataagaaaatctgagcatcatagggaaaaagaaattaatctcaatgcttattttagtgaaaccaaaaaacaccaaggacagagaaaatctaacaacccaaagagaaatgacacatccacaaagaaacaaaaatcagactgatacttgatttctcatcagtaacagtattgccaggaaacagtgaaataattttctgaaagtgctgagggaaataactgctcacttagaacatttattcaaaagtgaaggtaaaactttttaggcatgcaaagattgaccattgctggaaaaaaaaaaactacttgtctacttcactaataagtaaatagtacaccaaaggaagcagagggatgcaagaagtaatgaaaagcaaagaaatgggtaggcaaattagtaaataaaaaatctaactgtggatagtaagaaaaaacaaataataataagagtagaagaaatggaggtaaagtattacaaggaactttcagaatgaggatagagatactaactgcagattttgttgttttcagtgtgaatacttaaaataagggtaatcattgaaagatagaaataaaatgtttgacttccacaccagtggaggaatgaaaaggggaatggaggaaaagtcctctccaggaagaagcagaaaaggagaaaaaaagcagcttggttaccagaaaacacagaggaagacagcagaaagaattccaactttatcaatagttactataaatataaactgatttctgcatattagatatcagattagatttttaaagatcttaactgcatgcagtctaaaagagactaacctaaaataaattaatgtagaaaggttgaaaatagatggaaaaagatatacaaaacaaatattaaccaaaagtaatgttgtttcagcagtactttaggtaaaatgttacttagggtgaaagacattaatacatataaaaagggatactatttgtgataaaaggaaccgtaaaagggtataacacctaggaactaacaacataaaaaactacctaaccatataaccttaaaatactcaaagcaaaaagcacccagaatcataaggggaactcaagaaatctacaaacatgttgaatgattttaacaaccctctttcagaaatagaactagcaggcaagaaatatttaagatttagaagattttaacactacaatgagcaaatttgattatacatatatatgtatgtgtgtatgtatatgagtatatagactctcctgcccaactagtacagaatatatactttttgaatatatatttgtactttcagagcttttgcaaacattcaccacatactaagtcataaagggggtctcagaaaattccaaagaagctacatcatacagaccatgcccatacattattaagcaactacatcagaagtcacaataataggtacttaaaaacatgtcatatgataggaaactagaataacacacctctaaataatccatggattaccaacttctcagcaatggtgtaaattcttctgctaaataacccgtgggttaaagaggacatcacattggaaattccagagtacttaaagttaagtgtatcttctaaaaacctacagcaaat

SEQ ID NO: 43458 - DNA, 2300 bp, Homo sapien
gtaagaaatcacatagagatctccagtgcactttgcccagtttccctcaatggtgactttttgcaaaactatagtacaatattgtaactgggaaatcaacattcatacaatctactgatcttattcaattccccggttttacttgtactcattcctgtgtgtgtcttcagttttatacaatttattacatgtgcataagtatgcctttgacttagcatttccactcttaggaatctctcctctagaaatatttgcctatgtgcacaaagccacatgtacaaaaatatgaactttagtcctttcatagtactaacagaaataatgacattctgcttgcatcattaggagcataattaaatacttctggcacaatatggaatgctatgcaacagtgaataaagacaggagcatacctataaaagctgatatggaaagctctcacagacaaaataagtgtaaaaagcatagaataatagaataatataggggccgggtgcggtggctcacgcctgtaatcctagcactttgggaggccaaggaagggggatcacgtgagatcaggagtttgaggccagcctggccaacatggtgaaaccctgtttctactaaaaatactaaaattagctgggcacagtggtgcgctcctgtaatcccaggtactcaggaggctgaggcaggagaattgcttgagctcaggaggtgaaagttgcagtgagccgatatgacaccatggcactcgagtccaggtgacaaagtgagaccctgtctcaaaaaaaaaagaataatataggtacatttatgtggaaaatgtaaattgataaatgtgcatacatgtgtatgcatataaatgcctttaaaaacgtgaattacacccctcaaactgttaataacagccaccaaatgttttaactgagactccgtaaatctaaaacatctaggcctcatctttggcattaagacaaatctgcaatcacttcacagccagtctatgcttgagacttaactcagagccttcccccatggggatgaaaaatcctcttctacctggaagagaggaatggtgggagtctagaggtgcctgtcagcctgaagtagcacccaggggtgtgaggcaactgggtttatctgaaaagacatggacacagtacatccaaatttttttttttttgaggtggagtctcgcactgtcgcctgggctagagtgcagtggcatgatctcggctcactgcaacctctgcctcctgggttcaagcgattctcctgcctcagcatcccgagtagctgggattacaggcgcctgccaccaggcccagctaatttttttgtatttttagtagagacggggtttcactatgttagtcaggctggtctcaaactcctgacctcgtgatccgcccgccttggcctcccaaagtgccgggattacaggcatgagccaccgcgcccggcccctaatgttttgtataagcaaaaacagcaaaacgttaacaaaataaattttagtaattcacaatgaaaagatagcaggtctcttccacatctcaggccacctagcaatccatttttccaattgcaaccgttcattatttatttagaagttaaaatgagtggaggaggggtgaggtaggacatttagtgaaattcttgcagctgaaaggaacaaatggttctttccaaaggtacattttttgtaacatatagacacatttcccataagaaactcccagcacaattgaaagcacatgtacagatggccagggcgtgctgtgcatgttactgtgcaagcaattcagcagggctgctgcaaaaccagctttctcagctctgggtgctcgggcttgtctccataacaagctaccatgtaacaaacggatctcagcagggtgaacaacagttgcagaaagtgagctgtttccttcacccccaccctgctcccttcactctcaaaagttacaaactgagtttccttcctgataaactccaaggcttcctcactgattggtctcagtttgggaaaggacgtgacatcagcaacttcgcagacttagggctggagggttcttgtggcctctggcgggcctccagccagttaggtaaaacgtgtgtgtgtgtgtgtgtgtgtgtgtgtgtacacgagcgcatgcctctctctgatcacaggtagcactcagattaccctgcctgctctgtgctttgctgcagaccatttgaccagaacgtgtgcagctcagccagccacagaactggaatttttcaggagcagggggagcatggagtttggactttgctgagcaactgaa

SEQ ID NO: 43459 - DNA, 2300 bp, Homo sapien
ctactaaaaatacgaaaattatccaggcgtggtgacgcatgcctgtaatcccagcttcttgggaggctgaggcaggagaatcgcttgaacccaggaggcagaggttgcagtgagccgcgatcgcaccattgcactccagcctgggcaacagagtaagactccatcttaaaactaaatacatacatacgtgcatacatgcatacatacatacatacagctttagggtaaattgtcttttttttttttttttttgagacagaatcttgctcttgtcacccaggctggagtgcagtggcgcgatctcggctcactgcaacctccgcctcccaggttcaagcaattctcctgcctcagcctcctgagtagctgggattacaggcacctgccaccacgcccagctaatttttgtacttttagtagagacgggggtttcgccatgttggccaggctggtcgcaaactcctgacctcaggtgatccgcctgcttcagcctcccaaagtgctgggattacaggagtcaaccaccgcgcccggccaggtaaatggtcttttttaactggtcatattttagatttggatttaatcctctataaacttcagaattaagagaaaatgaaatgctccagggagtagtatttcccacttagaacatacagcatatttgcacttcttttgtatgtcaaataacttgctttgtttctgtggaagccaagaagtttctatctttccaaccctgctttctaacataaaataggaaaaataggggtttaggaatataaaatgtttggatatgaatcttatctgttagatagtactgagttatgtagttctagaactattggatgtttctggttagaaggaagtttctttagtttatttaacactgctgtggagtcagcacatgcagtcgccaaatcagttagattagaacctacagagatctcggtaacaggagcactgagtgctagaaggtttaaaatagatgtcatatgataccaattataactcagtgaaattttacagtcctaggaccctatacagagcataagccaaaatggaagatggtcctgttttctatggctttaaaaacatttttattacaatgtttgctacgttttttttctttaagcttttaattaaagtttttttggctctcctaacccatttctatatcgtcaaaggaaatagaaaagaagcggctaggatagcagaagagatctatggtggaatttcaggtaaaagtacatgaatttgttcctaatatttaaagaaaatccctcctagataattcatatgactagtatttctggaaggcagattatatttatactttgattttaagtgggtagtttgaaaaattgtcacttaaagtagcaaatgctgttggctgcatcaatttgtggaggattttcagctttattttttgcaagttcgtagatcttgtagcagttgttatttaagaagtaaataggtagtggcttactaagagtattttgagaaacttcatttctactagccaaagtaattacttgtatataattattttctttaatattttaaagcaaactttaacaatgaagggcattctaaccagactaaattctctcaggaaatagaatgactaataaattataattaaagcagcaaacgtggcaagctatgtgtattttttttgctgtcatttgcaactggaattgattaaccacttgtcactgtcaggaaaagctcttcactaaacccattttatatggtagcatgcaaagcactccaaacaaagtttattctaacatgaaatgccaagatttgggcaaaacattttaaattctcatgctttgtagagaatagtgtccatttctttcaagaaatgatttactttaattgtggtgagatgctacaaaagtaaatgagtcagatatccctgtcactcctgggattgtcacttaatagaggagtatttattcataaacagagttcagaatttccccgtgtatttttagtgtttgcaggggttccaggattacatcattctttatctagtatccatttcaatttgcatccaggattctctttcaaaatagtcttatgtgattccaatacactagacaactcagaagacactagacaacagcagtcttatctaaagaaataagacctccaaggacgaagcatcagaatgcttcaattaactggggaaaatgagaagaattgtgaagtttcagaacgtatcagaaggtccggaccatggaaagagatttcttttggggattatatttgtcacacatttcagggaggtatgttac

SEQ ID NO: 43460 - DNA, 2300 bp, Homo sapien
aatagtatagacacccatttgaaccttaataaagttgagcttttcatggccaacttttttggcgtgtaaaacataggacagccatgttttaaatgaaaagaccaaaacaagattgaataatgttatagaacaatgtacatcactggtctgacatgactaaatgattgcctacttagagtataattgaagaaagataaatgaaaaggactaaaagagttgtattcatgtattttcatacactggcattctaccaggtaatataagctcagtaaagtaaatcttatgttaatgtctgttccttgagagttaagacgactcaaggtctttatagtgctctgatacactgaaatcgatgagctgtatgttgtgactcaagattgtattcttacatgtcagctttttaatgtagtgaaacagttcttaaccaggcagtcattctaatttgcctgcatgctaggagaaattcccatatttttgcataaatcatttgttaagatttattaggccacttgtataactatattttggcttgtcttttcaattgatttttaaaatttacaaaatcgaacatagccaagaatgaaggcagagacctagagtgatgaggaaaactaaaaataaacccatttcacttgtgttggccagctgataagagaaaattgcccaactagagaaggttgattcatgaaatatttgggtacttcatccagaacctagggcatctcttttgtccatttcactatgactcttccatgatcaaggatagcccacatttttcagaaatgggcaccacctttaccaatgcttgaaatgcaagtgaatgatcaggagggaaccttgccatgggaccttgtcccagatggaactaccatggcgagtagtctgatgcttctagtgtgacacttacttggagaggcatccaagataggccttttattaaatacaggcttggccgggtgcagtggctcacacctgtaatcctagcactttgggaggccaaagtgggtggatcacctgaggtcaggggttcgagaccagcctggccaacatggcgaaacctcgtctctactaaaaatacgaaaattatccaggcgtggtgacgcatgcctgtaatcccagcttcttgggaggctgaggcaggagaatcgcttgaacccaggaggcagaggttgcagtgagccgcgatcgcaccattgcactccagcctgggcaacagagtaagactccatcttaaaactaaatacatacatacgtgcatacatgcatacatacatacatacagctttagggtaaattgtcttttttttttttttttttgagacagaatcttgctcttgtcacccaggctggagtgcagtggcgcgatctcggctcactgcaacctccgcctcccaggttcaagcaattctcctgcctcagcctcctgagtagctgggattacaggcacctgccaccacgcccagctaatttttgtacttttagtagagacgggggtttcgccatgttggccaggctggtcgcaaactcctgacctcaggtgatccgcctgcttcagcctcccaaagtgctgggattacaggagtcaaccaccgcgcccggccaggtaaatggtcttttttaactggtcatattttagatttggatttaatcctctataaacttcagaattaagagaaaatgaaatgctccagggagtagtatttcccacttagaacatacagcatatttgcacttcttttgtatgtcaaataacttgctttgtttctgtggaagccaagaagtttctatctttccaaccctgctttctaacataaaataggaaaaataggggtttaggaatataaaatgtttggatatgaatcttatctgttagatagtactgagttatgtagttctagaactattggatgtttctggttagaaggaagtttctttagtttatttaacactgctgtggagtcagcacatgcagtcgccaaatcagttagattagaacctacagagatctcggtaacaggagcactgagtgctagaaggtttaaaatagatgtcatatgataccaattataactcagtgaaattttacagtcctaggaccctatacagagcataagccaaaatggaagatggtcctgttttctatggctttaaaaacatttttattacaatgtttgctacgttttttttctttaagcttttaattaaagtttttttggctctcctaacccatttctatatcgtcaaaggaaatagaaaagaagcggctaggatagcagaagagatctatggtggaatttcag

SEQ ID NO: 43461 - DNA, 2300 bp, Homo sapien
gagctttaggatggcttctcattgtatagttgtttgttttctggagccttggaaatctcatttgtaaagctgaggaagattttgactagatatccaagattctttttagctttaagtgtctaagaatgtacagtagtactaaatattgagtgggcatttcacattaataaagctttaggggacccctgagataaacatttcgcactttaaattgagaaaatggtcccagatacagcccatctctagtttagcctttatctttagacaccgcactgaagggagggacactcattgagtttgaaaggcctgcataactgatagaaaagtttaaaaagtgaagggagcagttacataatcaccctctttggtttttgtgtttctgttttttgtttttgttttgttttgtttttttgagatggagtctcgctgtgtcaccctggctggagtgcagcggcgcgatctcggctcactgcaacttcggactcccgggttcaagcggttctcctgcctcagcctcccgagtagctaggaccacaggcaggcaccaccacgcccagctaatttttgtatttttaatagagatgaggtttcttcatgttggccaggctggtcttgaactcctgacctcaggtgatccacccacctcagcctcccaaagtgctaggattacaggcgtgagccaccgcacccggcctaaataatcaccctctttgaataaggaaggagaacatgtgtgcagcatgtgctctggtgacatttgaaaaaggtgctctcaaaaagatagttcgagctccgggtgtgttttagtgtaaaccacaaaggtaatgctagcaaaactttgagagtaattgaatcagtggctaagctatagagcaggggttggcaaactttagtagaggaccagatggtaaatattttcagctctgtgggtcatatggtctctgttgtagctactctgctcttgtagcacaaaagtagccattcacataaatgaatgggcacacctatgagcctataaaactttacaaaaacaggcagtggaccagtataaccgagtttggatcctggcctgttttagttgtctgttattttttaccaaaccaccccaagacgatgtaaaacaatagccattttggtatgtttcatgatactgcagtgagctaggctcagctgggtggttctcttggtcttgccagtggtcactaggaggctgcatttagctggtaagttggctggatggctgggcctctggctctttccatgtagtctcagagctcttccttctccatattatctcttcccttgtccctctagcacagtagatggattccttacactttggcttaggatatctaagagtgcacaagtgaaaaccaccacaccttggaaatcaccacaccttttttaggccgaggccaaaaatttgcacatcactttcactaccttctatgggctaaaccaggtccaaatgcaacgggaagggactatactatagaagggcataaataccagaagacatgaccgctaatgaatcagactgctacattgtgttacctctaagcactgaataactgaacaaatttcttaacccctttaagctttagactttccatttataagatggagttgataactcatggagttttggtgaggctgcaataagatatagaagagtcttagcatgtagtagctgatgtatagtggccatttaataagtattaatagaagctggtaaagtataagagtaaaggggaaatatataaatgtgtgtatgtatgtgtgtatatatacttaattattggaagagactggtttgttaacgtggtaaaccatgatatgctgtggtgtaacaaacttactatttaaagttacatgtagcagtatttttagggcaaaattaagacatggtagaacctagttttgttgtatgtaaatgccaagcaagtaaatgtcaaatgagtaaattgatgatttgctttatttttaattctggggaaagctaacaaatttacattaacattaaaacaatatctatatctggatttgtaatatggaatgtgttttgtttctgagctgagatcctgttttactctttttcaggtaatagaggacacatctcttaactgggttgctctaagaactgatgtctaaaccgtctcagcatggcctgtagaggaggagctgggaatggccaccgtgcctcagctacactctctcgggttagccctggaagtctttacacatgtagaacccgtacccataatatatgcatggtatctgactttttctacccaaatatg

SEQ ID NO: 43462 - DNA, 2300 bp, Homo sapien
tttttagaatatagccttaaatggagacctttacttaactgactataaatgaagtcatgtacccaggtgagattatgaacccttgggagtcggaatcatgatttatttatcttttaatgctcagtgcctaggacagaagctggagctttaaataaatgttcaatgttttcagactttgttggaacagcctgcaggctcctcaacgccctcccccacagagactcagcaacagtgtgcctctattaatatctatttataaaggtcagcctattctatatttgaaacacaaagaaccttttaagaaaggtggatttcttttgactattgataacatgtacaggaaaagctagaaaaaataaaaagctgttgaaacacagggactatgcttaatatttcttgtattccccacaaggccttttacagagcagacatccagtaaatgtttgatgataaaaataagaaatatttgttatattttgaaaaaagattcatggtggaatttcaaacgtgtactgtgatcagaactatggcaggggcaaaccaggggctcaataagtgaggcttaaccctcatttataccttccaggatttctacccccactctttgtcttaaaacctattacaaaaatggaaaggaggccaaatgctgtacctatctggtaatgtcgctgttatctgtgaaaccaactacaaattataaagcttaattaagtgtccttgagtcttcatcactgtaattctccgatgcttcatcaatattaacacagggcaaagtatcgattgctactctagtcttactcatcaactcattaattcgcttcaaatctcacaactaaaatgctctttcaatgatgttattgcactgtaatttgtataaggtacactccacgaaatactgtcaatacattttattgtgagcatctaatatgtgtcagggagtgtgctgacattgggtaaagaaattcatgtattaaactaaaacttcctcaacatccattaccaagaacagatcctgcctcagtttactatctggcagggaaggcagacatttaacaagcaaatacaatttccgttttcagaaagaagtccatgtgagatctcaagagacaagtaatcaaggatcagggtgaggagggagaatgcaatcaggcaaacaacttgaatatcatctgataaatgttatactttggccagcatgtggccaaagtactattaaaattaaaaagtgagagtatttcattctctggaggcttggggaaagcatcagaaaggagcagacattttcagggatgaataggcttacactaggcttaataaaatgggtgccagtaacggtggctgtgatggtactcagaaaggaatttcttctcgaaaacgcacgtatggcagggatgggggattccaagtaccagctgtgacgcatggatgaccgtcataccactctcactgattctttagcttcctagtcaagcaccatcgtaactagttgaaccagtcgagtgggagttgatatttcagatcagacctcgtatgtttccctcagagtgtagaattgccatataaataacaggatgtctagttaaatttacatgtccgataaaaaacgaatgtgtagtgaagtccccaatatttggtacatgcttgtattaaacatcatttgtgctttatctgaaattaaaacttcatagtttcatctgttttgactttttgtgtatttttatttatttatctggcaaacgtcccagagcggtaagaaccggcacggttttgccgtggcacagctgattacaaacaaaaagtctctccaatcagaagcaagcgcgcagagaactggcgtccggaatagagacgctgtaaccaggaaaccagggtgagcacccaccctaccgtcggccgcttctaggagacgggcgcaggcgcgcgctgacgttacatctcgcgcttaagggtggggacgacagagcgtctctctcggacgtgacctcagcgcctctttgtgattggctgcctcgggggcgcggcccttgggcgcggacgccctagattggtgctgcggaacagcagggagggactccggctgcagccgcgggaggtccggacactggcggccatggaactcaccggtgagtgcgcgtcgcgccgcccctctccagcgctctgggccgctttcggatggggctgttctgcgcgcgtgggatcgtggcgggtggtggagggggtgaaaccgacccggttcgaagcccggaagttgggtcggagggtctccagagtaggttggggctgagggtgcgtttagggcg

SEQ ID NO: 43463 - DNA, 2300 bp, Homo sapien
ttgtaatgatttcttttcatatctgtgtgatagatttgaatccttgaggagagggagtctgccatttatttgtctttcatctttatgtctctagcttctagcacaatgtctgtcatttaatgggcattcagtacataatagataggtaattgaatgaatggatttagatgcctgggtgttttctttctacttgtattctattccccacatcctctccaaagatttcagcatcatcaagacatattatcctgtgtcttccttctgaagatttaaattatagtgatcaccaaatccatgttgatatgataacaatggttaagaagtttgaatatgttattttctctaagcaatacagttgtatattaatcagaatctcccagagaaagccccttagagcaggcagttccataaaaggaatgtcaggaacttctgcaggctggatgaggacatacactgagtgaacaagtctgtcaactgctctaaagacactgtcaatgccatataaaagctggccttgttcatctagcagatcatgggggtgagacagtccagtgcctctctgcccctacaatatatgaagaaaggggaagaaacacacattgcctcctggtagattaggggaggacttcttgtacatttttagcaaaatccgagttcagacccagcaattagacaaaagggtcagcaaactatggtcgatgggctacatctgcccactgcatgtttttgtaaatgaagttttattgggacacagccatacctattcacttttgcattatctatggctgcttttgcactttgatgaaagagttgagtagttgagacagacactgtttgacccacaaaatctaaaatacatactatctagcccttcctagcaaacatttgccaacccctagaaaacttttaaaaaatgatgctcttcgacttgaaatttttataatcttctgtttattgtcaataggtgctgctgattttcaaaaaatgacttagaatcctcaaataagtatacagccttatatgctgcttagacaccaaagctatgataagatttgtcagttctttgtatcagatgggttcaattcttgacatcagctaatgttataaaaataactacaaaattggttgtaatagaaccaaatctaagactctttttaataaaaaagatcaccattgctggtgagaaacctatactgaatgggtgagatgccattgcatttatctgaagtttcgtctttataatcaataatcatatacaatcctagtcaagaaactcatcttacagtccttggggattgaacactgtgaaaataaacttttactcttcggatgtgcttggattttgttttaaattaagaactacagaaatatatatcatttctagtggtagaggaaaatattgccacccagaactttctgaatgtctctttctgccctaggtccatttgtgatgaacaccaatgaagagatttctcaagctattcttgatttcagaaacgcaaaaaatgggtttgaaagggccaaaacctggaaatcaaagattgggaactagtggaaagcggaagagcaggtcttgatgtgtcctagaattttgccatttctgagattgagccattgaaggcattccatttctaaagcttatttagccggtgcttctaaagaattccacactaacgtgataacatggtttttgtaacaataaatgtaggatatttcctggcacatgcaaataaacctaatcattgtttctttaaaaatcagtgtttttcatttgagatacctaagttactaagcttctgtttaaaaagtcgttttgtgtatgtttgcctttttttgcatgtatggatggatgtttttattatttttgtgcatgtgcaggttttaaaaatcatatttgattgctttctgtgtgtcattggcagcagatgcatgagcatctgaggtcccttcttaagcaatcccactgagatacaaaggtcaaagctatgtgctggggtttcatgttacaggttatctgctttaaaataacggcagccctgaacatttgagtcagttcttaaaactgccctgctattggtagggacgcaacaggattacagccaagacttctctgcattttctgccaaaatctgtgtcagatttaagacacatgcttctgcaagcttccatgaaggttgtgcaaaaaagtttcaatccagagttgggttccagctttctgtagctgtaagcattggtggccacaccacctccttacaaagcaactagaacctgcggcatacattggagagatttttttaatt

SEQ ID NO: 43464 - DNA, 2300 bp, Homo sapien
ggaaaaatcaagcaactctaaacttctcattttaaggctatagtgattactctagcaaataaagattaaaagataccaaataattagtaagaatttaaaattacctcaggaacacggcaacattgttatttgaaatatataatttagcacttaaagcgtaaaatgttgtgtgtcaggacatgggctctttttgtgtaatctatttggattcgacatccattttgtatgcatttgggaaatttatctgttaactccttcaagaaatatctaaatccacaataaaaaacagagtggaaatattgtaagatataaagaagaaagaaaaaaaaatgcccaggaggcaagagaagagaaaatatttatgaatttctcagcatatacatcagatattgctgttttacacaaacaaaattgttctttcctcctctatacaagcactcatcgaataagtcaaagccagattgtttttgtcgtctatgtttttgctttatcctaaggcataaaaagtagacctaaatagtcttttttcacatgaaaattcaaaaatttgttttaaaaatcataaacagcaatggttattattttgccctacatatttgtatatttaggacataatcataagatatcaattcaaatatataaaacctatgatacaataattttaaaataatatattgagaaggtaagtgcaccaacaacattcattgaacaaatactcactgaagtcctataatgtcctaggtactgtgttgggagataaaaaagtggagaagacagatacagtaattgtcttcatgaagcttatattctcatgaggaagacatatagtaagtaggactggtagagttgaaagtagaaattgagtttgcagagccaagccccctcctctctccctcctcttgagagtcagcctatccacagaaagcaagtgtcctctttctctttgtctccgtgagagggactagcacccgtggtggtagcctacaggggtctagcacagctggtgagatctgagtaagtctgccttattttcaggtgcagtattcagaagcccacctgcccgcagatataagccaccttctccagtatcagctttatcagaaataaaggtatttttgtctgccatctttcttactcctttatcttctcaattggttgagaattcaggctgggagaacaagttattatttattatgcctcctaatacctaaactaaaagcaataaaagccttgctactgtcatgttgttgacgtttttatattgcagatttataataaactctcctcttcctgagctaactttattggatgccagttcttgaatcaaaatatttatagagcacataatacagtgcaaatcagggctggctgacacaaggactctccacgtttcatcctgcagaataatatcattgaggtatactgtgaacagaatagcctaggcagggcctttaccccagcaggtcacaggcagatggctacaaaaattagaggttctaggtttgaagtctaaaacccccatctgggaactcgctatggtaatggcaacaatgcaacactggcacagggatagaagagacccatttgtatgggaaattaatatatgaaagtagcaatttcaaatcagtggggcaaggatgtatttcccagtgaatgatgttagaacaaatgaccatatgagaaaagacagtaatcccccactacatacaaaaacatgttccaaatggatgaaggatttaaatgcaaatagtatacttctgagatttaaatctaaggaaacaaaaaaaacaagattttctgcacaattccattctctgcaatatttactgcaatagcaaaagacagggacattctggatgataggttaataagtaacgcaactaaattacagtgtagccatataagagaatactgtgcaaccgttaaaaagtgatatagatctttatttattgacacagaaaaaaatgaaatattatttaattggaaaagcaggttacagaacagcaattctatttaaaggggacaaataaaacaatgtatttaaatggactcatttaaataaaattatcgagttgtgttagtatgcatggaggtgcccggatgaacatacatcacaatgtgaacagtggtcatctccagatagtagaatttcagatatgtttctttccatttttctgacagtttgaattttctgtaataattaattgacttttatacaatggaaacaacttttttgttttggaaaaaagaaagatgctgccgctaatcagtggatgaaagtaagtgatatagtttatttt

SEQ ID NO: 43465 - DNA, 2300 bp, Homo sapien
tttctccattttggtcaggctggtctcgaactcccgacctcaggtgatctgcctgcctcggcctcccaaagtgctgggattacaggcgtgagccaccgcgcctggccccatgtacttctataatatgtatctttgaaaagaaattcaataagttttacagaggaggaaaatggaattcgtgaataaaaaagaaaagagtcaaggtacctaaataatgtggttgtctttaaagattataatggtgttatttggaatcatttagggaaggctttgttcattgtcatatcagcatgagttttctttatgcttcccaagattccaaaggtgatcaacagtccatctacacactcatatatttagccacctactccacatcttgatctggatgtcaatgacagtgtgaaaagtgctcaaagcttaatatacagggtcacatttctcatctcaaaacaggaccctgttacagtgaaacattatacgccctttgttcatttgtaagaattcttccctctctcacctttgtttctcctcattttaagtcttctaccttttcagacttgttcttttttcttttcttttcttttttctgcaggggcctgtaaatggaattcctgcattgctctaaccatgtacaaccttggacttagcttttacctgtaactggcttctgagagacaaagaggagaaacgttcactcctagtacacctattacagctgcagaggtagaggagacagttgcagaactagttacaatgacgataagaaacaatactttgttattccatagcacctttaatgttcatgtgtattatctcagctagccttgaactgcctaagtaaggtgatgaggacgggtttaagccccactgatattttaaaagcccagagaaaagtgttcgttcctctactaacctgttcttttagagcagggatctgcatactaggcctgcagccaaaatgagtaggtagcccactacctatttttgtatagccagagggctaagaatggtttttacattttaagtggttttacatttaagatcaaaagaaggataatatttcatgacaagtaaaaattatatgaactcaaaattgtatgaattttatgaatttatatttcagtattcataattaaagttttattgaactacagccacattcatttatttacatgttatctatggctgctttcttgctacaaaggcaaactggagaatgtacatggcctgcaaagtcaaagtatttactatctggtccttcacagacaaagttttccaaccttattttagagacaccactgtctttcctttctcaaaaccaggcaatgagccttctggtgtttagagaatagaaactgcagctatgcctgtaccactagttaataatcctagtaatcaactagatcccctcactggcttgtgccagctcctcattcttctggaaaaactctccaacgcctgcccactgtgttccaacaccatacaaactcttaaccaattatctccccactagagtgtgccttctcttcaggcaggaataaagacgtatggctgcccgtccccactcccgcactccttttctcgcaattctaactgacaaacagcaggcaacttatctatggaacaaacgattctgtagtgcttagaatgtgacaggctcatttaattctcatttcagcccgataaggctggcactattatcatcaccatcctcattttatagaggaggaaccagaggcacagagagactgagccacctgtcccaggtcatgtcaagtggtgcctcccagcggtggaggcagcactggaatccgtgccgccaagctccgccggctgggtgacagggagactacagttaaaaacagatttcccacaagaccgaccggagcgccgatcagagcacctgcccgggccacacatttcctcctggagcacagcaagtgccgcctaaattacccgagtgagcatctcttcccggcacgagaggcagggaggccaaagggccgccaagctggcctgggagaggcgtagggcggagcgagagtggagtgacattcccgagggcggagccccagggcctccgagacccgtagactcccgcctcccgcctcctctaggccgccggccgcgaagcgctgagtcacggtgaggctactggacccacactctcttaacctgccctccctgcactcgctcccggcggctcttcgcgtcacccccgccgctaaggctccaggtgccgctaccgcagcgtgagtacctggggctcctgcaggggtccactaggtgagggaatgctg

SEQ ID NO: 43466 - DNA, 2300 bp, Homo sapien
ctgtggcctgctaaaggcttgcatgaacaagcttaggagaaaattcctaaaattctaactgagtaaagatgacaatgcagagtataatttgagtaaatgaagtcatattatcgtaatagcagattgccaaaagttaggatgtaactaaactcatggaaaatacagagccaaagaaacaggagaagtagcagaggaagtgaatgaatagaataaagtaaataaatctgtgacattttgccttagaggaaaccactcctcccagctgtccttgggtgttttatgcccccaagaagggatggaaatcccaagagattgtgcccaggtgtttccacagttataccgactgtattagtccattttcatactgctatgaagaaatactcaagactgggtaatttataaaggaaaagaggtttaatggactcacagttccatatgactggggaggcctcacaatcatggtggaaggtgaaagaggaacaaaggcatgtcttacctggtggcaagcaagagtgcgtgtgcaggggaactgccctttataaaaccatcagatctggtgagacttattcactgtcatgaggacagcacggtaaaaacatccactcccgtgattcaattacctcccactaggtccctcccacaacatgtggggattatgggaactacaattcaagatgagatttgggtgaggacacagccaaaccatatcaccaactcctccttcccctaccctaagtttactttttattctagaatcgaacttttgccatattaccatatataagttgtgaagtaaatacaaatcgccatgtggaaaaggaaattaactagcagagtgtagaattaatttatttagccaggttgttgtgccactcttgccctgcttcacccttaattttttgaatgactacctactatattcctaaagaatggagagctatttggaatccatcagtgactttaatttgctattagaatgtaagttacactcttttgaattcttctgaaggactcctttcccttcccaaaattctagtttccaaactgaaatattaaaaaatatttctgcaagttatttttcccatactctactgtaattaaaccactatttgtggttccccccccccccacacagacacataagccccttgaagatgtgggctgcctctcttctgtttgctcttgtgtctccaacccctaacggaatgctcagcacatggcaggttctcaaataagacttgactgaacgaattaatagaaatgatgctaattccatgtacactcaaaagaatacctctttgaaagccagtagcttcactctcttctgccaacccaagacttcttcacatcatagatacttacaaataagttacagtaagcaacaatttataagtaaacacagtgtgtcaatgcatgccaaaaggatgattacttttcttggctatccatagcaggacataaaatatgtccttagatttattacagatggccagccggtatgcaccagagaaaatagtggaatgggggaagccaaaagttgtgagtctgtcataatgatgtcaagtgacacactttttcattgcgatctaggtgtaccataccttagcaaaaacaatctattttccatttctggatttcttaataacttaaactatataaataagctccttttccatcatatgaactgttcttacatattctctggccttcctttgtccaaatgttgagttgaagttttcattgcatattctctgtgcactttgcattacctaatggtttcctggctcatgtgagagaagtcagcgtcagcagtcgggttttgccgagatattttcttgtcctttccagcatagagctctacaaacaaaggcagggttatcacatgtacccgagagctgcctgggaaaagtgggagctatagttatcaaaattggaaactttatgaagtatgcttttgtctccgtttttgttgcgttcaatcagatcaacaagtgttggctaagtgttgagcgtggtttcctgtgggattgtgtaaggctctgtaggacaataaacgtgttgggggcactgagtaatgtagccatttctgacccggcagccaggaaaatgtgaaacaatttgcttctggaaacaggacagccggggccgtgttcctgcaacagcagaccaagcaccgcggcggacccaggcaagcacggaacaagctgagacggtgcgtttaagcggcaggtggctactcagtgtcgcatactatgcggaaaataggtttggttcccggtgttgtggggcctgaagttaca

SEQ ID NO: 43467 - DNA, 2300 bp, Homo sapien
cagaagtaaatagaaggagaaaggcaagcccaagcctgagcagaaaccacatggtttatcttagaagaaactgatctggaaatgaaaaaagcttgagtcatcaaggtggggtccttcaagactgttaggaagcctcagtagcccagcttagggagtggagctttgaaggactgttcctcttggatgggtacctcaaaaacgtgtggcttcaggtgtttgttacacgagaacaacatattacggactcaagtgcacagtatgtgaacccatctttgagaaaataagcatatgtacataaatatttgaaaagaaaaacatctagagatgtgctgtgtttttcttttccctgtctgtatctcttggctttatagaataaacatatattgcatatgaatcttaaaatgaaagcaaaaaatgtataaagggcaggattttgaaatgaacaattatgttgaaatttcacaagttatatttcatcagatgcaacaacgcttgtaaacccttggaggtttactggagaaggtgcttgagggctcaataccttcctttttactcaatgttcttcctttcaatacacagaggcaactttgtgaatttgtcagtggtctctgtgactcatcttattaattttttatataaaattccaaaaattctcacctttagtgtgatgcacataaaagttttatttttcttttcttcttctttctttattattattaattttttttggaagacagggtctcactctatcgcccaggctggagtgcagtggcgtgatcctcctgcctcagcctccctagtagctgggactacaggtgcatgccaccatgtctgctaatttgtcaaaaaaattttctagagacaggatctcactatgtttcccaggctggtctcaaacttctgacctcaagcgattctccctcctcagcctcctaatgtgcaatatgctggggttacaggcatgagacactgtgccctgcctaggtgtgaaagttctatagacagaaaaatatgtataccagcacatagtactgggaaagactgaatagcaccttggacattgggatttttacatttttaatacagtgttgttaatgtcacaaatcaattcagcatctaaaaaaattaaaaagtaaattttctattcaactaatcagatctatttaattagcactctgctttgaggaatgatgtttcagctgtggatataaaaaattgacaagagttttcacagttttctccttctgcttcattagtaaaatacggaaatataaaaggcaaaagtaccctacaaccatgtccaatgtgatattgcctccccaaaggaggctttcactcaaaaaaagtagaccctcattgtttccataagtctccgagcaaattctcttccggccacagactttggatgtagaaaataagcttatctgggcaggtggatatgcagagtttgcaatggaagcaaagataaaaggaaggcatgctactcttacctccataggctctactctaccctgatctctgccctgtctttgatcactgggcaaagaaaccagtgaccatggcaaatagtacccattgtactcagaagaaacccattatacttttgtgaaagaattatcctttttaaatagctaaaacaatatcccagggaaaaagtaaccaagactttattatattgaatggataagatttccactacttctgtctaaaaatcaaataatgcccttggaggacattttaggaattaataaataatcttttgttctacatagtaaataataaaagctggttttcttaattccactttgagagttgtgtggtctatgttaggaggaaagctggctggagccaaccatggttaattcaatgccaggctgtatttcttagtctccctttcatttcactcttctgccatagtgggtccatcatactcccaggccagtgagaagtgccctctagtgattggatgggttcgcttggcgcccgcctccatgcagacagagcaatgcctgtgtgggtgcttcctgatcaagactgatgagtgggatgcaaatatcttctttttaatgcatgaccctggcatagccagagggaatatgagtgatggtgcctcaaagcagtaactttttgcttagagcttgagagtcaaagttaaggacccacatgtatacttcggctctagcgagtctaaggtgagtaaagccttcagattatcaataaagaaagattttaactattgggcatgtgaattcaaataacgatgcaatttcacaaagcaaagaagaacataagaaagtttg

SEQ ID NO: 43468 - DNA, 2300 bp, Homo sapien
cactggaaaacaagaacaaacagattagcttgctgtttacaaagtgttatttttcatttgaatgtcaagtttttcttttacacttatagataagtacatttctgagaacgtaccataaaaatagtaaaaactgattttgtccacaaggtacagacattttgctacaaaacccacaacttttgtttgactcccatcggtaaacctacactcaaggtgttaatttcagtttacatcaaactaaagtaaaaggacccgtgaacccaatggttcctaaagcatggttgcctgaccagcagcattaccaccacctgggagtttgttagagatgtaaattattgggtttcatctcgggcttcctgaatcagacgctctaggggtggacccagcactcagtgttgtaactaacccttcaggtgatacggatgcacacttacattgaaggtcactgacttaatgaatagcaagaatctctggaatattaagaataattcttgaggagtatcagattataaatgtgtcttacgagtccctctgagcagtgtctttcttctgaatttgcagtatgaatggaacgacaatgaaatgtacctgttccgatcatctgttgcatatgctatgaggcagtactttttaaaagtaaaaaatcagatgattctttttgggtgagttgatttgctgggttctcaaattactccaactaggatttctcttactcttgagtctgaggagatactctgcctaaacttttcttcaagtgaaattgataaaaatctcctagtaacttatacttctttggtattgtggaatttgggtgactccatagagggctgatcgtgccttatttgactggtaaattgcaagagtattgttcttactaaacagctgtcactctcttctcagaatgctctcatacaccctcagcactgaaagaaaaaaaaggcagaacttcctgccttcattgacctatattctagtatgtatgttgtgtatgtgtctatgtgtgtaatatgtaagtgaaatatagagttacaaggtactaagtgctaggagaaaaatataaaagggtctggggagggctggtgtgtgtgtgtgtgtgttgggcagggggtaggtcaattttaaccaaaatggtcagaaaagacgtcactaatacttgaacaagtatatgaagcaggagagagggagagagagagcgagagagcgagagagcgagagcgagagccagcaatgcagacaatggggaaagtgtctcagctgggggaaacagcaggtgcagaccctgaggaaggaatatcctcagcctgttaaaggaacagcaaggaggccagtgtggctggagcagattagaagacaagtggagacatggccaggacgatgttagggcatagaggaaggagggagagacaaaaggtcatgtgggccttgaaggccattctaaggactttggcttttattctgagttagatgagtagtcactcaagggctatgagccacatgatctaccttattttgtgctaggatcgcttgacagctgtgagagcacagtcctgtcacatcatatggtagaccccactcattaccttcatccatgggtgcaacacgacgttttctgctgggtaggaccaggttgtgggtgtaaatccgtgtgtggtactcagccatttctgcccaccacattgtttgccacaatcctgggccaccgattattccttgttgattctcctgctgttttcagtttggaaattttctataattgaaaaagatgtgggttttatataaaggcagaacaaatagtgccaaaacttgatatcacaatttttatgtagttgatttcatgtgctttgggcagcattaatgttttttttgacaattacatcctctcattgtttgccctcccccatgtctctctatcctgtgattctctctctaatctccttttcaccagcaggggaagtcttcattctcttgattgtgtcctctgtgccacaagtgaagatgtttgttttgtttctctacagggaggaggatgtgcgagtggctaatttgaaaccaagaatctcctttaatttctttgtcactgcacctaaaaatgtgtctgatatcattcctagaactgaagttgaaaaggccatcaggtgacattttactttcatctaagggtgagggggttaccaaatacaacaacaataaccagtattttgtgtgttcttcctgtgtgccaagcattattctgagtcatttacatgtgttacctcatgctacaaactccacgtaattccagaaggatcccacagcagggg

SEQ ID NO: 43469 - DNA, 2300 bp, Homo sapien
agctttcagattttatatcttgctttctccatttcagtttgatcaagttaatcgtattttctgcctcagcgaattgaatttggactactcccattttttccactaaacccacgtgtttcatttaggaacttacctgtgtagaaatttatttccgcttttattacagtaacatttcaaccttttcttcagatactcgtgtgctgtcctctttcttgcctgttttttctcctattgtgtgcaaggagtgagtggatctaggtttcctggaatgtgggaggagcttttctgaaatttctgcactgattttttttttttaccctcatctcactttcatttaaaattctttattattattacttatatttgtgagctgctttatttttttaaaaggagagtatattttgattcacatcaagggaagtaagagtccacctctttttgatgcagtgtaactaaatctgtcatcttcactgaggcacaaggccctctgtcacattttatctatgcctccactattgcttttagactgttgactacaagttagttaagagcctatactctagaatcagaatacatagatccatgttctgattccatcatttgttagctgagtgagatatagcaatttacttaaacttagtttcataattcataaaatggtgataaaatatttgcctataggtttcttgtgatgctcaaatgagatattataacacaaagcactttgaatagttacttataattgtttttttcctattctacaataatatacacaactttggaataaggaaaagcagtggacatttttttaaaggcttgattattgcaatgtcacctgaacctggaagacttgtttttctgggtgaagaaatattttctctgtgtcagagtttcacaatcatcgtcaggtaggcccttgaaccctgccatttaaagtgctcctctctttgatctgtggcactcatacatacactctggcaatgaggacactgagctcgcttctgaaatttgacaagataaccactaaaatctctttgaattctatgttgttgtgatcccatggctacagaggatcaggagttgacatagatactctttggatttcataccatgtggaggctttcttacttccacgtgaccttgactgagttttgaataggtaagtgaaggagaaggaggcactcaaagaagtcagccacagaaccagtgtgagaaataggaaatgagcttttttaagttttgcaaaggcagatcaggagagttgacctgtggagtggagagtagtcataattttaaaaaatggccatggaaattaaaactgatcagaaatggctgggcacagtggctcacgcctgtaatcctagcactttgggaggccgagttgggcagatcacaaggtcaggagatagagaccgtcctgactaacacggtgaaaccccgtctctattaaaaatacaaaaacttagctgggcgtggtggtgggcacctgtagtcccagctactcgggaggctgaggcaggagaatggcgtgaacctgggaggcagagcttgcagtgagccgagatcgcgccactgtgctccagcctgggcgacagaccgagactcagtctcaaaaaaaaaaaaaaaaaaaaaactgatcagaaatatgaattccataaagacaagggcaaagtcatgtatttggaagggaaaatgttgcccaagtagagagtttctgggaatatgatcttgaaataaaaataaatgtgagataacctattaatgaaattgtctgaaaaccatacaaacaccaacattatcttcatgatccctagttctagacctctttggtcactgtaaaattataacattttccgtgtatctttaacagctttctaggaaaatattaaccaaaagtaccggttttgatttggccataaagtgacaggagaggtaaggttctctaggattaaagaataacgtattcttatttgattcactttaaaaaattattctaaaatctgttacatatctgtcctctccaggatgaactttatattggctcagcagattgtttactgtgttcttcttctttttctttttttggtctttcctgctcagcgcccaacccaagttcaaaggctgataagagagaaaatctcatgaggaggttttagtctagggaaagtcattcagtggatgtgatcttggctcacaggggacgatgtcaagctcttcctggctccttctcagccttgttgctgtaactgctgctcagtccaccattgaggaacaggccaagacatttttggacaagttta

SEQ ID NO: 43470 - DNA, 2300 bp, Homo sapien
tgtcacctcatataatacaatatttattagcttacattcaaaatctagaatagtgtttggcatatagtaggtattcaataaacaatgattgaagcaagattcttgttgttttggacatgaattgttgtttaccagaggactgcctaatcctgtactgtgtaattgtttcaggggacatttgggtctagtcatagcattttacattctgttaaatcccttattgaaaaggaagatacactacgtctttggatatatttttttactattgtattctatcagagaggagatagggcaggcagcatctgacttattcctagtgaattcctaatggaccagagatatatttttccaagtgcaaatcacattctaaaaattttactttaggccgggtgcggtggctcatgcctgtaatcccagcactttgggaggccgaggcgggcagatcacgaggtcagaagatcgagaccatcctggctaacacagtgaaaccccgtctctattaaaaatacaaaaatattagctgcgcatggtggcgggcgcctgtagtcccagctactcgggaggccgaggcaggagaatggcgtgaacctgggaggcggagcttgcagtgagcggagatcgcgccgctgcactccagcctgggtgacaaagcgagactccgtctcaaaaaaaaaaaaatttactttatagctttactaggtgttaaggtcaaacttccctttaccattatgaaatccaccccctcctccaatctttttgaaacatagaacatctttcctgcatctttggtcttctaattttttctgattctccaatttttctcaaagacaatacattcctttagaccaattgtttttctgggtctcatctcctgagtcttcagtgaattctttccattctcggaatgcgctcagagagaacgcttctggggaactatcagaacattgatatcttctcaaaaaagtgtgaacaaaaattccaataattcagtcagtgcttgcagttggccattctgggctagtttttctacagaatcactgtagactattctcccttttcccttgcttctcaaagtttcttggcttctagcattttcctgcctgcctcactgctgtcccaggctccttgttcatttattcttagctttcagattttatatcttgctttctccatttcagtttgatcaagttaatcgtattttctgcctcagcgaattgaatttggactactcccattttttccactaaacccacgtgtttcatttaggaacttacctgtgtagaaatttatttccgcttttattacagtaacatttcaaccttttcttcagatactcgtgtgctgtcctctttcttgcctgttttttctcctattgtgtgcaaggagtgagtggatctaggtttcctggaatgtgggaggagcttttctgaaatttctgcactgattttttttttttaccctcatctcactttcatttaaaattctttattattattacttatatttgtgagctgctttatttttttaaaaggagagtatattttgattcacatcaagggaagtaagagtccacctctttttgatgcagtgtaactaaatctgtcatcttcactgaggcacaaggccctctgtcacattttatctatgcctccactattgcttttagactgttgactacaagttagttaagagcctatactctagaatcagaatacatagatccatgttctgattccatcatttgttagctgagtgagatatagcaatttacttaaacttagtttcataattcataaaatggtgataaaatatttgcctataggtttcttgtgatgctcaaatgagatattataacacaaagcactttgaatagttacttataattgtttttttcctattctacaataatatacacaactttggaataaggaaaagcagtggacatttttttaaaggcttgattattgcaatgtcacctgaacctggaagacttgtttttctgggtgaagaaatattttctctgtgtcagagtttcacaatcatcgtcaggtaggcccttgaaccctgccatttaaagtgctcctctctttgatctgtggcactcatacatacactctggcaatgaggacactgagctcgcttctgaaatttgacaagataaccactaaaatctctttgaattctatgttgttgtgatcccatggctacagaggatcaggagttgacatagatactctttggatttcataccatgtggaggctttcttacttccacgtgaccttgactgagttttgaatag

SEQ ID NO: 43471 - DNA, 2300 bp, Homo sapien
ccgagtagctgggactacaggcacctgccaccacgcccggctaattatttgtacttttagtagagatggggtttcaccatcttggccaggctggtcttgaactcctgacctcatgatccacctgcctcggcctccgaaagtgctgggattacaggtgtgaggcactgtgcccagccgctgaagcagatttctatgttcttagcatagctttcttccttgatgtaagtaaaatgctttgttacaatctctatgtgtattgacttttccttcccatgatgactttatctagtttaacatttcccaagatgacttcatctagtctggctttatttttttcagatgttagctaggtgagctcttccttctggaaatttccactgcacctaatacagtgacattgctaggatggctggactaagttgtggctccctctccttttagtacagcttttcctgactccgtgtccttgcaaccaaggtgaaggagatgagaaaaagctttctcagttggatttagctgatggatgtgggtcctttacaataaaataccaccctcgcaaggagggagaaatgatgtgtttctcaaagtgctgcagaagtctcattgttgatattttcctcgttgttgctttgaaaatccaatgtttctatttaacaccagagtcacccaatctaattctgccattcatgacttttgaggaatggggtggaatttggggactgaatttatgaagaggcagcatggtagagaggaaagtcctgacatcaacctctgggcggggcgttgattggcatctgtggaatgcccaccggggaaagattcttttacacgcattatcttaattctcagagcatctctgaggctttgttgcaacttcagggttttttaaaacttttattttaggtttaggggtggatgtgcaggtttgttatataagtaaattgtatgtcactggagtttggtgtacagattattttgtcacccagataataagcatagtattcgataggtagtttttcgatcctctccctcctcccacccactatcctcaagtaggtacctgtgtctgttgttcccttctttgtgtccatgtgtactcaatgtttagctcccacttatcagtgagactgtggtatttgatcaattccaattttgaccaatggtgaccagagacacagagcagttgggtgtggtggagacagggttcaagtgtaagtcaacctagctggtaaagtgacacccatcccactcatcccattgctgccaatgacttcaacgctggagcctcagttccctcccgtatgagatgatgataacaattgtgaagtgtctgaggatcagagaaataacccagtgaaggtacttcagagtgggtaacttttaattactgttgtattgctgtactgaccaatgtagtcagtagccacatgtgcctacttaaattaaattaaacaaaaattccatttctcagctacactagctccatttccagtgctcaatggcctcctacctgtagtagctgccatattggatagtacagacacagaacattcccatcgccacagaatgtcccttggacagtgctgctctgtatcattaactttgatttaattcaagtgccagacctcagggctgaacacaatcattccctatgtgtgaatgtgcaggcacctgtgcagttttgttgtataggtaaattgtgtgtcactggagtttggtgtacagattattttgtcacccagataataagcatagtattcgataggtagtttttcgatcctctctctcctcccaccctctaaccttaagtaggtaagaggaagctccgaagctctcctgggatgttcacccgctgtggtgagagtcaggtgaggcccttcacggagggcaccctttgtttaccagagagaagggagtcacgtttgtttcctgaatgaagatagcctatctaagaaccaggtatctcagcctcgaaaaggtgggaagtgcatgtcaaggaaacctctagacaggactcaattcttcccatcatacacgtaaccagagaatcgcagaaggggtcggggaggattccaactttgagtcagcaaagaagacattcttttgaggtagagtcagagtagggaaaacaactaatctgttttccaaacaggttttcataaataactgacaggagatgggctgtttttatggaagtattaacccaaatgatgggtgttaatcattaaacctttttggtggtggctcgcttgtttctctgatattctaatccgggtcacagaatggctaaggcagattta

SEQ ID NO: 43472 - DNA, 2300 bp, Homo sapien
attaaatggtagctctgtttttagttatttgagaaatctacaaactactttccatagtggctgaactaatttacattcccaccaacagtgtatatgcattccctttttgccacagcctcaccaacatctgttgttttttgactttttaataatagccattctgactgttttaagatggtatctcgttgcggttttgatttgtacttttctgatgattactgatgatgagcatttttcatgtttgttggctacttgtatgtcctgagaaatgtctgttcatgtcctttgtcccttttttaatggggttgtttttctgcattgcattttaaaaggaaaattctcagtctcccttgaagaagtgaagcctccttctttatgcactggccactgtctaatacctcccagcaatactcagaggagactacctgctggaacctcactagaattgagagatcaaatggttttggctgttttcccactggagaatataaaaaatacacagttaattttagaaacaaaggctgggcatgattccatcctaagcagcaattcttcaggtagctgcccagaagggcctggagctcctctggaccactgctgatctccagatactccctgagaaccgtcacctcggcgtccaattcctgagtggttttcactactaaataatgactcagtgacccagtctcttggccaggacgctgttatggaatttgggtcgtttggcacttcctgcctggtgcccacctgtctagattactggacccaagtaggtccagtatctccctggtccagccctgtcttgagtccatcacctttatcattaagaagcagccagtagaggttgatgatgatcaggtacgttctctccacaattttcatctaaggaaatcctcgtctccccttttaaaacaaggctgggctcagactgtggcatcagttttaacatcttgtaatgcttatacatttttattgaagtgtaccaacgtcttatctcagtttggacatgaatttagagatatttcaaattagctagagagaagagttaaaacatagaagaacataagctttttacatctatatttgacagtgacatatgtttttattatacatgcattgtgtagattctctatgaaaattaagacccttttaaataaaaaaacgaaggctggaaatgggtgtattcaaaaccctttaaaatccttaagggagttttgctatagaatctcaggataaagacagactccgacaatattcatccagaaattttcatgtaagtcagttgtttgaaacttgggatttatttttctcttagaaactaagtctaagtggtggttactacatcagcacacaaaatcctgtttaattcataaactaaactgtaataataactgcgtttacttgttcatattggatttttattgactaaaagcttccagcctctttttcatgcagccaggataacagtgataccaaaacctatcaaagattagaccatcctacccccaaaatataacaataggccaatatctctaaaaaatatgtaacaacagaaaaaaaagctaaataaaatagtagaaatagaatctagcagtgcattagaagaaatatatactttgtccaggtagggtttattccagtaatccacagatggttcagtactaagaatgatatacttacaattaatggatttcatcccatcaacaaatctatatgatcatttccatggatttcctaaaatacgttagacaaaacccaccatccctttaaaaatttttttaataaaacagaaatgaagaattccctaactggatgaagtagatttatctcagctcaaaaataaatagtatgtttaatgtggaaaggatatcattaactccatggttattagcatactaaatattaaatttaattgaattaacctctggcaggagccaataaagttaggccaaaaaacataaagaacattagagaaacactaaaaactcctacaaagataattcagcaattagtggagtaccatgtcaatttatagaaatcaattccgttggcatatataactcacagttagttaaaagacataacagaagaaggaaacctacttataatagaaactaaaataatgttaataaacaacataaaatgttaagaaagctataaaacatttctgagggacacagaagacttgactttataaaattcataccctgtttttacataggaagatattataaagacacctttgatgtcagttctccttaagttgattccataaatttaatatggttttaataaaaata

SEQ ID NO: 43473 - DNA, 2300 bp, Homo sapien
cctggcctcgactcactgagtgcctatagtaccacctccccaggtcatgacaaccaaaaatgtctccagacattctccactgtcaattgcaaactcaccccttgttgaacaccactgatagacactaatccctaatatcaactaaccaatgaaatgctgtacctcttgttgtatgagaagaagaaacagacatcttctcaagtctatgagaatggcttttaactaatcaacaccttgattaaccagtagaaggcatatttagtgatgattcgcttatgactgcctgtacctcaccgggacaaaattgtggtttgttagagagtctttagccacaaacagaataacaaccactggcttatattgcaaaaaggatatgggaaattctatagatattggaaagaaaaatatattataagaagtctaggccgggtgcggtggctcattcctgtaaccgcagcactttgggaggctgaggcaggcggatcacctgatgtcaggagttcaagaccagcctggccaacatggtgaaaccccgtctctactaaaaatacaaaaaattagctgggcgtggtggtgggcgcctgtaatcccagctacttgggaggctgaggcaggagaattgcttgaacccgggaggcggaggttgcagtgggccaagatcacgccattgcactacagcctgggcaacaagagcgaaactccatctcaaaaaaaaaaaaaaaaaaaaagtctatacctactctgatgccattatcttgagatgtcttagatatgaataaaaagtcattccactcattatgagaactgtctttagaagaaaattatactgaattataccataggaatatctctaggttttgaaaatcatatacccagagatgattccataaataaggaatcaggcaaaaaaccaaaggaattcattggtgagaggagagtgttagggatctcattcccctgcaactactggctgaccccaaccctgcattgcaaaacacttggccccctctgacctcaaaaagcatttggtgcttcctcattaagctctatttattgtctttactattcacccatctgcctcagtctgggccaaatctattgcccaatcttcaattggttgcgacttttttgtctcttcccgattctggcattccagagggtcaataggttccttctccacgtgcttttgagggaaatgccccccccccaaaaaacttttcacaccaccttgaacagactctaaacttaggcactacagttactaagcagcctttggattctttgtttttgaagttagatcttttcagctattagtggaaaatgtgcctcactctactccaggattaccaatagaaatgaaaggacagaaatggcattagtgtttagagaagattatgtatatatggctgtatgaacactgaaaattatgagggtcaacataaaatcagcattacaggtactaaaacataaatcctgatggctttcaccgttttcttaagagcaaaattgcaaaaagtgatattaacagtcatcctagacgaatatgagcaaatgatttgtttttccttaaaagagcctccaagtgtattgtgatcattttcacactgatcaaagagagcacccttctgtcaacaggtatctgcagttttcaggacctggcagaaattcttctatgttctgcctttaaaggtcaggtacaaaagcagagacagctgccaggcccctctgcccagagctaagtgtctgggaccatgagtgggaaggactgaggcttgagcctccttggtcctccagacagcatggggcgccacttgccccttctgcagctgcgcgcggcaaagctgtggcctggccgtggcctcctgccccatgcaacagttggtggacagaccgtacctggcacacggcgccttgtgcactttccaacattttgatgctaaccgtcgctagtcactgagccctgacatttgatctctggccttgaccgcagatttcggaaacttctggcagcccagtgtctactggaaggcccaagccgcttgccagaaagctgcgccccgcccaaaagcactgggttctgcagtccaggcccttcctcagctcccaggtccaggagaactgcaaggtcacctacttccacaggaagcactgggtccgcatccggcccctccgcaccactcctcccagctgggactacacccgcatctgcatccagagagagatggtccccgcccgcatccgcgtcctgagagagatggtccccgaggcctggaggtgctttcccaacaggctgccgctgc

SEQ ID NO: 43474 - DNA, 2300 bp, Homo sapien
gctcacacctgtaatcccagcactttgggaggccgaggcgggtggatcacctgaggtcgggagttcaagaccagcctgaccaacatggagaaaccccatctctactaaaaatacaaaattagccgggcatgatggtgcatgcctgtaattccagctactcaggaggctgaggcaggagaatcgcttgaacctgagggccgaaggttgcagtgagctgagatcgcgccattgcactccagcctgggcaacaagtgcaaaactctgtctcaaaaaaaaaaaaaaaaaaaagggaaaagaaaaaaagccagtttttatcttatgaacagtaaaaacctaaaaatgattgctatttcctcttttctatggctattcaacagcttagttagggtcaaatttctggcctacttctgacaactgttctggatctgatggagtgcaaacttaaatgttaatcttatcattggccacatcattctccttccattaagctctcctttcactggttccttcccctatttttaaatctactaatgtctatattttaggacgctgcctcaaatcatttgtggaagaaggtgaagtagaactacttgtataaaaataaactcagtaatttatatagactgtatttggaccaatttctgtgaattcatttttcaggcaaaaaatgactgacagttgaaacattttataaatgaggcagagttctcagggtcagggcgagcataatgaaagtgttctgttgaaagttgttcttttctctgtgttccttctagcccaacattttgaatattctcactgtcttcaagccagaaatgcaagggaggagaagaaaaaagaactgtgtgatagtaaaatctttattgttggcatatgaagcaatataagtagcaaattttacttctacaaaggggggaaattatatatttctatacatgtggaagagtagatattcagtgaagattttttgataatttattgtgtaaagaaatgtactaaatactataaaagtggcttcctatgtttactacccccaaatattcctactaatgacctgagattaccaactccttttccacctattaaccttttgccacatcttccccaattttctcatccaaacccaagttggggcaacttcagactgtaagcttcttgaggcttgtcttgtttgtcaggggagcatgtactcaataaatgaaatttgcatgaatgagtcagagatttatgtacacaggggaagaaagctggttatagcttcttcatatttttcacgtggacccagagttgtaaattgagggaagaaggatagcagagtaatctcaaagcacaaagtgggggtgatgtcttcacacgccctcagcagcaacggggcactgggtgcttaggaaagcccatctgaaggagacatcaggaagtagaggaattctgttttttccactcatctgcctagtatttaaggtcggctaagaggctagaaggaacacatccacagttctgctttagaggatatgaaaattgggctggaaggaacacgggtccacagttcgagttcagaggacataaaaactggctcaaagaaactcgggtaaattggacatgaaaactagcgggaaaggacacgttcagtgtttgtttccctactgagtcacctgttcccagcacataaagtcgtggtgtttggagatgggaggaaccgagggaaagtcactttttagataaggctctgaagccccaggtctagtttcaatccactaatgcggccagcggcgagcaggaggagggaggattggtccggcgggggcggggccagagcagggctcagaggcgtggcccaggctagagggaagagcccagggggagcgcagaggcggggctaggagggagcaggggtgaatgggggcgtggcccgggcgagaggggcgtggctgtagctaaaggggtgtggccagggtggagggcagagactggcacagtttggttgggcgtgaccggggcaataagtacggacgtagtggggcgtggatctgccaggtgggggcgtggcctccattgaggggcgtggccctggtatgtggggcgtaacagggcacgagggggcgtagcttcgatggccggacgtgcaggctgcggatccccgtaggcgagcgagcggctaggttcgtgatctggagagacgctcaggtaaggacgggtggccgagaggagtggggggcgaccagggacaggccgatccagacagggccgtgattcttcccacgactctccgctctggcgcaccgggttccggagctaggaga

SEQ ID NO: 43475 - DNA, 2300 bp, Homo sapien
agaggaaagtttaataggcagaagaaaggagagaggagagcagctctttctcttgcgagaggagagcagctctctctcttgcaagagaggcgtccaaaaatgggacaagtggcggactgcagcagattttataggcaggcttgaggaggcggtgtctgatttacataggggccacagattggttcgaccaggtgtgacatttacatagcacgcaggaaggctggtcgccccaccctaatcttattttgcaaaggggctttctacttggccagtgccatcttgtctgctccttactgtacacttagctggcaaagggaagatgaagccgccatttggaacatgcctagtcctatgtagtatttttctattggcacaactgccagcattcacctgtgcaagcttccagcttgcttgtctatgtctgcagctcaattttacaggctgctctttgttaggaaagaaaatgatttgggggctgctttttattaaaaggaaaaccttactgaggactcccatatcctcactatctgcctaagtaatttcttcttaactcctatatcactattatttagctcaaggcaccatcaagataatcccttgaaagttgattaccagtccatgtttgatatcctgagtcaaacatttgcatctcttaaataaggtgcattttgacatacatgctccgttcaaaaatgtatatacacaaacacacacataaaactataagcaggccagatgcagtggctcacacctgttatcccagcactttgcgaggccattaagcaggaggattgcttgagtccaggagtttgagaccagcccaggtaatatagtgagaacccccccccccgcccccgccaacccccatctctaaaaaaaataaagttagccagggatggtcgggcacagtggctcacacctgtaatcccagcactttgggaggcttgaggtgggaggatcacttgagatcagggattcaagaacagcctggccaacatggtaaaaccctatctctatgaaaaatacaaaaaagagcctctgcacaggtcggagggaaagaaaggagttggaagatctgaagcccacgtagctggtgggcaggcaggagtgcaaatggatgtgaggccgagatcttagcaggcccagagcacatggccttgcagccacaccacagtcatggttgcacaaaggatgtcctgaacatctgtttgaatgtgtctcaagtactcagactaaacacttctaaatctgtagtggaatgaatgtgtaaccaagaagaattgattttttttttttcaaaatttcagaatggaatagggatagttttcagggaaaatggatgaagcagtattgtggtggggaaagtgttcaaagttaatattaccataacttcagaacaccatagtgaataccttggaaagcatcatcttcatcttctgagactttgactgtgaccatgtgaaaggtagagagagaattcaggattaactttgtctgttttcccatgttcaagggccattgtgttacacctaaaattggcaaagagtcatagattatatttaagctcagatttcaaaactgtccatgactattttggcaggatgtatcttgggttttttgttttgtttttgtttttgtttttttgttgttgttgttttgtatgcaatctagatgcagatgtttgtttttagtcagcctggagggagctttaatgttggggttcttcgtacatgtaaataccatgctggataattaattgggatttcctggagcaatttttttttttttaagaaactgtactgtaaacagtttttcattcttgtggataaagagaagcttttctctggatttctaatattcgccaaccctgagggaaaggcaaagcatgtgagtcagtcctcaggaccctccctgccctccactgaggggaccaatgagtttgaggaacaagagtggataaaccgttgactctcatctgccctccctccctccacctcagggtgtgtactgctagtctgaatattgtcctgcttagaggtttctccatcatcttaagtttctgttgtttacagctttccctcctctgccctcatccctctagattattaagttcctgcaacttaactgggaactgatcaagatttcaagctaaagatggtggtgatgaacagcctgagggtcattcttcaagcctctccaggcaaattgctgtggagaaagttccagattccgagattcatgccagcgaggccctgcagcctctatacttgtacttacaaaacccggaaccgagcctgtga

SEQ ID NO: 43476 - DNA, 2300 bp, Homo sapien
cttactcagttttcacaataaaagggttatgagatgggaactattattactatcttgatttttacaaatgagaaaacaggagtagacattaaggaatttactcaagatcacagccaaccaatgcactgagctggacaaggtcaacttgggggtgaagggcatatgtgttgctccaagtgtgtcagtataagagagattagggtgaggttttatgcagagtttgggcttcagctgagtaattctaaggagggattaggggaaggaaggcagtttagtaattgagtatctcagaaactttaatttggaggagaacggaacaaaggtaggccaaggaagctattcaatcactcaaaagatagaggttattagtcattttacagctgtaatgcatccttgtgaggaacattttttgcttggccttgtccctggccttgtatgtgtacattacagtctgattattagttgggatgatttttagtttctcaatccctactctcattgccccagtttaattcctcaacacctctcacctagattattgtgatactctagttttatcttttaaatcctttatattgcaaagcagagtgatttacctaaaacacaaacacaaccacaataagcctctatttaaaaagctttcaacggttcactgttgtctctacagaatgtaaacagagcgtcttaacatggcacaccaggccctccttaacctagccctcccagcccatcacaacaactatattccttgatattctcgaattgcactttattttgttttgtttttttgagacggagccttgctctgttgcccaggctggagggcagtggtgccatctcggctcactgcggccgccacctcctgggttcaagcagttctcctgtttcagcctccagagtagctgggactacaggcatgtgccaccacacccggctaattttgtatttttagtagagacggggtttcaccatgttggccaggctgacgaactcctgacctcaggtgatccacccgcctaggcctcccaaagtgctgggattacaggcgtgagccgctgcacccagcctcgaactgcactttaaattggatagctgggcgggcgtggtggctcgcgcctgtattcccagctactcgggaggctgaggtggaaggattgcttgaccccaggaggtcgaagctgcagcgagtcgtgattgcgccactgcactccaacctgggtgaaagacaagaccctgtctctaatatataagaaatgaataaataaataaattcgattgccaaaattcttgctgttcccagcatattccactttcacctttcagcgcctttgcttatgctgatctgactgtaactgcattcccacccttctccttctgggtaaagggcatcttctttccaaactcaactcttagcatcagaaagctgtccctgatactgcagttgagtcgcatgtgatactgaaaaaaaaagaaaaaaggaaaaaaaagagagctctccctgaatcccttggtggactatgttaggtaaacttcatctttgcctgcatcatattatgtattggttcttctctgccccctcgattgtaaactcctcaggggcagaggtaacagctttgcagccctgggagttaggtttgcttaagggaccagaacaggtgtgactggcagggagcgaagtctggagctttgtctgaggcgctgataggtggatcggcggaaggacgcggaacctggacaggtcggaaataaagccgggcgagcagctctgtgcgcgatgtgacttcatgagtggatgctgagaaaagcggcagagtacgactttaaccgcctagccacaacacgtcctgctagggcgaggagggagacagtgatacagcactgggcaagtgctgaagcgacaattacttctagggcggggtaaaagccccagagtatttttgctggaaggaggtatttatttgagcagggttctggaagacgagccgccgaagggtacctccggctttccgtttcaagtcccacgctggtggaggttgctcggtacccgcgcctgcgcgtgcccgtctcgactcttaggcccgccctttcctgccagacctggaggggcggggcggtgccggcaagatggctgcgcccgagaagatgacgtttcccgagaaaccaaggtaagcgccgtacggggagatgagcaggcgagcgggccgatcgtgggcatggaggatgtggtggcaggaagaaaagagaagctgggccaagctaagtgagccaccgcggcagctccattccttcctggtgcgcgc

SEQ ID NO: 43477 - DNA, 2300 bp, Homo sapien
gcataattagcacttaatactaagactagggaataaaccatctataatctattgaaaaagaccatctgcttctataaattttgttctcatacacttgccaaaagaagagaacatattaacaaaataatgggccctgcactgttaattgctaggttgtttgcagttgtgctgttgctattagaatttaataagccattccttctgctaaattaataagcagccaagattatgtaatagctgctttcagctgctaattatttttcccacaattccttcccctccctacccctacccccacctttttttggctaggagcaggaaaggagactgccagtatgtcatcagcaagtctcccgtcctcattttcagagcaacattaggagcataatcagagtttaaacttggaagtggctatctcaggaaccttcaggatataagtgttttgtacagaaaaagagaaaagcagcatttggattcagagggcgagttttcattgtgtagcattagagctatcttttaactggttaatggcatctgtttcttgtagtaagagagaaatgggacattcgaaagcacctttggggcatgactaggtagggagaaatctggtgggggcgagggggacctaaagaactacagaaagccagctctgtgccgtgtgtcgtcccctttctttaatattccagtatacattaatcatacatgttagtaggaaactttccaagcagcacagtagtgcttgaaaaggggaagtattacacatttctttttgttttgtcatacaaaagcattttttaaaagcccccaaaactactgtcttagtttcatagatactataatgtacacaaaaagaatataatccctaataaaggattcctttacattgattacatttagcttcgtgaaaattttagcatttctttttttactttaggccattaaaaaaattctggcgactatacttaggaacctctgcaaaaggggcatggcccaacaaaagcaattttctcgcttcctttgtaagaacctaggtgactcgggtaatgaatagcatttcgatatgggaaacccgtggctcttcaaggaaggtcacctaatcccgtgggactcccctttccttatctgtaaatgactagatgattcatccattctatcattcagaaaattatgaacatccattatgcccaggcattacgctcagcattacagctcttaacaaatttatcattttatagtctttatcagtcaactcacatttattagttgttatataccaggctgtgaactagattgagatgcaaaatgaatacaatttaaggtgtgctaaataaaggctaacgggcatgtgggtgaaagagggaatcgctcttacagggttttagggtgaggcttcatagatgtgacatttgggagcaaggacatgccaggcacagcaagtcgtcggcagtgctaaactggaacccaggcggctggtggggcgacccagtgtgaaggaagcgggatctcgaaggtgaggtgctgtccgggcttttcagccgaacggacggtaactcatccagtccgcagcaccgaggatgggcgaggcgagcccagggaacagactcccgcgaagctcggggcggaaggtgtctgggctagggctggagcagtgcaatgggaaggagagggcggattccggacaattttgaggcagaatgatagcaaaaggcccgtgaatgcgtgacgagctccacagaagagctgacttgtttttccagagttgcagcactccctcgtctcctcccaccctcctcgtcagccgtcacacttcacacttcctctctggggacacagagaatcattagagctcgaacgtggctcttcgctgtccggaacttccctgccccgcaccacccgctaggctaaggacgctgcagaatcccgtcctcctatcattaaacaagcaggacagccgcccgcgcgcgtcccggaggcacctgcaagagcgcgcgggcgcgcgggcgctcgggcccggcaaacgccgcttccgggtcacgtggcccggcttccggttcgcacctcccctcagcgaagaaacctccaatcggctgccttggactcagcggttacccgcgctgcctccggtgccgctggcgaccgctgagccgcttcccgcgcgtcgcctagcccgcccctcagctcgccgcagccccggctcctccctcgtccggcccccggggcggggtctgtcagcttgccctcccctctccgcctaagcctgccctatgccagccgggtgtcctccccacagcaccacggct

SEQ ID NO: 43478 - DNA, 2300 bp, Homo sapien
cttgatccccgaaaatattagatgtcaaacctcaacgcacctttactcctaaaataccattagaagaatctatagtgctgtggaacacataatgctaacaccagctatgagaaatcaatatctatcagcatccccttaacttacattggaagaaacactaaccacccaattagatttaagtagtgaggctgactcagcacacaggggtgtctaaagaaataaagggaaacaacatccagaagttctctttgtgaaccaaaaatatgccttttagaccaaacttcttagcaagaatacaagatccatcacaatctcacccaaacctgcttctagctgcatttcacgctgttctttttccacccctgtcttccaatctgggtgaccctctggatttatagatgtccctctgctcaatgtcatgctctttcctttatgccttgatcctaggcacatatgattttcttcattcaaaagaccttgtcaacacttaacctttaaagatatcgtcttttctggagaaaaggtagttgcttcactccagagaggggttggggtctaaagagctgtgagagtacacatcttcatgctatttttctcagcctcttgctcagtgcctggcaactggtagatgtttgataaatttttttcaagtaaataaaggagttgctaattcactcgtatgagtgcttgcctattgatctgaggtcaatcactcttctgaactcattgggcttttccaaagtaagcctttccccctcaatctaataatgataataataataagtgctaatattaattgagcacttactatgtgccaaatactatgcaatcttaacatgaatcatttcatctaacttcataagttctcctcaccctgcagatgaggaacctgaagcttaagacactaagtaacttgccataattataaatgagggagccaggattgaagcagagcctgtgtactgtatcattaagctatattgctggcaactaatcaacaccactgggctcatggctattggctggttactggtgctactgatctctgccgagaagctcttccacctctagccatgcagcatcagtctccctcctgctggcagagaggggcgctgagcctttcatatttacatagaaagcatggcagcagcctcagtgttggaacctgccactggaaatgtccataacaacacagttgggggctttctttgtgggccctggcatggtaagtgcaagttttgttattccttatgggttctgaaaaatgagacttcacctgttagtgactggcttcacgtcatgtacctggaggagctggcttcacatacgtcataaagatgcactctaataatgtatttagaagttgttggctaaaggtctaagcctgattctaatagcacttcctcaattaagctttttctagcactccttcaacgataacttacttcttttaccacccactcaattcctcagtattgtatctatcacgcttttatagttctttattttccacacagggctataaagaggatatttgctataaaacatggcaaacattcaattaaaaatgcaaatagctgcatcaaaatgccgattcataaaatttttagatcagatgagaaaagacccatttttctggaaaagactattgatcattgagagttaagaatacagctggttcccaatttaatttctccctggtaaacagaataggaatggcttggcaaatctacaggaaagaacatgtgtgcattgtgcttctggcttttccagatgtcagttgctgaaggtttaaggtgtgagtctgtgcatgtgtttctgaggatcagtccctgttcaaagaggcagtgggaagactgagtgggataactcacacatggacaccctgtgcatcagtgtgcgtttaattcaaagacagacctcatttgatagcaatattgacatgtcattctaatgaattagaaaaaatgagaaaatgggatgtaaatccccatctggattcatggggatagtatcagaaagattttcagtgcctttgcagaatgctagcaacatttattaaatacctaccctaggtgctatgtgcttacatgagaagccaaaggtatctgttaagctaggtaggaactgcagtcggctggttgcttctcatctggagaaagcaggcaactgggcagtgattgaagtgtccagcagggggctggcattctctgtctataagtaacactggttcctcttcagagcctcagctcagcggagctgccgtttgctggtgaagcccgtgacgtgcaaagcatcct

SEQ ID NO: 43479 - DNA, 2300 bp, Homo sapien
ctggtagatgtttgataaatttttttcaagtaaataaaggagttgctaattcactcgtatgagtgcttgcctattgatctgaggtcaatcactcttctgaactcattgggcttttccaaagtaagcctttccccctcaatctaataatgataataataataagtgctaatattaattgagcacttactatgtgccaaatactatgcaatcttaacatgaatcatttcatctaacttcataagttctcctcaccctgcagatgaggaacctgaagcttaagacactaagtaacttgccataattataaatgagggagccaggattgaagcagagcctgtgtactgtatcattaagctatattgctggcaactaatcaacaccactgggctcatggctattggctggttactggtgctactgatctctgccgagaagctcttccacctctagccatgcagcatcagtctccctcctgctggcagagaggggcgctgagcctttcatatttacatagaaagcatggcagcagcctcagtgttggaacctgccactggaaatgtccataacaacacagttgggggctttctttgtgggccctggcatggtaagtgcaagttttgttattccttatgggttctgaaaaatgagacttcacctgttagtgactggcttcacgtcatgtacctggaggagctggcttcacatacgtcataaagatgcactctaataatgtatttagaagttgttggctaaaggtctaagcctgattctaatagcacttcctcaattaagctttttctagcactccttcaacgataacttacttcttttaccacccactcaattcctcagtattgtatctatcacgcttttatagttctttattttccacacagggctataaagaggatatttgctataaaacatggcaaacattcaattaaaaatgcaaatagctgcatcaaaatgccgattcataaaatttttagatcagatgagaaaagacccatttttctggaaaagactattgatcattgagagttaagaatacagctggttcccaatttaatttctccctggtaaacagaataggaatggcttggcaaatctacaggaaagaacatgtgtgcattgtgcttctggcttttccagatgtcagttgctgaaggtttaaggtgtgagtctgtgcatgtgtttctgaggatcagtccctgttcaaagaggcagtgggaagactgagtgggataactcacacatggacaccctgtgcatcagtgtgcgtttaattcaaagacagacctcatttgatagcaatattgacatgtcattctaatgaattagaaaaaatgagaaaatgggatgtaaatccccatctggattcatggggatagtatcagaaagattttcagtgcctttgcagaatgctagcaacatttattaaatacctaccctaggtgctatgtgcttacatgagaagccaaaggtatctgttaagctaggtaggaactgcagtcggctggttgcttctcatctggagaaagcaggcaactgggcagtgattgaagtgtccagcagggggctggcattctctgtctataagtaacactggttcctcttcagagcctcagctcagcggagctgccgtttgctggtgaagcccgtgacgtgcaaagcatcctgcctataggatttgaggatttctcagtgcagtttttttctacccactttaaacctccagattctaaatatcaggaaagacgctgtgggaaaatagcaggccaaaagttcttagtaaactgcagccagggagactcagactagaatggaggtagaaagaactgatgcagagtgggtttaattctaagcctttttgtggctaagttttgttgttgttaacttattgaatttagagttgtattgcactggtcatgtgaaagccagagcagcaccagtgtcaaaatagtgacagagagttttgaataccatagttagtatatatgtactcagagtatttttattaaagaaggcaaagagcccggcatagatcttatcttcatcttcactcggttgcaaaatcaatagttaagaaatagcatctaagggaacttttaggtgggaaaaaaaatctagagatggctctaaatgactgtttccttctgaacttggaggtggaccatttcatgcactgcaacatctccagtcacagtgcggatctccccgtgaacgatgactggtcccacccggggatcctctatgtcatccctgcagtttatggggttatcattctgataggcctcatt

SEQ ID NO: 43480 - DNA, 2300 bp, Homo sapien
ctgtctttatttgaaaatttgattttgtgttcaaatgtgaattatttcattttgattttttttttttttttttttgagacggagtcttgctcttgtcgctcaggctggagtgcaatggtgcaatctcagctcactgcaacctccgcctcccgggctcaagcaattctcctgcttcatcctcccaagtagctgggattacaggcacgggccaccatgcccagctaatttttgtattttaggtagagacggggtttcaccatgttggccaggctggtctcgaattcctgacttcatgatccgcccgccttggcctcccaaagtgctgggattacaggtgtgagccaccgcacctggcctaattttgattttttaaaataatactacattaaaatattactgatccttcttcagaagttaaagagaattacatatgacacagcaattccactcctaggcatacaccccaaaagaattaaaaacaggcattccaacaaacatttgcatgtgattgttcatagtattagtcacaataaccaaaaggtgaaacaaattgtggtatattcatacaatggaattttattcagccatagaaaggaatgaaattctgacacatgctacaacatgggtaaaccttgcaaacgccatgctaaatggaagcctgactgaccaggggctcttgggctctcaatgcaatagaaactgacatggggccaaaagacttcccagacaaagcacgcgaagggtagaggatataggttagcatcatctggttgtgatgatcatctcgagtaatgggccacctggtggtctggccagcggcaacaaggctgtaaatcaattaattattcagcattccctcccaagatgggacactctgcaatcttggttccctatttggatctcctaaggccagttcctggaattgtttaagtaaaagacatggttaagcattatgagagcacagaagaacaatacagaaaggccattttctttgtatgactaaagcctcgaggttagcaggtatggtgtcaatgaggtagtagtatgggttttgtgatcagtgggaatgcatgaaaaaatgctctagtgggggtgagccaaagccaagccccccttcctactgtctcagaagaagccagacacaaaagaccacatatattgtgtaattccacttatatgaaatatccagaatagaaaaagccacagaaataaaaaggagatcagtggttgccagcggacaggtggaggggaagatagggagtgactgctagtgtgtacaggcatttattttggagtgatgaaaatgttttggaaatagttaaaggtggtggttgctcaacatcagtgaatgcaaccaaattgttcacttcaaaatggttaattctatgttacgtgaatttcacgtcgattaaaaaatatatatacaggttgagcatccctaatctgaaaatccaaaatgctccaaaatttcaaaatttctgaatgccaacatgacgctagaagtggaaaattccataactgatctcatgccagaaatcacagtcaaaatgcagtcgaaactttgtttcatgcacaaaattatttaaaatattgtatcaaattacctttaggctatgtatataaggtgtatatgaagcataaatgaatttcatgtttagtcttgagtctcatccccaagatatcgcatgtatatgcaaatattccaaaatctgaaattcaaaacacttctagccccaagcatttcacataagggatactcagactgtattgctgatcttgattcctgagttttttggagcccccttaaattttgtgcctgaggcaaagccttacttgccacccccaagtcttggacctattcaattttacttttaccaggaaataaacagggtgagaaactgcaatgatcttggaccacacacaaatctgtggctgagttccaggtaacacagtgactcattttcttactcaaaattacttacagcatgttccctgccatcctttccatacaacacagcaaaggcacagtgacctggactcttgctcgtcatcctaacatcctgatccgctggacaaaacatgaacacactttctccccagtgaggttgttgggaaaaatttaatcagctacagatattttaagtaccaaaggctgcctctggagggaaaagaaaactacccctctggttctggttgacagaagtatgtattatcagattccctgtgaggctttacatcccatgtttgctggagaacagagggattctctaagagtgtagtgatttcttcagatagttcct

SEQ ID NO: 43481 - DNA, 2300 bp, Homo sapien
acgccactgcactccaacctgagtgacacagtgaagtggcttcaaaaaaataaacaaaaaaaccagatgcaaaacataataaacaccccatttgattttagctcactagtggtaatttgagagaaaagatgatttaagatgctattcaacaattggagagatttgacgtgggctatgataatggcattgtggttacataggagaatgtctttgtccttaggagacagatgctgaggtgctcaggggggaagcatctggatgtttgtaattgattctcaaatgactcaggggtggaggaaagtatctgtccagagaaagagaaagcaaatgtggagatgttcgcaattagtgaatctagtcgaaaggcagactggtgttcattgcactattcttgccacttttctgtagatctgaaatattttttaaaagatgtttaaaaaaagatagttcttgttatgattaagcacaaacgcctacttcctcccaggaaaacagaacatatgtgtaaaaacactggcaattttctaaaatcttgattaaaatgcattgccaaaatcagaatatttttgtgtaaaatcttataactaaaaataaaatgcctgtctttactccaaccagtgagttaatacatattctatattggtgcatagcaaagtcaaagaatccataataaaaacaagaagaatatatacaagacagcaaagacacatggaatgataaatgctcaagactggcgggaagcttttaaggaattctattagatttcccatttgttctccaatgtaaataaggccctagaattttagagctgagaaacatcagggagaaatacagtcccaatagtccagtcctcagtttgtaggtgatataaggcagagtcagggaaaattctataagtgtggaagtgtacaagtgtttcaaagctgtaaagtgctcttaaaatccacctggaaccccttcctgtgagttacaatcagcattagatcaatgtcccttggaaatgtcctacttatttcatggaactctttccagtagaaatcaatctccttggcaattttaaatcatggcagttacaaaaagtttgaagtatttccaactgaacaagagtaagtcgagtgttctcacaagtttttcgaatgatcacgaaatatatttggtaaggaaaaggataatgagaaataaaaagcagacacaggaccaacaaataatgaaagagctgaaaaaatgaccatgttactcaatattgatttgccaaataaaaccacaaattactgagtatcttctttccacttcttaaacctgcttctgaagcaatacttccattcattcattcatgtattcaaatatttaagctgctaatatgtaaagacatcagaaggacttcaatggccataccgtaattttttaaactatgtaatattgtccttctatgacagcattttttcttttttacagacaggatctcactctgtcacccaggctggagtgcagtggcacaatcatggctcactgttgcctcaacctcccaggcttaaggaatcctcccacctcagcctctacagtagctgggactacaggcatgtaccatcacacctggctgattttttaaatttttcagtagaaatgtcttgctgtgttgaccaggctggtatcaaactcctcacctcaagcaatcctcctgcctcggcctcccaaagtgctgggattacaggcatgagctaccgcacagggcagcatttattttttctggatatgaagaaagttattttttaaagcctaaatatgcaactaaattgaaaagaatcctctatatctaagctttatgaaatgtgaactgtgagcaaatataattctacattggagggaaaatataatctcagggggaaaaaaatccaagcttacgactctgaaccatgaagcaactgtcgagatggacctttactggatcttgcccttaattatggggttcatgcagtcttaagcctgagtttcaaaaaccattaataattacccttaaatggccaacaaaaggaaattttcataatcagggtggcgtgcccgtaaagactataaaagtgtcatgattctgctcagctcttcaaactcctctttgattcttctagctgtttcactattgggcaaccaggttagtgtgattttggtactacctagagctccttctgtttgcattaatactctgcttccttttagaatggtgtgaaagataatggtctggagagaaggtgagtttatgccatctggagatattccctgtaacttagaagctagaagctgtggtc

SEQ ID NO: 43482 - DNA, 2300 bp, Homo sapien
caaaatagaagactggagtagttacctggataccttgttttcttttactggtctaagctcgttgggggccattgtttttttttttgaagtttctgtctaaatgtgggtaatgttcctcagattattttaatagtatggaatggtttgcaggtctttagctttccctctagcatagcatctctttatgtcccagccatatggaactttctgaaatccccctcaccgccacccccaccccccagcactcagctgtttcctgcttattgacttctgttctggcatccctgatatattgattgctcccttctttgtttcccctgtgtacatcttaagtatctatcggaggagcatctgggatgctctttggcatttgtttagtggagagaattggtgaactgcagtgaaggcggagctgggtctgggagcatccctgtggcaacaggcttgggcgacacaggtctgccttccttcatcaccgagcactctgttcaggcccatcgtgtctccttccctgctgcccaccatgctcaagcccactgtggagtctccaacccccaccccccactgctgcttttccttacagtgaaggctatggggctgcctgtgggttagcagcctgacgtcctgtaggcactcaacctctggccaagcctgtgtttatggctgtgaagtcaccatgagaaggagtgggaaatcttagcccaggaaactccctctgagttggggtgttagatgttctctgaaggaatcaggcactgcagcccactaagatgcctcaactcagggacaaatctagaaggtggcagatttgtctcatggactctgcctctttctttccttctttccttccttccttccttccttccttccttccttccttccttcctttccttccttccttccttctttctttctttctctctttctcccttccctcccttccctccccttccttttccttctccttccttccttctttcttccttcttccttccttccttccttccatccttccttcttcccttcttccttccttccctccttcctctctctctttttattttctttttttttgagacagagtctcgctctgtcgcccaggctggagtgcagtggcgcgatctctgctcactgtaagctctgcctcccaggttcacgccactcccctgcctcagcctcccgagtagctgggactacaggcacccaccaccatgcctggctaatttttttttgtatttttttttttttagtagagatggggtttcaccatgttagccaggatggtctcgatctcctgacctcgtgatccgcccaactcagcctcccaaagcgctgggattacaagtgtgagccaccgcacccagctcctccttcctctctttctctctttcttctctttctttccttccttctttctcacccagcctggagcacagtggtgtgatctcagctcactgcaacctctgcctcccgggctcaagtaattctcctgcctcagcctcccaagtagctgggactataggtgcatgccaccacacctggctaatttttgtatttttagtagaggctggtttcaccatgttggccaggctggtctcgaactcctgacctcaagtaatctgctcactttggctttccaaagtgctgagattgcaggcttgagccattgcgcccagttgaccctgcacttttctgacctcatgttccttctttgtcaactttgggacttaggcggcttcatgatagtctaagcccctgccctgctctctgtcagggattcttctgagaggacagcagggagcaaaacaggcagagtcttgctctctgggagtctgcattctagataggggagacaggcagccaacaaatgaacagaaaatgtgaacaaatacaaagtgagttcatttgctttgcatatgtgctttttaaaataggagtttgtcttgggatgcaactagcagtgatagagtttgcaagaaactgccttaacttgaaaggtaagttcgaggtttgctaatgaccatttatttaaaaaattttctctcttcaaatatttttcagcactattggtgaattactgaactcttttcttaatcttcagatgctgattccacagagtttaggccaaatgccccagttcctctggtaagtggcttgtttatctttctgggtccagtcattgtcacttgggtcctggctcttgcctaaattcataaggggctattggctgggcgccatggctcacccctgtaatcccagcactttgggaggtcaaggcgggcggatcacttgaggttagg

SEQ ID NO: 43483 - DNA, 2300 bp, Homo sapien
accatccctctgtggagtacatttccctgccctttgaccttggagtttggccacgtaggatagttaacttgtcctggtttgtttggaatgttcctgattttaaaacagaaagtcctgtgtcctgggagccctcttagtcctgggcaaaccaagcaggttggtcactctatttggccatgtgatttattttgtcctatgggatgttagggaatattaacatatgccttgttgaagcagaaaatgtcaaatgcatctgtgtggtttggctcagtctgtcttgtgcttctgccctctaccatgagaacagcctggttttcagagatttctcgttcagtctgggtcctggaatgagaagacacaaagaatagactcacaagtgactcatagcccccatgtaacatgagggagaaataaataaatgttttgtaagttgcagagattttggggttgtttgttgtgtggcaccattgactaatgccatgtgttacaccaaattttctttggatttttttttaatgattttttttttctttttttgagacagagtctcactctgtcgcccaggctggagtgcagtggtgtgacctcggctcactgcaacctccgcctcccaggttcaagcgattctcctacccagcctggcaaacatggcgaaactctgtctctatttaaaaaaataataggccgggcacggtggctcacgcctgtaatcgcagcattttgggaggctgaagcaggtggatcacgaggtcaggagatggagaccatcctggccaacatggtaaaaacctgtctgtactaaaaatacaaaaaaattagctgggtgtggtggtgcacacctgtaatcccagctactcaggaggctgaggcaggagaattgcttgaaccagggagtcagaggttgcagtgagccgagatcgcaccactgcactccagcctggcgatagagtgagaccctgtctcaaaataataataataataataatggtaatacaaagattagccaggcgtggtagtacatgtctgtaatcccagctacttgggaagctgagacatgagaattgcttggatccaggaggcggaggttgcagtgagctgagatcacgccactgcactccagcctggttgacagcgaaactctgtctcaaaaaaaaacattgaaaaaaaaaattgaaaaaaaaagtattgtgatatcaatttgcttttttccttaaaattaattttctagaccacagttatgtaccttagaatggataaataaattaggatataaaaggcttctgattaaatttgtaagttaatcaaccttttttcctgtggacatctaacagtaggaataaatgatagttcccttaataggggaaaggttcaattcttacaaggtggctttagaaacatacgactctcagtccatgccctgaagtgacaatagagatctacagacgtgtctagtagttaaagttggtgctcctcgtgtgacgaagtctgcacctgtcttttatgacagtgcattgtgcacgtagcttatggcacacacaggctttttccctcactttcaccaagttgccttatgggttagctgtggccttgctttgtcatctactgtctaattatggctttaatcaagatgagaatcaagtaaaagtttcttatcgcagttccagagtccaggatactgatgctttgaagtaaaatgctgtttgtttttaaaatttctgttttcatgtcttttttatgtggcatatgttgagtttggaaaagctaaatcttgaagacagaatttcagtagattaaaaaaaaaccacaatagaatattataaatagaattttctgatgcattttcttggatataattgaattgttaatatctccaccaaaaaggagatggtgatagaatatggcttacaaatacatcttttaccagctttttaacaaaaatatgtccatctttgaaaaatctactggaagcaaagttttgatttttccattgcctttttaatcctaggtgaagtcttcgtcttaaatgatggtggagaagttgatttagaccttggaaattatgaaagatttttggatattaatctttataaagacaacaatatcaccacggggaagatatatcagcatgtgatcaataaagagaggcgtggtgattacctggggaaaacagtgcaaggtattatattccacagacattatggagccctgtgtgctgaatatctttgtactgctcaaaagtagaactgaaggccgggcacggtggctcaggcctgtaatcccagcactttgggaggctgagg

SEQ ID NO: 43484 - DNA, 2300 bp, Homo sapien
aggccagtgatgcccatctcacttttctattccattgtagctgccacaccccaaactgtctcatttcctggaatatccatttgaaggcctgaactccagcaccacactctctgctgccagtttgccagtcctctcctcagaggccctggccttggagcccttctctcatctgtctcccagtccatcagctccccgctggttttattaacagttcctgtcctctaggactagagctctggcccatcactgcaatcgcagtctttctgtgccctccacctcctcaccctcttgtccttctattctatgcaagcaggaaacttgggtttcataactaagagctatatttctgtagataccttgccagattatagcagattatagctggacaccactacacgatgatggtttctaaactccactaggtcttcagtgactcttgtctaacttgtcgctctagcatctcacactggttatgcgaaatttccaccactttcctaaaaccttccatctcacttcagacccttctgttgtccatgttagcttccttcagtggttggcttcttgccttcacccgaaaaacctcctgtatccgttcccagcaccaatcatcctccaatactcttttttttttttttttttgagacaaagtctcctctgtcacccaggctggagtgcagtggcctgatctcggctcactgcaacctctgcctcccaggttcaagcgattctctctgcctcagccttcggagtaggtgggattacaggcaggtgccaccacacctggctaattttgcatttttagtagagacagggttacaccacgttggccaggctggtctcgaactcccgacctcaggtgatccgcctgccttggcctcccaaagtgctgggattacaggcgtgagtcacccgaagagtgactttttagagtatttgggcggggtgcagtggctcaagcctgtaatcccagcattttgggaggcaaggcaggaggatcagctgaggtcgggagttcgagaccagcctggccaacgtgatgtaaccccgtttctgttaaaaatgcaaaattagccgagctttttggcatccgcctgtaatcccagctactccgggggctgaggcagggacaatcgcttgaacccgggaggcggaggttgcagtgagcccagatcgcgccattgcactccagcctgggcaaaaagggcgaacgaaactccgtctcaaaaaaaaaaaaaaaaaaaaagtcactcttggaagccttaattgccttcctcccctcactgcacccccgcaactctttgctgcagaagtattgttctagggaaccttactggttccaacagacgggtggacctcccaccagactgtgagctagctcctcaaaggcaggcattctctttccttttccttctctcctgagcgctcctgcagttcctggggcgtagtaggggatccacaagcgtttgtgaccagtgaagttctttacaagggtgagatctgcacgggaggacccgagcgagggtctcggcttgccaggaagccggggttccccgggaagcgtggagttcacccgcgcactcgaagtgcctttgcaaagtgagccacgggagggaggagcggtccccgggctgggcgaggcctggggcccagtgcgtccagagcggagggtgacgggagctgcctgtgctggaggaatcactttttaggcgcttgttttggaccattgcacaaacccgggtgcaaaccccaagctcaccagcgtgagtgagctgggccagcagcagggaggagaggggaaggtgggcgaggagggcgccgcgcaccccgaggcccgtgtgggcggtgggaagatcccgggggcggctttggacagccccggcagcgaccccttccccagcccgacaggtgagcgccaggccagccgcggggtggagcccgccgtgcccaccggccaccctccccggtgctaccaccaccgcgcaggtaacttcccttctgggcctgtcccagacccccagggcctcggcgcccgggccatccctcgtccccagggcctctccgccctgcacccccagccccggtgcacttgtggggccgggctcctttgtccgctctctgatggcgccggctccctgcccagcgctgagtcgggtccggccgccagccccgcgctcgcagacctcggctgccgggtgtggcgcggggactggggaacgctggcccgtgcccagtgcggttggagcctgtcccgcgcgtccccgggacgcgcttcttcccgcctccgcccgcgccagcgcccg

SEQ ID NO: 43485 - DNA, 2300 bp, Homo sapien
cgtccaggctggagtgcagtggcacggtcatagctcattgcagccttgacctcctgggctcaggcgaccttcctgcttcagcctcccctgggatgcatgccagcacacgtgataatttttgtattttttgtagagacaggattttgccatgttgtccaggtaagtcaccaactcctggactcaaactatctgcctgcctcagcctctcaaagtgctgggattacaggggtgtgccatggcgccaggcctccattgtgtcttgaaaggcactgacatttgttctgcaaccttctccctttccttgtcacagtcatctattagtttcaggctcactacccaccccgcaaccccaattctctaaagttccttgacctcgattgactcctccacctcctgccatccttttgggaccctcgatgtccaacataccagccttgtgggcactaaacccaaggccagtgatgcccatctcacttttctattccattgtagctgccacaccccaaactgtctcatttcctggaatatccatttgaaggcctgaactccagcaccacactctctgctgccagtttgccagtcctctcctcagaggccctggccttggagcccttctctcatctgtctcccagtccatcagctccccgctggttttattaacagttcctgtcctctaggactagagctctggcccatcactgcaatcgcagtctttctgtgccctccacctcctcaccctcttgtccttctattctatgcaagcaggaaacttgggtttcataactaagagctatatttctgtagataccttgccagattatagcagattatagctggacaccactacacgatgatggtttctaaactccactaggtcttcagtgactcttgtctaacttgtcgctctagcatctcacactggttatgcgaaatttccaccactttcctaaaaccttccatctcacttcagacccttctgttgtccatgttagcttccttcagtggttggcttcttgccttcacccgaaaaacctcctgtatccgttcccagcaccaatcatcctccaatactcttttttttttttttttttgagacaaagtctcctctgtcacccaggctggagtgcagtggcctgatctcggctcactgcaacctctgcctcccaggttcaagcgattctctctgcctcagccttcggagtaggtgggattacaggcaggtgccaccacacctggctaattttgcatttttagtagagacagggttacaccacgttggccaggctggtctcgaactcccgacctcaggtgatccgcctgccttggcctcccaaagtgctgggattacaggcgtgagtcacccgaagagtgactttttagagtatttgggcggggtgcagtggctcaagcctgtaatcccagcattttgggaggcaaggcaggaggatcagctgaggtcgggagttcgagaccagcctggccaacgtgatgtaaccccgtttctgttaaaaatgcaaaattagccgagctttttggcatccgcctgtaatcccagctactccgggggctgaggcagggacaatcgcttgaacccgggaggcggaggttgcagtgagcccagatcgcgccattgcactccagcctgggcaaaaagggcgaacgaaactccgtctcaaaaaaaaaaaaaaaaaaaaagtcactcttggaagccttaattgccttcctcccctcactgcacccccgcaactctttgctgcagaagtattgttctagggaaccttactggttccaacagacgggtggacctcccaccagactgtgagctagctcctcaaaggcaggcattctctttccttttccttctctcctgagcgctcctgcagttcctggggcgtagtaggggatccacaagcgtttgtgaccagtgaagttctttacaagggtgagatctgcacgggaggacccgagcgagggtctcggcttgccaggaagccggggttccccgggaagcgtggagttcacccgcgcactcgaagtgcctttgcaaagtgagccacgggagggaggagcggtccccgggctgggcgaggcctggggcccagtgcgtccagagcggagggtgacgggagctgcctgtgctggaggaatcactttttaggcgcttgttttggaccattgcacaaacccgggtgcaaaccccaagctcaccagcgtgagtgagctgggccagcagcagggaggagaggggaaggtgggcgaggagggcgccgcgcaccccgaggcccgtgtgggcggtggga

SEQ ID NO: 43486 - DNA, 2300 bp, Homo sapien
ccgggttcaagagattctcctgcttcagcctcctgagtagctgggactacaggcacccgccaccgcggccggctaattttttgtatttttagcagagacggggtttcaccgtgttaaccaggatggtctcgatctcctgatctcgtgatccacccacctcggcctcccaaagtgctgggattacaggggtgagccaccatgcctggtcgtgtttatttttttaaattaattaattgattttttttttgagacaaggtctcagtctgtcgtccaggctggagtgcagtggcacggtcatagctcattgcagccttgacctcctgggctcaggcgaccttcctgcttcagcctcccctgggatgcatgccagcacacgtgataatttttgtattttttgtagagacaggattttgccatgttgtccaggtaagtcaccaactcctggactcaaactatctgcctgcctcagcctctcaaagtgctgggattacaggggtgtgccatggcgccaggcctccattgtgtcttgaaaggcactgacatttgttctgcaaccttctccctttccttgtcacagtcatctattagtttcaggctcactacccaccccgcaaccccaattctctaaagttccttgacctcgattgactcctccacctcctgccatccttttgggaccctcgatgtccaacataccagccttgtgggcactaaacccaaggccagtgatgcccatctcacttttctattccattgtagctgccacaccccaaactgtctcatttcctggaatatccatttgaaggcctgaactccagcaccacactctctgctgccagtttgccagtcctctcctcagaggccctggccttggagcccttctctcatctgtctcccagtccatcagctccccgctggttttattaacagttcctgtcctctaggactagagctctggcccatcactgcaatcgcagtctttctgtgccctccacctcctcaccctcttgtccttctattctatgcaagcaggaaacttgggtttcataactaagagctatatttctgtagataccttgccagattatagcagattatagctggacaccactacacgatgatggtttctaaactccactaggtcttcagtgactcttgtctaacttgtcgctctagcatctcacactggttatgcgaaatttccaccactttcctaaaaccttccatctcacttcagacccttctgttgtccatgttagcttccttcagtggttggcttcttgccttcacccgaaaaacctcctgtatccgttcccagcaccaatcatcctccaatactcttttttttttttttttttgagacaaagtctcctctgtcacccaggctggagtgcagtggcctgatctcggctcactgcaacctctgcctcccaggttcaagcgattctctctgcctcagccttcggagtaggtgggattacaggcaggtgccaccacacctggctaattttgcatttttagtagagacagggttacaccacgttggccaggctggtctcgaactcccgacctcaggtgatccgcctgccttggcctcccaaagtgctgggattacaggcgtgagtcacccgaagagtgactttttagagtatttgggcggggtgcagtggctcaagcctgtaatcccagcattttgggaggcaaggcaggaggatcagctgaggtcgggagttcgagaccagcctggccaacgtgatgtaaccccgtttctgttaaaaatgcaaaattagccgagctttttggcatccgcctgtaatcccagctactccgggggctgaggcagggacaatcgcttgaacccgggaggcggaggttgcagtgagcccagatcgcgccattgcactccagcctgggcaaaaagggcgaacgaaactccgtctcaaaaaaaaaaaaaaaaaaaaagtcactcttggaagccttaattgccttcctcccctcactgcacccccgcaactctttgctgcagaagtattgttctagggaaccttactggttccaacagacgggtggacctcccaccagactgtgagctagctcctcaaaggcaggcattctctttccttttccttctctcctgagcgctcctgcagttcctggggcgtagtaggggatccacaagcgtttgtgaccagtgaagttctttacaagggtgagatctgcacgggaggacccgagcgagggtctcggcttgccaggaagccggggttccccgggaagcgtggagttcacccgcgcactcg

SEQ ID NO: 43487 - DNA, 2300 bp, Homo sapien
gaaaactggacagcagggaaatcagagttgtaatcaattcctcatgtattccctcaggtcaccggaactgtcctcctcttctcaaaatagttggggagcaaggaatcatggatgtccttccacaattaatgactgaagactgtgcttgggaaatgtgtccatgaactccctgctctgaaggggtagttatgcacatcactagttttttgttagttttacatgttattgtgggaaaagttaaaaatataaaaaagacaaatgtttaactacccagcttcaacccatggccaggcttgtttcatctatatccccccccattccccccacccccatcctgtattaatttgaagcaaattccagacgtggcatcatttctttttttctttttcttttttttttttttgagacggagttttgctcttgtcatccaggctggagggcaatggcaggatctcagctcactgcaacctccgcctcctgagttcaagtgattctcctgcctcggcctctcgagtagctgggattacaggcgcccgccagcacacccagctaattttttgtatttttagtacaaacggggtttcaccatgttggtcaggctagtctcaaactcctaacctcaggtgatccacccatctcggtctcccaaagcgctgggattacaggcgtgagccactgcgcctggcccagatatggtatcatttctttggtaaaatctcaatatgtgcggtggataaacagatggataaacaaaacgtggtgtatacatacaagggaatactattcactcttaaaaagaaattgacacagccttgaggacattatactaagtgaaagaagccagttacagacaaatactgaatgattccacttatattaaggtatctagtcagatccatagagacaagaagtagaatggggggaggagggggatgacaaggacaggaatggggagttgtttcataggtagtttcagttttgcaagatgaagttctatttttcttttttcttttttttttttttttgagaatggactctgcaacctctgcctcccgagttcacgccattctcctgcctcagcctccctagtagctgggactacaggcgcccgccaccacgcccggctaatttttttctattttcagtagagacggggtttcaccgtgttagccaggatggtctcgaactcctgaccttgtgatcctcccgcctcggccttccaaagtgctgggattacaggcgtgagccaccgcactcggactatttttcattcttttaattgcaagatgaagagttctgaagattgattgctcaacaatgtaaatgtacttaacagtactgaattgtacacttagaaacggttaagatggtaaatcatattaagatggtaaattttgtgtattttaccacaattaaaattttgtaatttcacaattccttaattttatcaactacccagtgtccaaatttccagttcttataataagtatcatactatttttttcaatgtgtttgctgaattaggatcctaataaaatgcacaaggggccatgtgttacatctcttaagtcttttttaatctataggttccccaccacactcctctcttccttgcaatttatttgaagaaacaaggttgtctgtcctgtggcttctcatagtctagattctgctgacagcatcccattgtgttgtttaacaccttattctgtcctcttattccctgttgggcttggcggctttgggttagttttgaattgggctcaggaggaggctaaagacatccaattctgcgggaacgcagccctgcgggacctgaaaaggcgagactaagtcaccagccaagctgcctagaggcaatcttaaaatgggactggctaggactgtgacaaagacaccgtccacatgcctactaggtcagtcacctacaaagctggcgaatgaggaaaagagggaaggcagggctacgctgggaaagctctttgtcccctatccacgcgcacaaaacagttgtcacaactgacgtcaccaggggcggagcctttggacggaagtgacgcttgcgcggccgcggcggagtcgtcatagaggcggggctgcggcggctgcggtgttcctccgacttccggacatctccctgggagtcgcgcagagtggagtcaaaggcaaccagtgctcgctgcggtctctggggatcgggaccgcggcggcggcccgcgagcgggatgttccggggcttgagcagttggttgggcttgcagcagccggtggcaggcggtgggcagcccaatggagatgct

SEQ ID NO: 43488 - DNA, 2300 bp, Homo sapien
aggccgaggcgggcagatcacgaggtcaggagatctagaccatcctggctaacacagtgaaaccccgtctctactaaaaatacaaaaaattagccaggcacggtagcacgtgcctgtagtcccagctactcgggaggctgaggcaggagaatcgcttgaacccaggagatggaggttgcagtgagccaagatcacgctattgcacaccagcctgggtgacagagcgagactctgtctcaaaaaaaaaaaaaaaagggataaagaggcattctcccacccttttgtcatttctacttgccaaaaaaaaaacaacaaaaaaaaattagaacataaaatgagccactcttccaggcaaaaacaaacaaaaataaaatttcacacaccctgcaggtcaccaaagccattccttgggtgtgtacatgtttgtgtgcatgtatatgtgcttttttaatgctttttttcttttctttttttttttttttgatacggagtttcgctattgttgcccaggctggagtgcaatggtacaatcttggctcactgcaacctccgcctcctgggttcaagcaattctcctgcctcagcctcctgcgtagccgggactacaagcatgcactatacccagctaatttttgtatttttcatagagacggggtttcaccatgttggccaggctggtcttgaactcctgacctcaggtgatctgcccaccttggcttcccaaagtgctgggattacaggcatgagccactgcacccggccttttttttttttttttttttttttgagacaaagtcttactctcgtccaggctggagtgcagtggtgcgatcttggctcaccgcagcctccacatgctgggttcaagcgattctcctgcctcagcctcccaagtagctgggactactggcacataccaccacatcggctaatttttgtattttttgcagagatgcgatttcaccatattccccaggctggtctcaaactcctgaccttgcattcctcctgccttggcctcccaaaggcactgggactacagacgtaggccaccatgcctgacccattttgcttttatttagttttgttttttgtattcaaccctcaagatttttatttaatttctctgaagcgagcacagttatcaatggattattattattattattattattattattattattattattttgaaacacaaacttatggaaaaattggaggtacaacataaagaacttttctccaaatcacttgagacctaatgttgcatcactcccaaatgccgtagtgttttacaagcattctcctacatgaccacagtgtgcccatccaaattaggaaatgatcatttacacgttattaccatctcactctcagaccccattgaggtttttccatttgtcccaataatgtcctttttagcaaaaaagcccagttcacactcacaggttacatttggttttcatgtctcatcaatctccttatgtctgttgcatgctgtcaggtggcacatgcagccatttgtcccattactgttcatacttgggtcatttgatgcaggtggtgtttgccaggtttcttgactgtaaagttactcttttcctctttgaatgtaattactattttgctgggatgtgctttgaaactgtgaatactctattcatcagactttccatgtatttatatttgtacagactcatgcaatggtctgtaattttgatgctcaaattattaccaatttgaggccaggcatggtggcttacacctgtaatcccagcactttgggaggcctagttgggaggatcacttgagcccaggagttcaagactagcctgggcaacatggtgaaacctcatctctacaaaaaattagccaggcatagctgggcatggtggtgggcgcctgtgatcccagctactcaggaggctgaggcaggagaattgcttgaacctgggaggcggaaattgcagtgagccaagatcgcgccactgcactccaacctgggtgacaaaagtgagactccgtctcaaaaaaaaaaaaaaaaaaaattagcaaggcatagtggcatgtgcctgtagtctcagccacccgggaggctgaggcagaagcatcacctgggctggtgagatcaaggctacagtgagccatgttcacaccactgcactccggcctggatgacagagtgagactttgtctcaaaaaaaaataataataattaccaatttggccaatgggagactattcaagctgacttgtgtctttctaactcatccccatcatttcttcacacgtttcct

SEQ ID NO: 43489 - DNA, 2300 bp, Homo sapien
aaaaaaaaaaaaagatatgcatttaattcaattaaatatttttcatttctctgaaggcttggggttaatggcatagttcttttcttttctttttattttttgagacggagtctcgctcttgttgcccaggctagagtgcaatggcgtgatcccggcttactgcaacctccgcctcccgggttcaagcgattctcctgcctcagcctccctagtagctgggattgcaggcacgtgtcaccacgcctggctaattctatttttagcacagaccgggtttcaccacgttggtcaggctggtcttgaacttctgacctcaggtgatccgcccgcctcggcctcccaaagtgccggggttacaggcgtgagccaccgtggccggcctctttccttaataaagataactttattgatttttttcattccatacatacttaaacaatatagaaaatcatgaaatttgaaaccagcctgggcaacataatgccccatctctaaaaaaaaatttttttttgaggaataacttacttttgtgtgtgtgtgtgtgatggagtttctcctcacccaggctggagtgttcaatggcacgatcttggctcactgcaacctctgctgcccgggttcaagcgattctcctgtctcagatcccaaatagctggaattacagaagcccaccaccggctgggggcggttgctcacacctgtaatcccagcactttgggaggccgaggagggcagatcagggggtcagaagttcaagaccagcctggccaacatggtgaaacccctctctctactaaaaatacaaaaattagcccagcgtggtggcacgtgcctgcaatcccagctactcgggaggctgaggcaggagaattgcttgaacctgggaggcggaggttgcagtgagctgagatcgtgccactgcactccagctttgggtgacagcaagactccgtcttgggaaaacaaaaacaaagaaaaaagaaaagcccaccaccaccaccatgcccggctaatttttgtatttttagtagagacggagtttcactgtgttggccaggctggtctggaactcctgaccttgtgatccacccgcctcggtcccccaaggtgttggcattacaggcgtgagccaccgcgcccggcctcataatgaattatttaagacaatatatcaggatttcatgatggtctgtgcctttcagaagctcggccattggagatctggttccatcagatggaaatagggaatattcctgaggaaatctcccctctcccccccaacatcatatcaataaaaaaaaaaattcggttcagcaaaccgagtttgttgaaaaaatttaggtaatgaaacgagtaaatggggtgggagaaagcaggatacattcaacatgaatgaagtgccaagtaagtgtgcagaagccggggcggttcaaccaaggtgaatagaatgcggcacctatcccgcgggagctcgggacaagtaaaccgtggtaacaactctggtggaggggcagggctcggggcaggtgcccgagcacgaaacttcaaattctaagagccaatacaccttccgtcttgaaagtcgtgaagtattttcccttatccccaaatcattcgcgcccaattcctaagaacggcaacaaaaacaaaaacacaagaatgtgtcgccgatcgtgctccttctcaaacacggggatatttctaaactttccgcgaaagatcataacgagtaccttcctatagccagacatcgcccccagaaaccgcaagtcccactaggatgcacacgaagcacactgggtgcagcactctccccttttcagaacgccgccttatgtcccaatcccgatccgagcctgcgagctgtggccgcacgccctgctgggacttgtagtccactcccgagtcccattcccgatccgcgcagactcacacggcctctatctgcccttcggtcttgctgaagcccagcccagtattcaatgctccccatccccatctcgctccgtcccctcgggggccaacctcctccggtcacgtgggaagtctcacatgcggcgattggtcgtgggggctcgggggcggggcgaaaggccctgcgagattctgtgccccttgtcgggccgcttgtttggctgctgccgtcacctcatggcgacgcgggtagaggaggcagcgcggggaagaggcggcggcgccgaagaggcgactgaggccggacggggcggacggcgacgcagcccgcggcagaaggtcagtcagggggacgccctcgttgttgtcgggcccgggggatgttt

SEQ ID NO: 43490 - DNA, 2300 bp, Homo sapien
cctggcagttaggttagggacagggccctgagtgaggggctgagcttcctaccacccagttaatcagcccaggcttgtgtcggagatagcataaaacatctagattttgctttcttctacagcagtgatttctcaaacttgagcttgcatcagacgcctgcttgttaagaccaggattgctgggcttctcccagaggctgagtcactagttcttgggggcggaggcagataatccgcctctctaacaagcatgcaggtgatgctgatgcagcatgtagggcctttctagcttgacttattaggctttcaaaaaaagcaacaaagtacgttttgcctgttttatataacacttcaggaaagaaagaaaacgctggggcacatgtgtacaagaaccttgttctcggctgggcacagtggctcacgcctgtaatcccagcactttgggaggccgacgcaggcggatcatgaggtcaagagatcgagaccagcctggccaacatcgtgaaaccccgtctctactaaaaatacaaaaatcagctgggcgtagtggcacgtgcctgtagtcccagctacccaggaggctgaggcaggagaattgcttgaacctgggaggcggaggttgcagtgagctgagattgcaccactgcactccagcccgggcgacagagcgagactgtctcaaaaaaaacaacaaacttctcatctaaaaattggaagaggagaaatctatgtagaagtgagtcattttctgtatgtaggcctttgtgtctgctactctttgtcatatcttgaatttccttaatagttcaataggaaatgtcttaaaaagtttatctttggctcacgcctgtaatcccagcgcttcgggaggccaaggcgggcagatcacgaggtcaggaaatcaagaccatcctggccaacatggtgaaactccatctctactaaaaatacaaaaattagctgggcgtggtggggcgcgcctgtagtcccagttactcgggatgctgaggcaggagaatcacctcaacccaggaggcagaggttgcagtgagccgagatcacgccattgcactccagcctggcaacagagcaagactctgtctcaaaaaaaaaaaaagtgacaaaaggaatttaattttgtccccctgaaacaatatgctaaatctcattcggtatagttatgggtgcagtcatgctagctagctagaatgttaggaggctgaagagacggaacatgttccataggtgagaagtgtccaatatggctgagctggcttaatttttttgtaacctgattgatatttaacagggttacagaaatcctcttttttcttacagaaaacagtccgtgataaagagtacaaggcccttcaaataaaactggaacggttagagaagctgtgcagggctcttcagacagaaaggaatgagctcaatgagaaggtggaagtcctgaaagagcaggtatccatcaaagcggccatcaaagcggcgaacagggatttagcaacacctgtgatgcagccctgtactgccctggattctcacaaggagctgaacacttcctcgaaaagagccctgggagcgcacctggaggctgagcccaagagtcagagaagcgctgtgcaaaagcccccgtccacaggctctgctccggccatcgagtcggttgactaagatgaggtgtgatcactgtattgagagatatattttgtgtataactttctctgttagtagttaactattggttttgtggtgaaaattttcttactttttctaccatatctgtattttcttagaactactggacttatgtggtacaggaggctgcttagcagttttgaatagtttaatctataaattttcctcagctgtgttgcacatcagcctcgttctccctccactggaatgcatgtgttcattgccttgtcctttctctccctgctccttgcacattatcatcctaatgaaaatttcactgacagggccgaccattacaagggaactttgttctgacgatggttccttgatgtgaaaacaatattaatttaaacgtcttagcccccccccccataatattattcagaaaaacaaaataccaaggcgattagttttgtctaataacccatttaaatgccaagtaaaaataaaactcctagtgttgggtcagaagcatatttgattgaaattagctttttgaaaacatttatatctcgggacaaattgagatggccacatgcctagaatcctaagtttcggcagaatatgtatataaagatgtcacttgtggacaaaatagt

SEQ ID NO: 43491 - DNA, 2300 bp, Homo sapien
atagttgaatagttttgtttgtaatgaaattattttaaataagatgttagcatttaaattcaatctcttgaccgggcacagtggctcacacctgtagtcccagcactttgggaggccaaggcaggcggatcacttgaggccaggagttcaagaccagcctggccaatatggtgagacccccgtctctactaaaaatacaaaaaaaatgagccaggcatggtggcttgcacctgtaatcccagctcaggaggctgaggcaggagaatcgcttgagccctggaggcggaggctgcagtgagccgagatcgcaccagcctgggtgacagactgagacactgtctcgagggaaaaaaaaaaaaatcagtctcttatagcccttgttcttttttttttctctccttctctcttagactgtttgtctgtgggatataaacgcaggaccaaaagaaggcaaaattgtggatgctaaagccatctttactggccactcagctgttgtagaggatgtggcctggcacctgctgcacgagtcattgtttggatctgttgctgatgatcagaaacttatgatgtaaggtggaaaattcagtgggatcttgttaaatgggtgacctgaatgaccatcagtgattgctgcaggctgtagtttgattttttttttttaagttatggctttaaaaaacagctttaggtagcttactcctgtaatctcaataccttgggaagctgaggcaggaggattgcttgagaccaggagtgtgagactctacacaaaatttaaaaacaaaaaattagttgggtatggtggtgtgcacctgtagtcctagctactcaggaggctgaagtgggaggatcacttattatttagaaaaaaagaaaactaggtatggacatgtgaaggaacatacttggtgtggtggtaaatatcaaaattgagatccagagtgatgccagttggaggtcgaggaggaaaatgatttcatcaaggtgtggccacagggcttcattcacttataatcttataaagaaatacctgaggcaaatgtgacaaaatactgggcatttgtcaaaactagttttaggtatcagattgtgacattattctctacatagtctgtattttgtgtacacttgaaatagttggtaattaaaataggaatctaatttaaaaaacaggactaacagccctagcttgttctctgtaggtttcgaatgtatcatttagtggtcgaggtctgaatcaccagctgtgtggttggtttcttcatgaaggggagcacatagtggagctagttgtggagtgcagtgacagtgatgtgaggccgaatgtgagtgtgtcatccctgggtgccgtgtgcctttacctttgtgttttagatgggacaccaggtccaataccacctccaagccgagtcacttggtggatgcgcacactgccgaagtcaactgcctctcattcaatccctacagcgaatttattctagccaccggctctgcggataaggtttcgaagtttttgcattatttggtgtttataaaacccagttctcttgtgccttaatcagatatttgaaaattcttaggtaaagcatagaaatcattttcacttgttatttttctttagaccgtagctttatgggatctgcgtaacttaaaattaaaactccataccttcgaatctcataaagatgaaattttccaggtatgtgacagttttctggtgtctgtatgtcaggaaatgaaatccagggattcatcagttaagctataccagactcgtgggtccactattgaaaaaaatgtcttgtacgtggtgttacatggagatgctcatagggtaaggtacaccttgttgaagaattaaaaagcttctgggatggttatggggtcgaataaatttattgagatcccaggctgagttcctcagtgctggggagtgcagccttcctgaggacaggatggagctgagcccttgcagagcacttgaaagtcggggacaagagagtgaggccatcaggccaaggataagataatagagtgcaagatgggaaaatatcagattagaacaacagccacaaacctagcagcggatgattctttaaatacattttcaaaattatctattactaggtccactggtctccacataatgaaactattctggcttcaagtggtactgaccgccgcctgaatgtgtgggatttaaggtaacttacagtcctgtgacaagatactgcataaatgtgcctatctggcaagttacatagtcattcataaactagaaaagcaatttggtaatc

SEQ ID NO: 43492 - DNA, 2300 bp, Homo sapien
tagtgtctgtagttttatcggaacgcagccaaatgcatccatattttccatggctgctttgcgctgcaaagcgacagagtcgagcagttgcccccaaagcctaaaatatttactatctcggtccttttagaaaaagtcttgccaactaatgtcctagaatatgagggctgtattgcttaaacacccttccaactctcttccctctctagccaccccctcagccttaggcactaacaagattccttgacccagaatggggggagggcgttataataatgaacggtattgtatcggaaacaacacagtaaatatctacagaagggaatgtgactggttctgccactgactaacgtctgggtttgcgtcccggtcagaaaagtgggcatgacagcggcatctgcaagatagcatctgagcatgaaggcacttggaaaggtatcaaggcagcaaatgttccgggggtgcttttgcaagaggagcctctcccggagctggacgtacacttcggttccctttgcacgcaggcaccttggtcgcctcccccaactccgtcccctctgctcctggccctcattttcttctatttcccttttggccttgcagccagctttctcctcccccgacacactcctcaggggctatgaagttcctgagcagagcagggctcaggtaagcaggcccagggtagttcagccctgctctctccagctccgccagcttggggtggggtcgcgctgggacccctgcaggtgacaaaaatgactcagcaggggccggggctgggatgagaaaggaacgccagtgcagggacaaaatcccctgaagcgcgaagaggccgcaaaccatcatcttaaggacccaaacatcgaacaaattaaaatgtaacagtgtaaatcggcttcggcccgccggcggcctgtgccgccacaggctgcacatttagcctaacagggcggcccggcggcttttgcaggcagaaaacgcccgcggcctctccaaaagctctcctccgtctgagaccagccccacctcggcccgaccgggccccaggaaaggccagtcggctggaggagaacatttcaggggtgcagagaattgcatgtccgtgattatcagggagactttgaaggcacagtaatctctcgagaacaggaaccattttcccctcttgctctgagattttgcttggctaagcggcggcagcctccctgcccccctctcacccccaccaccgctgccgctacaagcaaccacgccccgcgggccccaaggctcgccgccccggggctcgcggcccccactcagccggccagccgcgcctccatcagccccgccctcgcgcgcccccatccgccccgccccctcgggccctcatccgccccgcccccgcgcgccccatccgcctccgcggccggccctgggagcgccgggcgagccctcgcgcctgcgcatcgccaacttcctgccgcggcacgctccgcccacccccagaagcccgcctccgaacgccgcgtgaaacccgcccgccgcgcgtcattggtctcggcgccggagccgttggctcccagacccgcctctccgcctcctctcacttttcccagggcggatgcgcctgcgctcagctgcctgggcgggctgggaggcgcgggttgaaaagtctcgttccaagtttggagagagagagaagagcgcctcagacctcggtacccgcgagcggggaggaggcaggaaagaaggacgcggcgtctggggagcacccaggcagcaagacggggcccgggctttcgacagtggggagtgtgacgcgcttgggaaaggcaggagcgccagcggtcgggctgctcttggctaacgagaggagtccgaggcggcggcgaggggcgaacgacccgacgcaagatggcgagtaaagagagtaagaggccctgcggggcggcgcgcgccggggccgcggggggcggcgggcgcgcgaggccgcggcacgcgccggcgaaaggcgcgaattggcgtgcggagcagggggcggggccgggcgcgagactgggcgcgcgcctcgaggggcctgcgcgggacgggaccgccgcgccgagggctccgagcacttccggagccgggcgcggggccgagggctgggcccccctcttcccttccctcctccagcggctgcgctccctccggcgccctcggccccggggcggaggcggcccccgccgctgggaagcgagcgccgcggctctttctacgcgcgcgcgcgcgttgaccgcctcggggtcgcggcccttgtccgggggttgctgggg

SEQ ID NO: 43493 - DNA, 2300 bp, Homo sapien
aaaatgcaaaactaatgaaatatgctgtacatgacactttcggattaaatgcatgatagtgtgtgaatattctcagaaattcccaaaatatttgttccatatttccttctctgaccctcactgaggtaaacagtatcaagattttaaagccaagtcgtctgggaagatttcttttctttcagtcctttaaacatttcttttaataggttttggaaatcatgtctacttgtcagaaatgagtacactgtattaaagggatacaaatcatctcccaagccgcctcttgctttgcacacgaggttctctttgaagcagagccataaggtacaattattctagaacaaggtgggcaaactacagtcctccgactaaatctaacccaccacatgtttttgtatgaccctcgagctgagaatggtttttccgttttcaagtgatagaaaaaaaaaatcaaaagattttgtgacccgtgaaaacgattttagtgtctgtagttttatcggaacgcagccaaatgcatccatattttccatggctgctttgcgctgcaaagcgacagagtcgagcagttgcccccaaagcctaaaatatttactatctcggtccttttagaaaaagtcttgccaactaatgtcctagaatatgagggctgtattgcttaaacacccttccaactctcttccctctctagccaccccctcagccttaggcactaacaagattccttgacccagaatggggggagggcgttataataatgaacggtattgtatcggaaacaacacagtaaatatctacagaagggaatgtgactggttctgccactgactaacgtctgggtttgcgtcccggtcagaaaagtgggcatgacagcggcatctgcaagatagcatctgagcatgaaggcacttggaaaggtatcaaggcagcaaatgttccgggggtgcttttgcaagaggagcctctcccggagctggacgtacacttcggttccctttgcacgcaggcaccttggtcgcctcccccaactccgtcccctctgctcctggccctcattttcttctatttcccttttggccttgcagccagctttctcctcccccgacacactcctcaggggctatgaagttcctgagcagagcagggctcaggtaagcaggcccagggtagttcagccctgctctctccagctccgccagcttggggtggggtcgcgctgggacccctgcaggtgacaaaaatgactcagcaggggccggggctgggatgagaaaggaacgccagtgcagggacaaaatcccctgaagcgcgaagaggccgcaaaccatcatcttaaggacccaaacatcgaacaaattaaaatgtaacagtgtaaatcggcttcggcccgccggcggcctgtgccgccacaggctgcacatttagcctaacagggcggcccggcggcttttgcaggcagaaaacgcccgcggcctctccaaaagctctcctccgtctgagaccagccccacctcggcccgaccgggccccaggaaaggccagtcggctggaggagaacatttcaggggtgcagagaattgcatgtccgtgattatcagggagactttgaaggcacagtaatctctcgagaacaggaaccattttcccctcttgctctgagattttgcttggctaagcggcggcagcctccctgcccccctctcacccccaccaccgctgccgctacaagcaaccacgccccgcgggccccaaggctcgccgccccggggctcgcggcccccactcagccggccagccgcgcctccatcagccccgccctcgcgcgcccccatccgccccgccccctcgggccctcatccgccccgcccccgcgcgccccatccgcctccgcggccggccctgggagcgccgggcgagccctcgcgcctgcgcatcgccaacttcctgccgcggcacgctccgcccacccccagaagcccgcctccgaacgccgcgtgaaacccgcccgccgcgcgtcattggtctcggcgccggagccgttggctcccagacccgcctctccgcctcctctcacttttcccagggcggatgcgcctgcgctcagctgcctgggcgggctgggaggcgcgggttgaaaagtctcgttccaagtttggagagagagagaagagcgcctcagacctcggtacccgcgagcggggaggaggcaggaaagaaggacgcggcgtctggggagcacccaggcagcaagacggggcccgggctttcgacagtggggagtgtgacgcgcttgggaaagg

SEQ ID NO: 43494 - DNA, 2300 bp, Homo sapien
tggctattcagggtcttttgtggttttatacaatttttaggattgttttttctatttttgtgaacaatgtcattggtattttgatagggatcacagtgaatctgtagatttctttgggtagtatggtcattttaataatattaattcttccaatccatgagcatgggatgcctttccatgtttttgtgtcctcttcaattttttaaatcaatgttttgtagttttctttgtagtaaaatatattttttattagtgcttaaccctagactgatgttttcttttgggttattgtttcccagtgaggcttcatgcatatatttctgcaggtcttcccaggaaaaatgacatttaaaaagagaatttttggaaaagagatgcagatatgtgggcctgatgctggaacttccagtgcaatggtgggacagactttttttccagtggcttcttttctggtctctctttctctctctctctttgagacagagtcttgctctgttgcccaggctggagtgcagtggtgtgatcttggctcactgcaacctctgtctcttgggttcaagtgattctcctgcctcagcctcccaagtagctgggactgcaggcactcaccaccatggcccagctagtttttgtatttttagtagagatgggatttcaccacgttggccaggctggtctcgaactccaggactcaagtgatctgcctgccttggcctcccaaagtgctgggattacaggcatgacccaccgcgcccggcctggactttcttttaaaagcggctagagggccaggcgtggtggctcaagcctgtaatcccagcactttgggaggccgaggtgggggggtgggggtggggtggatcacctgaggtcaggagttcgagaccagcctgacaaacatggtgaaaccccgtctctactaaaaatacaaaaattagccaggagtggtggcaggcgcctgtaattccagctactcgggaggctgaggcaggataatcgctcgaacccgggaggtggaggttgcagtgagccaagactgtgccattgaactacagcctgggcaacaagagcgaaactccttctcaaaaaaaaaaaaaaaaaaaaaaagtggttagagtactagccagggggaagcaagcacatttgaaaaatatagtgtgtatgctttaggatagggaggaatggagagagagaggaggacatggaccggggtggaaaaatgtggggtttcgcattgatttttggtgtgagcttgaacaagttttgtactaaaaaaaatgcctgttttactactaaaataagtgcttcctttggagagtgaggatcctctgttactgaggtttgtattttcaggccctagcatataaatctgctacatacgagatattcaactggttttggaggaatgaaggtgaacatggcagtttcctcatctgtaaaagcagggtttggacgaaatgatctgcaaaatgggtctttttgtactcttactactctagtatttacgagtaaccgatgttattccttataaagtctcaactcctggtttgagccatgtctgacgagggggcctaactccaataccaccctgaacactctggggtcagtgggaccctgtttgtacagacgtctgcgtcttccggctctttaggacataagcagtactgctatggaagaaaggaaacctaatttcccatgccttgtccctttctggaaagggcatggcgtggtgtgggcaccacacctgccccagccttctagcaagaaaacaacacaaccttccccgctccccgaaaagagcttctctccagttgggtctagatgcccccttcccaaccagggcggatggccaaaggctccgctcccttgcagggtaggcttggaaaggcacggggcccgccttcctgggcaccggagcctgtgacgggcggagggcgtgcggcgcgctgggttagttacctggcgctgggcggggcaagcgggaggcgggggcggggccggggtgacatctcaggctgtgattgggccgcgccgcgcctgtctccatgtgccgcgcagctgaggcacaacattcaagcccgggggtggggccggcgcgcgccgggaggaagcggccgcgcggcagctgcggggcgtgggggtggtggtggcggcggcggtggtggcggcggcggcggcggcggcagctgaggccgaggaggcggtggctgtggcggacgcagcagcaccccagctagggacagggctccgccgcgcccccttgctggccccatggaggcggcagcggcggcggcggcggc

SEQ ID NO: 43495 - DNA, 2300 bp, Homo sapien
tcccatgattccttttcctaaggttgaacaatctgggaaggagggatgggaaggttaatagcagcatctatgggaggtttttcccaaggatcagcagacttaagcattcttggctgcaacttggcctaaatcagttttcccttggtgactatcttcctaagtgctctttattgtatatttaggtgattgtggttttgcatttctgtcctctctctgatctcttgctacagtctgaacaagtgtcggaggccgagttactcccacagctgagcagagccccatcccaggctgcagaaagtagtccagcaaagaaggtaaggtcagcctgaggatgctgtcagatggcgttgcgagtcccaccccgggcttcttatctctattagctgatctattgttttaaggtttctgtgtcctgaaatgaatgtcaatgatccagatttcctagaatgtgggttctttgtgaagattggggtcctgaagattcctgggcttgacccttgatgcattttgtacatgacagtacatactcaacctccttagccccccagctaaacatggtggccttgtttatggcaagagctaaaagggctgtggggagggacagatgtctttagcaaaaccccatccacctgctaagcctctgtgaatacctcttggggtggggtagtctctcctttttggtctttgtaccatggtttcctcttgcatcgtggcattttcacctggcatctgcccagccatgccattgggtcacctgtaatttgctcagtaagtacccctcactcatcatgctctccattcatctcctcaccctcttcttgtccttctcccaggctcttctttcagagagagtgggccttgggctcaggagcacaggtgaggtagagtcctccaaagaagcagaccaactgtgtccttccagaatacactgtggctctttttcttgactttatgtaggaattggggataggagaatgatgagcatatgactaagacctttaaaaacttccaaagcttaggtttttttttgtttttgtttttgtttttttttcctgagacagagtctcgctttgttgcccaggctggagtgcagtggcgcgatctcggctcactgcaagctcccaggttcacgccattctcctgcctcagccttccgagtagctgggactacaggcatcttccagcaggccggctaattttttgtatttttagtagagacggggtttcaccgtgttagccaggatggtctcgatctcctgacctcgtgatccgaccgtctcggcctcccaaagtgctgggattacaggcatgagccactgcgcccggccaaaatttaggtttaaaaggcttcaaagtgaggcaggagcctatcttgtcttcagttaggaaaggccccatggtgtgagatgcacacagggtctgtgtgagtttcaggtgacaagaagtaatagacttcttgaaacatttaaaaagaaaaagaaaaaagggaagaccactggactctgatgcctgtgtccccccagttcttgctgagccatgggtcagtaaatagagtaccctcctgatcttggggttggggctaaaggcatgtgggacactggaaggaagagtggagggaacattgaaatgtttaactttttaatttttattttgttttaaatccacaggatgtactgtattctcagccaccatcaaagcccattcgtaggaaattcagaccagaaaaccaagctacagaaaaccaagagccttccactgctgcaagtgggccagcttctgcggcaaccatgaaaccgcatccaacagtccaaaagtaagtagaccacataaacaagagtgaggtaggaatctcgctctgagatgtcgacggatatgtaaatgtgttgacatttacgtgcgcaccaacagaaggatttcatggttgtaagtttatcttgctcatctctgtgatgggattcaagtctcccagtcacatagaaggctttataagctataggacttaacctgacctaaaggggcaggcgagtcctaggctgtggtgtttggtttggtttgatttctttcccttcctctcaccttctgttgtttcctactcctcttccttgtgagggcccaaattttcctggcaagatgaaagtattgtaagtggcaattttgcctctctgcctgtgttatctccttttccttcagggcaaatggctagctccttcacccacagacacactttcagtaggtgtggtatgtgattcttttaaaatctccgtaaagagtttctgttgttggtcgcctcagcacagaat

SEQ ID NO: 43496 - DNA, 2300 bp, Homo sapien
gctggcctgttttttagcttaattacccccttgaaccctttctctcctgggcctttgcccttcctttctgatcacttattttgggagccctggaaggaacttgccaataatctgaaactccctttaggagtgagagtcccacaccacttattcattgcccctgtcaatgctcagatgggcccgctccactggcacccttgctattaataggacagtgctaggtaagggagagtgagaggcagggcagcctgttgccacaaggcttgctaaccagatgcctttaatatccctcattgttctccatgcttccatgtgtttagggagaagtgtctggcttgcctacccagcagaactcatgttcagaattttgaacgtattaaaaagtcaagctcaatttaaaaacagctagctcaacgcttttcagatttgtgagataaaaaacaaaccttaaaagaccttgttccaaaatattcttttctttcattttttatttggaaacaaaaccaaatttaaagttgcaagaaatgtacaatgaaccctgatatgcccttaacctagactattttgaacattttgccatattttgtttttttctcccttcatacatacacatctttattatcatcattcttcttcttgttgttactgaaacatttatgtgtactttgcagacatcatggccctttacccccaaagcctcagcctggatcttttatgaacaaggatatgtccttgccgaaaattttggtttttttttgtttttttttttttgttttgtagaataagacaagggtctgttgaagcctttaaaaccaaagcgtgggccagtccaaagtgctgactgttggagcctcctccctctcccgcctttagagggaggagaggagacaccaccgcaggtctggaggactttattgttgccataaaacatattttttccatgttctctttagaaacacgaaaagaggctgcattcccaagatctggcttgtggctttaaaataaaaaatatttttacagtatactttttggaggcatgaaagcacgtgttttattaacatttcccaaactctttttactgacggcatacagcctgcagcctgctgcaatcgaaaatgcatgcctttttagaaattatacctttcagttaactgaaggggaaaactttcccttcttctgtaaatcatcatctctctgatggagaactttaaaaatcctgtgtatgatcagcacagtagggtgacgaggaggtaatgccgtttatctcacccaacgtgcaatgagtttcgtaagcagttttctggggattttgctcattggtggtttgggtctcattcacgatattctatagagcccgtgcccaaaacagggggccacgtgatgcctgggaaggggtataaacagcactctggctgctctggccacatggagatgcgcctacgccctttgccctccccagttgtctccttgcgttcatagagcccggggatctccaaggagcagcccagttttccctgtaagaacccaaaggtcttgtacagagctggaattcggcgaaaaacttgctccaacacgccaaatctgccgcatcctcaataccccaccctcttccctctgcgcttactgcccacacccctactcccaacttgaggactccccgcccccaccacgctgacagtctcaattccaaccccttggatgtgaggaagtgtctttgcgcctgaacgcgcccagcacggcgaggccaccagtgactcccagcggccgcacagggcgctgcgcccccctcgccccggcctcccccgccctgcgtccgccccgtcacccccgcgcggcctcctgcgcccgggctggaggcagattcctctctccgggttttcagagcgcctttccgaaacctcctccccgcccagccagggagagagatcccgggcgcaatcgctccccggagcggccgaggggcgcgcggggagaggcctgcgccggggtactttcaaactgaggcgcgcgcacacactcacacccacccacccactcacccacacacacacagacacacgcacgcccatttatataggcggcggcgacggcagtggccggggtggcgacggcgagcacagaaacgatggagttgagccagtcgaccctggttggaagcaagtgagaagagaccaggcgcacccctaaatttctgtgcggagcgcttgtcatcctccccagggaacggtgcacccaaaggaggactggctggactgatttgctagggagagggcggggaagaggaggcaaggtgagcagag

SEQ ID NO: 43497 - DNA, 2300 bp, Homo sapien
ctagattggcctcatctgggatgttccccctggcagtgtcctcttatcgtctagcaggccagcctgggcttgttcatatggtgatcacggaattctgagcatgcgagcagaagtgcgcaaggcctttcgagatccaggcttggaactcagacagtgccacttctgaattgcattggccaaagcaagtcacagaaccaaacccagattcaagggtttgagaaatagactccacctctcgatgggagggcttacaaggtctcattgcaaatggatggggagataccgaaaggggaatgattgcagccattttgacaatctagcagagagatcaactaatacgtgactggctattatttctatgcgcatttctgggtttgggagaatttgtaggggaggaggaaaagagatacagatcatttataattgcagaaagtaaaaataagacttcagttgagatttaatgagctaatctatttcaagtgctttgaactcgcatgtagtaagagctctataaatgttgctgttattattatcatgaatgcatatgtcacttgaggtcctcaacctcacttagaagtgaagcaggaagattcatttgacaacaaaatgaacaaaacttcagatacttgtgcaaaacatataatcaagtgaaggaatttaaataaaatacccccagcaaaaatagtctggagcacagaacagacattttcctctgggggttgaaggtgggaagatgtgtccagttttgccttctgtgaccagttcaccctgttgggcttgtttccaaggtaaggtcagagcttgccgggttcttgctaaactggagtctgtaataaagagggtacccaggtgtgaagagttttatgttctcaggacttgttctttgtttatttagttagcctttattaagtgcattggagccttggagggctctgcagtggcttttgttgcatgataaaggtggcacatagcttttctttggctgacttgggctcccaagtgaaaaaggcagagagggccctgccagcttccctggctctgccccttcagggcatttcagggagcagtccagtgactgacgccaaatgcccttgagcactgtgccagccctcttgactggaagctggggaaggaaactttctcaggccctctctctctttgcttctatttcccctttcattttgtggtctgagcagcccccgcccctccttgcgtaaacccctctgcagttagcatcaacaaatcccaagttgtttgtatgtgtgtctaaaagaaaaattctctgaggattagaagcagacacaatagagggagtgctcccttttgctttaatcacttcaggctcctacgtgttgacaggaagttttgttagtatccaagtttaaggaaaggagcattcaggggtggcattttttttcctgcgttgaattcttaaagtaagtttgataagatatctggtaaactacaagccgctccctttttaaataggcttcactgcccccttggcctgcctgtaaaagcgctgctcccttcaaagggacccataatcacgccgagtctgtgggttgcacgactatacccactgtcttatctgcaagttgagtttgatcttcctggctgaaacctgtgagatgttcctttatgtctccacattcttttcttccctttctgctcccaaccccacccccaaattaattggtgtctggtgactttttctaccgcttcctcttgttttctgtggcttttgtctagggcagtgggggagggtgattcttccctcacccccaggggacatgtggcaatgtctggagacatttttggttgccacaactggagaaaaggggcatctggtgaggagaagtgaaggatgctgctaaacctcctacaatgcacagtgcagcccccacagcagagaatgatccagcctcaaatgtcaccagtgccaccacaaggagcccctgatctagcaggttgctttctggtagggtgctcctgcttctgatatggctcctccctctctctcttcttcctcaagaggactgttcttgtgtctagtattggttacatcacccctgcccttaaataactaaactcacagaaggagaaaatttttccttaaggatgctactgactctggaatccttgagttacatgtgaataactgggtcgtgcatgtcagcattaagaaataatcacagaactcctgattctggtttgctctgggtggcagctgtgctgggtttaccaatggaggaacttcatggctgctcatctttgactctttttctgaggaaccaaat

SEQ ID NO: 43498 - DNA, 2300 bp, Homo sapien
cctcagaaagaaaatatatcctcttcctttcagtttctttttttcaccttcactgatagatttcatgttccaacaagtcctgctgatctctttttgtgttttatttctgtcttctaattctcttctccatctctgatctttgctacctatgggaatagggctgctggcctagtgtccacagaagaaaacttctggaaatcaggaggcattgtgcatccagggtcctagagctgttacattctagacctacggacagcaccccagcaagagctaaccagtgcttgcatcaaaagtgcacatcaggtttgttgagcaccaaactccttttattttgccatctcagcccagctttcccctcagcccttctgcaaaggtgaaaggcaagttcacaggatgcagggccttctttcttccctcacatctggtttgattctgggcagctaaatagtggctttgccatgaacaacaaaagctaattcactgtggtggtttttaaacaccaagtgcaaatatttttccttttcagcttggggtcactggaagggaaaaaacagggctgagagggagattaaccttttaaaacctattatgacttcccagaaaaaataaaacaatggcagcatttcctttcattcgcgacagtctttttatgagtgattgttgtttgaggcaagattggggccctgaagaagatttttaaatactagcttagcttggttttctactcaaaaggccaccatgattgcttttaagaacccacacaaatccctgtaaagcccagggccaccctctttgctttctctctcttctgtcttcatctctggctgaccttccctccttttctccagccctttgctttcttccctcaatcaggagcctgactctctgctaaagggaggggatcagtgcaatcagccatgccagccactgatgccactgacagatgcttgggaggctgaagattctgtctgggtcatttctctgaggttccagccagactttctgttgatctgggctgtcttaatgcatcccagagcctcagcgccgttcagttcctcttcggaaatgaagtcgcccattctggttcttgctgcgcatgattaaggagcagaagtatccaatacagggagtcacagccatcagcacaaatctggcagatgagaaaaaagcaagtctatctgcctcactagtagtccttttaatcttctctctggactgcagaggaaaagctcgtctcccactcttcattagtttatcttctttccttctctcttccctttcagcttctgcacacagattcacttgctgggctcaggtgggaggcaaatcatgtgccatgacaacataaggctattagggcaaagatgtggaagtacctaaactctccctttcttgccaagaggaagatctgaacagggtccaggatggttgctgtttgtgaagtggtttgagtattcttgctatgcgctattactgctgttatcagcatcacgagagtctaacatgttgatacaggtggtgtgtgttgagggcgggtgggtgggaagggatcagaaattgatttgtaacctgcaaagagcaaactccagttgtatcgcctccacctgcaccattcttgtcctttcggtgtgtgcgcaaatatttgcaaacctgttgaatagcgcaccctcacaccaacctaaaatttcacagccaagtaagccagccccatcctggtgagaagaatgggtggcaacctggggcagctatggagtgatgggatgaaatgtattccttctcctgatcaggcagttggtgtaggggctgggctgctgtggctccctggatttatttgtccagcttcctgtctctggcagtgtgctaatggtttcgatagccacatggcacttggcagagcttcttaaactggtgtggcccgagactctgcattctaacaagctcccaggttgatgcctatgctcctaaccccctggccaactgcaattggagtagcaaggctgtaaagaagtcccactgcaacctaaactgctccagggatgaaaaaggaaagtgctaagcccctcctctggagacagggtgtgtccaggctgccctggagtcctgatttgccattcaagtgaaccctggagggattagcagccagcctagcacttgggtgagaccatctccccctccaggggggagtcctagatgcagcacagaggttctgtgaaaatctgccatcctccttgcagaaggttgccctctctcgccctccatcccccccgccgtgcttgctgacttaagcagatcagctttca

SEQ ID NO: 43499 - DNA, 2300 bp, Homo sapien
agcaatacaatgaccacttggataaagtgagaggccatcgggcaaactcctttacctccactgttgcagacctgctggatgatcccaacaacagcaacacaagtgacagtgagtggaattacctacaccaccaccatgatgcctcctgccgccaggattttagtcctgagcgtcccaaggcagacagcctgggctgcccaagcttcacaagcatggccacttatgacagctttctggaaaagtctccatcagacaaagcggacactagctctcacttttcagtagacacggaaggatactatacctccatgcactttgactgtggtctcaaaggtaataagagctatgtctgtcactatgcagccctgggcccagagaatggccagggtgtaggggcttcccctggtcttccagattgtgcctggcaggactacttagaccacaagaggcagggaagaccaagcatctctttcaggaaaccaaaggcaaagccgaccccacctaaacgtagctcatcattgaggaagtctgatggaaacgcagatatttctgagaagaaagaaccaaagataagcagtggtcagcacctgcctcacagttccagggaaatgaagctgcctcttgatttcgccaacacgccttctcgaatggaaaacgccaatcttcccaccaagcaggaaccttcttggataaaccagagtgaacaaggcattaaggaacctcagttagatgcttcggatattccaccattcaaagatgaagttgccgaatccacacactatgcagacctctggctcctaaatgacttgaaaacaaatgatccttatagatctctatctaattcaagcaccgctacgggtaccacagtcattgaatgcatcaaatctccagagagctctgaatcccaaacatcacaatcagaatcaagagccaccaccccatctcttccttctgttgacaatgagtttaaactggcttcaccagaaaagctggctggcttggcatctccatcaagtggctattcaagccagtctgaaacgccaacatcctctttccctacagctttcttttcaggtccattgtctcccggaggtagcaaaagaaaacctaaagtcccagaaagaaaatcctcactacagcaaccctctttaaaagatggaactatatcactgagtaaagaccttgaacttccaattatacctcctacccatcttgatctaagtgctcttcataatgtcttgaacaaaccattccaccaccgtcatccactgcatgtttttactcataataagcagaacacagtaggagaaacactgaggtcgaatcctccaccgtcccttgcaattacaccaacgatcctgaaatctgttaaccttaggtccatcaacaagtctgaagaagttaagcaaaaagaagaaaacaatacagatctcccttatttagaggaaagcacactcacaacggctgccttgtctccaagtaagattaggccgcatacagcaaataaatcagtatctcgtcaatactccactgaagacaccatactgtcctttttagactcttctgcagttgagatgggaccagataaactacatttagaaaaaaactctacttttgatgtgaagaatcgctgcgatccagaaaccataacatcagctggtagcagtcttctagattcaaatgtcacaaaagaccaagtgcgtacagagactgagcctattccagaaaacacgccaaccaaaaactgtgcttttcccacagaaggatttcagagggtctctgctgcccgcccaaatgatttggatggtaaaataatacaatatggacctggtccagacgaaactctagaacaggtacagaaggcaccctctgcaggtctggaggaagttgcacaacctgaatctgtggatgtaatcacatctcagtcagactcaccaactagagcaacagatgtaagcaatcaatttaagcatcaatttgttatgagccgccaccatgacaaagtgcctggtactatcagctatgaatcggagataacatctgtaaattcattccctgaaaaatgttccaagcaggaaaatattgcttcaggtatttcagccaaaagtgcctctgataacagcaaagcagaggagacccaaggaaatgtggatgaggcttcattgaaaggtcagtcactgataactttgtcataaaggaaatgtgtctcatggcacttcctggaattttttcttatgttcccaataatacggtacagccctgggtgttggtttccctccactatttctttgcacttatta

SEQ ID NO: 43500 - DNA, 2300 bp, Homo sapien
aatccgaacttttcttctgttgtttgcactgatgcgattttttgttcttttatgtttatacaacgtatctatgttgtgtaggggaaattttttcattttttaaaaattctactttggttttgttgttgttttgatttgtttttggctaagtagaggacatggactagttgtagcaaacagaacatgctgtttgctcttgccaaaggtcagtgagtgagtgcatttgctgcagtggtggcacgtagagaactagatggtaataaagatttaaaactatgaagaaggttacagtgtaactattttggtactagaaccagttcatgctggccgaaacgacaatggtttatggacttgcatccattttgtatttttgtaatatttgtaaatatgaactttttaaattgctgcaaagatggtttcttttgtaagatgttttcaacgtttacattcaatccaagcctttgtatattttagagctgtgcaacactttaagtcttgtatttatttttagtaaaaatggtgacagtttcattgtgaacccctctcaaaaaaaatgtatcagaaaagtttgattacctagaaagtgtgtatagaaactgcaaataaacgtgactgcaattaaacaaccggtttctctcttcactgttacgtaattgatttcttggggcttcgcaacagtgttttacaggcaacaggacataagggcagggtctgttatggcaaaagtaggagcaaaaagaacatagaccagcctgtccaacatggtgaaacccgtctctactaaaaatacaaaaattagctgggcatggtggcagacgcctgtaatcccagctactctggaggctgaggcaggagaatcgcttgaacccaggaggcagaggttgcagtgagccgagatcacaccgctacactccagcctgggcaacaagagcaaaactccgtctcaaacaaaaacaaaaacaaaaaaaaaacatatactatatctataatgggctttaatctagcttcgtatttgagaggaaaaatgatacatttccaacgtccagtatactttctttgtagctcctctctgggccaagaaaagatgtatagctttactttgaaatatctgcctgctttgcttctgataattactcagactgtgtctccttcccaagatgagcagcctcgatataagtatgtaagactatatgccactagatgatgtcacatagcctttattacaatagcaaaattctatgccaggtactgttctaagtgctttgcatacattaactcatgtagtccccatattatacccattttacagatggggaaaccgaagcacaaagcggttacttggcttgcctaaggccataggaggactgtgttggagctgggggtccaatccagtaaatctgccttcaaggtctgcgttagttccccagtccaacttgtgggtgctggagactggaaatatcttgcccgccccccaccctggcccccctcgcccttcctaccagacctggctcagggcaactgctaaggccccgcccctctcctcattccaagtcaatcactggcgtgcgtccaggaaacccagtttacgacgacgtctctggtgcgtcacagagcgcgggggaggggcgggatcacattaaaaaaaaaaaaaagcttcggacaccccaacaacgaaggggggacaccacgtccctaactacaacgccactagaagggttgcgcatgcgcgccagcctcctgcgcagccgcagaaaccactcagcgcgcgagtctctgaaaggcctaacgtccattttcaatcctgcgggtcttgcgaaggaaaacctgaggtaagaggccccgccccacagccatctcctcagcaaattcccgccctcggccccgccccacagctatctcctcagcaaattcccgccctcggccccgccccacagccatctccttagcaaattcccgccctcacccaaggactgggagagcacccgcggattggccgatcaacggtgacgcctgtcagtggccagactccgattggtcagcgggtagtcccgccccccccccccccccccccccccccaaccgcgagtgtgggaattcggcgtcgcgggagctctctgatccactcaggggtcagggcatcactggtctcgcgtgcgcgtgaccaggcccggtttccggtgccaggacctttccgaagcgtcgagtggcctaacggtcacagctgtcgcccatcggagaggcaggactactgcgagcagttttaccgcgacctccggaggccggcgtgacaggctctgtca

SEQ ID NO: 43501 - DNA, 2300 bp, Homo sapien
acacaaaacctttatggatctttcatccatgaacttgcccaattataattgcccagctgtgtctttagttggattcaggctaggtcttggcaaccgagacctcacataccttatccaagaacttagaacagttatgagatctatagaggaagtctttggttgctgaaatgattgaagacacattcataaatatttccacaggtatcattaattagttggggctgattttaaaccccccaaaacctgattgaaacaagtagaaactgacactttctgttgatattcattattatcaattcttaaacttgcactgtgtgtctttccacccctgtgtggtctgggtacttcttaatttaactcttctttttcaaaagaggaaattcagtatcaaggaatggtactaccagggctgacttctcccttaggcatagtagacacagtgcctggggctcatgtttagggacccacataaatcttttaatttcttttaaaatcagaagaaaaaatgaatttttaggttgaagaaactgttttaatatataatgctattatattcatctttacacaaatgcaattgtaaaatgtaatttgtaatatctttctacggaggaaggagtccacaaaggcaaaagtgctcaagacagacatcattcagcctcagttactaccaccttatgcttgcaacacaacatagttagaatacagcctttcaaacacaagttcaggctcccatactaattataaactgtgttataaaactcagatttgataagaggaaagtcatgtttaatacacacagtattggaacttcagggggctcgagactaccaagaacaactagattcattttattctctgctctgattaaataatttctgctctgctattctctctcaaatatcttcatcctgttttgattaatagaaaaaaatctttacatctttggagaatcattaaaccaatttggttgcttccttggctgtctcaagaattctaagggtttattgttttcagttttaaaatgatcaatagtacaactgacacctactacttatttactggtcagcaatcatacagtcaccgtccctgtaactccagttctttgcccagtatctggcaaacactaggcgcttaataaaggttagattgatacatgaatcacctcttggatggaaattacattacgtaggtggactaatttgatctttcctaatctcccaccttgtgagaagcatcctccaccggtatcacaattggcattttcgggtgatcgctgagcccttcccacctcccccgcttccatcagccagccacttcctcccttctgggctctgttcctcgctcttctccatcctggggtctggaatggtccccagcccgccgggaggcagtagggtcccagctcctccggccctcccccggcgctccccccaaggtcctcctccccgccccgacaccccttcttcctggcaccccgcgccgcccacggccacgccctccccgtgggcgagatcacctgtccctcctccgccgccgcctcctcgggtaccctttcgcccccctcctgctccccctcctccgccgcctcccccaagccctccccttccccgcctcctcccaccccttggtgtatatagtaaaggccgggcgccgcacgcagacacacactcgccaggacacaggcgcacacacgctcacgcacaaccagcagcggcggcggcgacagcgactcggtgacagcggcgacggcggctcccaccgcggcgcacccccttcaggcggccggcggcgaggccagaccggagagttccagcacactcgaccaccccgcggcttcctggaggcggcggccgcgattgcgaggtagtggccgcggcgcccccgtgcgggccggggtcacccccgccctccccgcgcggagctgccaccgggacgcagggggcgcgccgggctgggcgcgcctggcggggcccggcgcccggggaggggcctgctcccgggggcaggacggcgcccggaggccggggccggctgggagggccgggcgggggcggggacgcgggccgaggccgccgcccgtgtggcgcgccggggccccgctcccgttcccggcgccgcgcactggccggcggggccggggactgccggggaggcggcgccggccggcggggcgggggccccgaagtgggtttcgggccgccgcccgcactggcatcgggcgcagagggcggtgcacggcggactccgcgcccaggcaccgcaccgggcagtctccggatctgccgttctgccccggcccg

SEQ ID NO: 43502 - DNA, 2300 bp, Homo sapien
acaaaattattccacattaatgtcctatttctgtcccaaagcaccaccccacacgcacacacaaatccagacccaccctttatgaaccttttttccttccctttgcaagggcagccaggatgaaaaggcagaagggtgccactgtatgtttatttgggaatgggggccatgaagcctatttcttctgcattaatctgaatcaatataatctttcctgaaaacataagcacctcaaagggcagcaaatatgaatcacaactgccagtgaggatcaaacattaacccagggttgtgatgaggccaacaaaagaaataggctagtaattgccttccaggatatcaatccctaccttatacacacataccccctcaacacacacaaaacctttatggatctttcatccatgaacttgcccaattataattgcccagctgtgtctttagttggattcaggctaggtcttggcaaccgagacctcacataccttatccaagaacttagaacagttatgagatctatagaggaagtctttggttgctgaaatgattgaagacacattcataaatatttccacaggtatcattaattagttggggctgattttaaaccccccaaaacctgattgaaacaagtagaaactgacactttctgttgatattcattattatcaattcttaaacttgcactgtgtgtctttccacccctgtgtggtctgggtacttcttaatttaactcttctttttcaaaagaggaaattcagtatcaaggaatggtactaccagggctgacttctcccttaggcatagtagacacagtgcctggggctcatgtttagggacccacataaatcttttaatttcttttaaaatcagaagaaaaaatgaatttttaggttgaagaaactgttttaatatataatgctattatattcatctttacacaaatgcaattgtaaaatgtaatttgtaatatctttctacggaggaaggagtccacaaaggcaaaagtgctcaagacagacatcattcagcctcagttactaccaccttatgcttgcaacacaacatagttagaatacagcctttcaaacacaagttcaggctcccatactaattataaactgtgttataaaactcagatttgataagaggaaagtcatgtttaatacacacagtattggaacttcagggggctcgagactaccaagaacaactagattcattttattctctgctctgattaaataatttctgctctgctattctctctcaaatatcttcatcctgttttgattaatagaaaaaaatctttacatctttggagaatcattaaaccaatttggttgcttccttggctgtctcaagaattctaagggtttattgttttcagttttaaaatgatcaatagtacaactgacacctactacttatttactggtcagcaatcatacagtcaccgtccctgtaactccagttctttgcccagtatctggcaaacactaggcgcttaataaaggttagattgatacatgaatcacctcttggatggaaattacattacgtaggtggactaatttgatctttcctaatctcccaccttgtgagaagcatcctccaccggtatcacaattggcattttcgggtgatcgctgagcccttcccacctcccccgcttccatcagccagccacttcctcccttctgggctctgttcctcgctcttctccatcctggggtctggaatggtccccagcccgccgggaggcagtagggtcccagctcctccggccctcccccggcgctccccccaaggtcctcctccccgccccgacaccccttcttcctggcaccccgcgccgcccacggccacgccctccccgtgggcgagatcacctgtccctcctccgccgccgcctcctcgggtaccctttcgcccccctcctgctccccctcctccgccgcctcccccaagccctccccttccccgcctcctcccaccccttggtgtatatagtaaaggccgggcgccgcacgcagacacacactcgccaggacacaggcgcacacacgctcacgcacaaccagcagcggcggcggcgacagcgactcggtgacagcggcgacggcggctcccaccgcggcgcacccccttcaggcggccggcggcgaggccagaccggagagttccagcacactcgaccaccccgcggcttcctggaggcggcggccgcgattgcgaggtagtggccgcggcgcccccgtgcgggccggggtcacccccgccctccccgcgcggagctg

SEQ ID NO: 43503 - DNA, 2300 bp, Homo sapien
cacgcctgtagtcccagctactcgggaggctgatgtgggaggatcgtttgaacccgggagatccaggctgcagtgaaccatgattgagtcactgtactccagcctggatgacagagccagaccctgtctcagaaaaaaaaaaagaaaaatatattaaatataaaagaggactggagtaatgagagattagctaataagaaaactctaaaatattctttacaaattacaggtataagaaacaggccctacccttagggttgagacacagtgtctaagactcactgaatggctgcactggtggactttgctgtaaatctgttctctggaatttgctggaaacccaaccttgcaacttcacgaacttgctgcaaatatgccctctttaaagtactggaaatctgccctctcctgcaggagaaagctacactttgcatcaatgtcctcagagagcacaggtcaaccaggaggcaaaaaaactctttcctcctacattctccttttagcaccttctactgccaaaggcttaaattgtgtcactggcaaagggaaaaatatttaaagggcccacatccattttcacagagtcggcaaaagtgggtgaagttggaggtgagaggtaacacattggtaaccagcacagtgtatccatttcagccctcagtttctctatgcatcctcctacacatatgtacactctggaacgatagcaaaacaagtctgtgtttctacctaacaatatacacctttgcttctcacaagtaaagaaattcttacccttcccccaaatgaggagacacacagtcacaagagtcattgtgtaactgacacagtgaagaaatggatcccaaattccaggcactgggtgctttctattttataacatttaattcttagaatcttgtgagggaggtggtgttcaaatataaataagacatggtgctgtcctccaggaacttaggagagaggcatgttgacgaggatttataatgtcaggcaaagtaatttaaatactaatagggacgtgaagattacctgctgtgggatccttcttaccagggggctataggaaagtgtcttgatggaggtattattcgaacagatgtagtaccgagagaggttttgaaagatgtgaagacaatagtaaagacatggaatcaatctaggtgcccatcaatggtggactgaataaagaaaatgtggtacatatacaccatggaatactatgcagccataacaaagaacaaaaccatgtcctttgcagcagcatgtacacagctggaggcctttctcataagtgaattaacacagaaacagaaaaccacataccgaatcttctcacttgtaagcaggagcttaaagatccggtacacagggacacaaagatggaaacaatacactgcagactactagagggggcaggaaggaggggaggggttgctaggtatttattaggggcacattttcaaagttggcttgttttcggatttgttcccaaagccggtatcggatatgaggaagcaacctggaaaacactagagggtctgaacgaggaggaagagaaacacgtagggtgttgggaacagaggcggaagttgggagatcctgcgaaatcggagtccctttggagtgggggaggccatcgaggtgtgcgagggcccggcccccttgccgcgtggtcgttaagaggaaaggccctgatttggctggtggcggatcgcctccctcccggctctccccgagtgcggcaaaggaagggctgcctttgagagtcccgcaggaagatttagaaagtctcttacattggactttttttttatgatgtgcgttttgggacgagcagaattacactgttggcttccagttcattatctctatctctatctctacttctgtatctatatctacatatattcacacacacatatatagtacaaatatatatatacatacatatgtatatttttgtaaaagggactctttaagaaagtaggtcaaaagtgggggagagggcgaggccctttgacccccaggagtcacgcacgcatgccaagcgctactgcgcagccgcggagacgtggtccaggctcctgcccgggcctcattgtgcctcggacaacgagtgtacgcagttaccacacagttaccaagcagttacctcagagccgcggcgcagacgtaggcctcaggtctcgggcctcaggtctcgggcctcagagccagaccccgccatctcacgatgtcagagaggacccaggaacagggtaaagtgacctcgcctcaactggcccgctagcttgggc

SEQ ID NO: 43504 - DNA, 2300 bp, Homo sapien
ctttttgagatggagtttcactcctgttgcctaggctggaatgcaatggcgcaatctcggctcactgcaacctctgcctcccgggttcaagtgattctcctgcctcgggctcccaagtagctgggattacaggcatgcatcaccatgctcagctaattttgtatttttagtagagacagggtttctccacgttggtcaggctggtctcaaactcccgacttcgggtgatctgcctgcctcggcctcccaaagtgctaggattacaggtgtgagccaccccgcgcctggcctgttctggctctttctaaatggcaacaggatattgccctacttatacatgtcatgacttcctggtgggtctgaggaaggatgtggagagtgaggaaatggtgtggctgtggtaacaagatgccagcccgaatccaggagtcaacacaggctgaggccaggaatgtctcaagagagacgaagaaaagtgtacaacagaaaggagagggactgtctttccaggcctcagagtcatgagaggtttgtgagtccagacggtacccaaggaaatgataaattacaactgttcaagcactactaatctgagaagtctctatcagagacatggttggtgatccagatccctagagacagttctgtgctgtcaagaggattggaggatccataatggtctgacctgacagtgatgtgaaagagaggactcagcctcccaaattttagcactttctccaatgtgatactctcaggggatgctgttaggtatgaaaatctcaaggcaaaagacaaacacattgagagtcactatttttgaacataccttcacttttcctctgcatttggaatttaacttcatggggactgctcttgggggatatgtccccaactagtggtgaacttgtggtgcctggcacacttcgagaaaaatcctgggagactgaagtatgaatatacataggatttctacaggcaggattcaaataatttcctgaatttagtgatgagctcttagaatcttctgaaagattctcctctttgggaatggcacttcccccagcaaacaatggttctcctacagggaaaaagacaaaggaggctatcttcaatagacttacaattcaaatactactaaaaggttaaaaatctcatccctagcaatagttcacttaacttgtgctatactgaaccacaatgctctaacacaaagttcatggctatcccctccttggtatggatgcatacactgattgattgagacaaagttttgctcttgttgcccaggctggggtgcagtggtgcaatcttggttcactgcaacctccgcctcctgggttcaagcaattctcctacctcagcctcccgagtagctgggagtacaggcgcctgccaccatgcctggctaatcttttgggttttttttagtagagacagggtttcatcatgttggccaggctggtctcgaactcctgacctcagatgatccacccgacttggcgttccttggcatttatattaatggacattgtcctacagtccaaagtgattccatatcacctatatttttcatagtaacttactatcatttgccagtcttgccaccaaggctataaacacctcactgaagcatttgtttttagaaatgcagttcttcattactatttgttataatatgatcatacagttggtttctaacatttgtttactacttgggcagttacattctctggagaaaggcagtaggtttttctattcttctttctgccagtttttagcaatacaaaagtgaaggaaaaaggttattacaatttttttttaatctatggagaaatgacagccgtccacttctgaagggaatgaagggttcaacaaagctgtccaagtagtagcctaactgccaaacttgtttgggcaaatttacctccctacctccaatactaccaccccaagagtatacataagtggtagcagagaaacatttcttcccagtcctgggaggtgtaaatgctatttaccttcagacgcatactcctttgttttggggagcttaggagagagaggaacaacatatggtacagtttgctgaggagatcgtttggtgctttgcctttctgttacatcttcttttgctgttttcaaagaaaaaacagttgtctgttataacgaactaatatactcaagcattttcatatcatcagcatgaaacacttctgtttctacatcatttgcctacaataccttcattgagaacttctcaattatttgatgttcatgaataacatgtgtctatttcatcc

SEQ ID NO: 43505 - DNA, 2300 bp, Homo sapien
gtgtttctttgttaagagtggccactgaagtctgcttggttagcttaatgtggttagctaatgattgggtagatatttccttaaatgcctggaaccagtgtatctcccagccttggccaagggattttctgtgtgtgttgggacataacttcagtgctccaagaggcagcttgtaagtcaaccttgtgcagagcctcaaggtcagccagagatgaaagattagggtgttctcatgtctttcctggacatgcatgtatacatctgtgcatatgcatgtgaaccgtctagattcccaggaatatgtttgtgtttttcaaagtctcctaggggacatcttatacccagtttttccttttaagctttttggccagcctgttgttagccctgactggtaatattgtctcaggcagctgcaaagttaaacagttgccaccattttcccccgtcagatgccctggagatggggttgttcacacagaacaagctctaatttaggtcaaaaaaagacaaaccctgaaaaggagcttttcagtgagcttcgagactggtctaatagtgatagttctctgggcatggggcttttggagagctccaaacccattgtgccccctccagcgattatcgcatggctgtttttcacacctgctgtagttgtgaagtgttggttttcaaggctactgtgaaaatggggtgagggggattatattagggcaagttaaaatgccacagaatttgctgtttttttctgagatccatccatttttcttaaacactttggattgttgcaagtctttaatttccagagttttgaaaaagatagtttttatagtttttgccagtgttttcattgtttttatgaaggagtagatttttggaggtctttgatcagtcatcctggaagtgcttctctgatgatttaaaaaatactttgtaaattacctggcttttcctagttatctctgtaggaacactttgctcccttagcttactacaatacgcagaagcagaagtcgagtcaattttatatttgtttcagccccagatagtagaccatacccagcttgataaacttttcataaagcatgagtacattacaaataaatgatgaagactttttctaatcttgccgagattctgaggtaaataaacatttatagaaaactatattttagaactcgaatattccatattattaaatgggtatgaaaagccagttatttctttccttagaatttaatgtcttaattgtagaaatatgagatatgttttgcctgttggttttacagtccattattaaaaatgaaactaaagtggtaagagctctactggactcattgggattcactgagtaactagattgagctaaaggttgctcatcataagattttgagaagcatgcctggccctcagccaaaattttgaaccagatgaagtttgactttgatactcattgcaatctttcttctcttttgaggtctactatcagactttttagatttctcttacaccttatttgtccttttagttggaggttaaatcaggatatttgttgatacttagggtataactgataattaaagctgtctttactttcaggatcatgctttacggagtggtcctttaggtagaagtgcatttggttgaatgataagtaagcagtagacttgttttaagggtagctctaggccaggattgttacttaacaaaatggatgttcattatattatatcatttaatttctctgaagttttaactcctctggctcatgggaacaattttctcaggccattttagacacattttaatgggttgcctcactgtcttgtgagatatttagagagatctgataacctcagaataaagaagcctagatatgctccttctggaaatgcttttaactcttgaatattatttcagtgaaaatataaaataggatgaaatagacacatgttattcatgaacatcaaataattgagaagttctcaatgaaggtattgtaggcaaatgatgtagaaacagaagtgtttcatgctgatgatatgaaaatgcttgagtatattagttcgttataacagacaactgttttttctttgaaaacagcaaaagaagatgtaacagaaaggcaaagcaccaaacgatctcctcagcaaactgtaccatatgttgttcctctctctcctaagctccccaaaacaaaggagtatgcgtctgaaggtaaatagcatttacacctcccaggactgggaagaaatgtttctctgctaccacttatgtatactcttggggtggtagtattggag

SEQ ID NO: 43506 - DNA, 2300 bp, Homo sapien
tgaatttcaaatatttccattgcattgggattagaaggacagtggccactaattaagaatttatgtcctcctcagccctgctggtgcccataataaggtttgtttagattaaacctctgtttaatttctttctgttaaagatctccttctggctttttttttttttttttttttttgagacagaatttcgctcttgttgcccaggctggagtgcaatggcgcgatctcggctcacggcaacctctgcttcccaggttcaagcgattctcctgcctcagcctcccgaatagctgggattacaggcgcgtgccaccacgcccggctaatattttgtacttttagtagagacagggtttctccatgttggtcaggctggtctccaactcccgacctcaggtgatccactcgcctcggcctcccaaagtgctgggattacaggcgtgagccaccgcgtccggcctctttctggcttttgaaaacatgtttgggccgggcgtagtggctcacgcgtgtaatcccagcactttgggaggcagaggcgggtggatcatgaggtcgggagatcgagaccatcctggctaacacgatgaaaccccgtctctactaaaaatacaaaaaattagccgggcctagtggcacgcgactgtagtcccagctactcaggaggctgaggcaggagaatcgcttgaacccgggaggcggaggttgcagtgagccgagatcgtgccactgctctccagcctgggcgacaaaacgagactcttgtctcaaaaaacatgcttgaaccttcatcttaggacactccaacattttctcctatgtgatatacattatagaattgataggaccaaatctcactttaatatttgcatatcatcaacctagtctttctattttcgccttaaagtttacttgaatttggcattaacatttaggttttcatttttaaagcattaaataatagatccatttgattctgtgccacttgccaatgtttagatataataaacactttgacttttgcttaatactgcagaagctgcaactggaaaattctatcctgcgttgtagacaatggatatattccacaggagttttttgttctcagttttaagctctgatttccaaatcatgatttaaaaagtatatcatgccctctgcactaagttaggtgatcacagatgcaaaacctacatccagctttggaaagagttccagagagagaagccctagcaatggtttgtttttggctaacatagcacattgtattatttttcaaacaaaagtttgaaatcagcttatacctaacctgagaacgagggacagatgtttttctccggcgttctgtttgctgtaatttgtgctgagagattcactggtcgttttaaagctgtttttacgccccctcctttgtgcgacctccacttgcgctatgggccttgcccggtgggaaagggagcgtgcagaagggaccccaaaacgcactctcggggatgctcctgagtcagtaagcaagtgatttccccctgcgggttcatctagttcccgttagctcaaccccgggtttagaggaagaacgaaatccagagagtgaagctgggaggtgaatgcgtggcaaaaactcatggaaaaaaaaaaaaaaagcagtttcaaggactatgctgcaacccgccaagcagtggctttcctcaagctgctgtaaccagctgcttctccctgctcctcgaacttgcttgagttccgagggaagcgcctgctttttgggtgcgtggccagggtgggtggtggccaggattcgaaggcgacagtgaaggggagcgagttcccgggatggaacttgacgtggaacccggggtcccatcgaggggctccccacggcctcgggtgcttgggctgcgactggtttttcatttggcgtaggcgtggggggtaggaggcaaagtgccaagggctttcccgggctcacagtgtctcatggtccgccactgcctgcggtggcgctcggcttgaccccggctcgggccccgcacgcggcggcggtcaaagggcgtgctcgcggcaaccgcagggcacgcgggccggccgcgcggggggcggggcggcagtggcggttgcggggcatgcgcggctccgcgcgcggcttctcaaacatggcggcggcggtgtgaagctcggtgccggctcgcgcgatcggtgggacagaatttcgttgttttcaccgacgagactggaggtacgtggtgattccgggccccgtaaggaatggagaggcggaggtgtgtcccggaccccgaccgttg

SEQ ID NO: 43507 - DNA, 2300 bp, Homo sapien
actcccggctaatttttttctatttttagtagagatggggtttcaccatgttggccaggctggtctcgaacttctgacctcaggtgatccacctgccttggcctcccaaagtgctgggattacaggcgtgagccactgctcccggcgcatggtactttttaaacttttactaactttctagaaaggttagtttttgaccaaaagacgaattaactaaactgcaagtgactgcaagaaatcctttaccactacttaaaaccagatcaaagcaaatgtccctaagcagaaggtcatatttgtgtatatgggatggcacattataaggcatctaatattactacttaatactaaattggacctatattaacagatgttcagttattgttttttctccatcttctcaatctatacggataattaatttgttacttccggttcaccaggtctaaataaaattttaaaaaattattcatttgagtcaaaggtaatgctgctgaaattcctagtacaaaggctctgatatacagggatgaaaatggagtgattgccccaggagttctggatccacgtgggtgaagctagaggtcacagcactgttactttgcatctggaggaggcaggagactctgcgaagccctctgttgttgcctctgactccattttccctctttgctaattcattgctcctacctgtaaaattttctaatatgcttccactttcatttcctcatcaaatattcaccgttatgaaaaagaaaatcctattggcttggtatcaagtggccaaactgagcatgctgctacatattgttaccagattcactacaggaatagattaagtggattttatcccaaatatctatttcctattacagtactgcatctttctaatttggtggcagctatgacctcatacactgcctattttccgtgcttttcctaaccagaagagaccctatttttctcctttgcttgttaaagcgaaaataattatgcagctttccatagatttgtccccaatgtctttttaaaaaaattttttttctttattttctaaaagtagcattggaaatgttatctccttcaatttcatcacctcttcatcctccttggaaacccgatccatggtgggtattaagatctttacatttgtactggttgggcgatgacttcattgctttcaagccagctgggggatcttgtgtggcagagcatcggaccgaagcggaggtgtgggtcgttgctgctgctgctgctgctactgctgcaacagctctttgcacgcgcccagctgctgtgtaaggaatcctcaggctgctaggtctttgcgcctaactcacccaagggaccgcaagctgctggatgagtgtacgtgtgagtgtgtgttgtgtgtgtgcatatgtgcgtgtgtgtgtgcacacgcagcggcaacagttgggcagcagcagcaatggacttcgatatcatttttaccaacaacagagataaaccatcctccatcctgtatttctcagctcccgccccgagtatgttctccccctcttctccgacttcccccaccccagcccccggcacgggtccctccggagggagggcagggtagctgcgctgcaggcaggattccctcttttttccgcagtgacaggcggattccggggcctcctcgccacctcctacccccgcagccacccctttctcagtcacgatctccccaccccaccaccgtcgaccctctccctgcttccccgctctaccccccggcgtcgactccaggctcgggccccgcccctctcagcctctccagcccaggttgctagggcttggcggggcaaccaaacctggcgtgccaggaggcgcggcgcgcgcgtgagcgcgcaggcgagcttgtataaggaaccagcgttcttcggcttcggagactcgagcacgagcggcgcgagcccgaaccccaggacaagcgcttcctcctcattggctcctaccagaagggggcggggtaaaggcgggatcgggcaaaacctgaggtgctttcccattggtccgaacgggccggctggggcggggcagttagcaaaataggctgcgcgttcgcttctgctagagggcggggccggaggtttcgattagttgtctctgccgctggggaaggtaaagcggcgacggcgtcctcaggagctgtggggtcccctgctagaagtgggggactcggcggggtgagtagtcgcgccgccacccgcccgccaagccttcttacccttacatcggccccgcgtccacccagcttctcctgagagtggaga

SEQ ID NO: 43508 - DNA, 2300 bp, Homo sapien
tgttcctttcattgtaggttcttctgtagcatacgatgctgtttgatagcgttttacccacattagaactatttctccaagcctgctgctgctttatcaactaagtttatagagtagtgtatttttgaaatagtcatttcaaaaatgtttaaggcatctttaccagtagatttcatctcagaaaaacagttcctttgttcttccataagcagcaactcctttgtccattcatgttttatcatgagatcacagcaattcagtcatatcttcaggctcctcttgccttggcctcccaaagtggtaggattgtaggtgtgaaccactgcacctggccatatcatttttttgtgtgtgttttgggtttttttagacggagttttgctcttgttgcccagactgtagcacaatggcactatcttggctcactgcaacctctgcctcccgggttcaagcaattctcctgcctcagcctcccaagtagctgagattacaggcatgtgccaccacacctaggtaattttgtatttttagtagagacggcgtttcactgtgttggtcaggctggtctcgaactcctgacctcaggtgatccacccacttcagcctccatataatctttgtgtctttaaatgggtatgtctttccttctgctaggccgttagtgctggtatttgagttaatctagttaggaattggtgtagccaagtccaaggttgtactactcaccaaatgacagccaataagttaagagacaaggtgttggcgcaaagaaagcaaccttatttggagagccagcaacctgagaagatggtggactagtaatgtccgaaagaaccatcttaatatgaattttcgcctccttttatgttagaggaagagggaagagggaggaggttgaggtcaagagatgactatgatgaccacagacatctaggtggcagtgagggtctgtggaggttgtgaaacttctttgtccttggtcaggtcacaatactataaatctttaacatggctgggcatggtggctcactcctgtaatcctagcactttgggaagccgagtcaggcagataacttgagtctaggagttcaagaccagcctgggcaacatggtgaaacaccgtctctatcaaaaatacaaaaattagctgggtgtggtggcacacacctgtagtcccgctactcaggaggctgaggtgggaggatcacctgagcccaggaggtcgaggctgcagtgagccatgattgcaccactgcactctagcctgggtgacagagtgagaccctgtctcaaaaaaaaaaatcattaacaacgttgttacttgtgtgtacactgcccctatctcttcaggggttttcagaagggactatttgctttaaactataaactgaatttctcccatagttagatggtttcactgggtggtggtgggggggcttagaagcaaaatgatgttagtcatgctaggcttccttttcactgttacattgggctggatttgagtttttttgtgttgttatggttaacctagtgtaccccagttttcaaattctcttagagatactttgtgatcagggtgggaattggtttaccagaacagtgtctgttccagtctaaatttcaggtctccccttcgaagtgtgctttagtgagggtctctttacatactcttgattttctcccgtccctttctcagtgatattctgctcttactgttcctggaagtttgtttgcttggaggtggggaggggtgataggatgtggtctctgttcttgattaagcctcagtttcaggcctgactctcaggatcttgccccttccctggctgttgtattgggctcaatgtggaatcctacccctctcccaggacttgggcccccacccctcctccctgctgctctgatttttcactattgtcttaagggtagaagtaaccattgtcctttctgtcacagtgaaggcttgtcttcctgagtggagataggggagagtgatctgagggtagtgtccagcctctcaggcttagctgctgcccacccccaggtttgcatcacaatgagcctacctcaggactctttagagctctgagtgagtggggtgggggagttggaggaggaagaccctacaggaagttgaggtatcatatcctcaatttctgtgacccccagtggtttcacactatcttttcagcaagccacattggatttcacgcatttactgactcttctacccgttctttttggtgtccagctgtactctccaacaggcgagcacatggtcgtctcctctctcccttcag

SEQ ID NO: 43509 - DNA, 2300 bp, Homo sapien
gagtgcagtggcacgatcttggctcactgcaagctctgcctcctgggttcaagcgattctcctgtttcagcctcccaagtagctgggattacaggtgccaaccactgcgctcggctaatttttgtatttttagtagagatggggtttcaccgtgttggccaggctggtctcgaactcctgacctcaagtgatcctcccgcctcggcctcccaaagtgctgggattacaggcgtgagccactgcacccagccttggatccccttaattctttcacaacactatttatgttgccttctagcatctactcaatttatggtttcttttgattaggccagaggtcgcagtcagtgtctacttcttccctgaggcctctgctgcctgtttcgaaatgccatttcctatgcttgtccccagtggccacccaagatggggcgatggtgtgtgttcattcatctctccatccatctgtccagtcaatacctagagagtgcccagcacctgtgggcattctgctcagctagggggagaatggggagggaggcaggcgaggggagatggcagtgaagtatgcctgaggaggaggggtgcgtgacaggtgtgaagggtgctggggaggtagcacctggggcccctcagccagctcagggcgggcagagatctgaaggctgaggcatggggggccaggcggaggggtgtggacgggaggggatggcctcagggaagggctgcaggccacatgtggacctgaaaagagctcaaccaggcccacagaaggaagaggaaaggggaagaagaagtcaggaaaaatcacaataagagaactggagtgtgctcttcttcaggacacacacagtgtgggaaatgtcacattttctatttttccacgttagaagaaatccagccggagtgccccattgtaatggcctgtgaggagtgtgcagacaggatttttgaaggtcttttctccctatttagactacatgaaccccccacgagcttgcgagggcaggctggccacagccccattggaaggcagacgtctcatgggtggctcctctccctctgagccatactcagtccgagggaccttcccaagttttctgagcgtgcccagagcttagggctcccaagcccatcccagtccagcccctcaggggaatcaggtccctctctgctgcgctcaggccctcaccacatccctgctactttagctggggctgtgacctccttctcttgggcaatgcgctaattcctggtgaggcctagatcttccaggtccataagcttaagggatgctgtcgacaagtttctctctcacatccctctctgtctctctctgtgtctctctgtctctctctctctctctctctctcacacacacacacacacacacacacacacacacacacacacacacttgctcctgcctggggcaaggacagccgaaaccattcattagtcacatgaagctggcctcattctctggagggtgtggcggggggtgcggtggtggggggacggggagggtaatggggacagaacagagtaggatagaggggcaatggatttcctccctattgagtctttgccagaaaaacatgcaaaattcaagaaggttatcaacgtagtctcacaaattcacctccaccaatgtcatgcacctgctgctttttggcaagacgctgtgctctacgaactctacaatctccaaatagtttcactcaatcttacagcaattttatgaagacaggtactacatcatgcccccatttcacagatgaggagactgagacccagagaggttaagcaactggcctgcgcacacgctgagagggtgggcccctaccccaggtgtcattggctggacgcaggcctgcttgaccttgactgcccattacaatcacctgcagctttgtccccatgcccaggccaatgatgtcagaatccctgggggtgtggcctgaacatctgcatttctacagctcctcgggcaattccgaggtacagcccaggctgagccccaccggtctagagtctctgcttaccggattgctgggttgggcagctgaaagcatcagtgcctcggacctggagtgtcgggcacatggaagtgcctcggacctggagtactggatagggagcaggactggagattggacgatgaagggctcggtttgggacgcacggagtgtgaggcttctttgggtcaccacagcagaagtattctcctggaaaatattcagagggcagtggaatgaagcttggggcccgggaggcaggcatcggctcccagacaccag

SEQ ID NO: 43510 - DNA, 2300 bp, Homo sapien
gagtttattatttgtttaaatattggcttttttatctttgacaagaggaatgagggtgtgggccatggtgagatggtggtagcaaaaaatataaaatgggaaggggcactcagtatttttctctgcattttcaacctagttatgcatccttaacagtgtagaaatttgcgtctttttctaacttgagtgtaactctttccctgttattacaatcacttcatcaactttattcttttttttttttttggaggcggagtctcactctgtcgcccaggctggagtgcagtgtcgtgatctcagctcactgcaacctctgcctcccgggttcacaccattctcctgcctcagcctcccgagtagctgggactacaggcgcctgccacctcgcccggctaattttttgtatttttagttgagacggggtttcaccgtgttagccaggatggtctcgatctcctgacctcgtgatccgcccgcctcggcctcccaaagtgctaggattacaggcttgagccaccgtgcccggccttttttaaaaccaccttaaccatttttttttttttttgagacagagtctggctctgtcacccaggctggagtgcagtggtacaatctcggctcactgaaacctcggcctcctgggttcaagcgattctcctgcctcagcctcccgagtagctgagattataggtgcacgccaccacgcccgactaatttttgtatttttggtagagacgaggtttcgccatgttgcccaggctggtctcgaactcctgacctcaagtgatctgcctgccttggcctcccaaagtgctgggattacaggtgtgagccaccacctccagcccaccataatcatttttaagtgtacagttcagtagtgttaagtatattcacattgttgtgaaacagatctcgggaactttttcatcttgcaaaactcaactctatacctattaaacaactccccttttcctcccatcaactttattctgaatggtgatgtaaaaataatagctaattatgtctagcactgtgctaagtattttatacatatgatctcttgtaagcctcaaaataactctcgaaagtaggcattattatcatcatcttacagatgagaaagtttaggcgcagagatattaataacttgccctgaggtcacaatgtaacaagtgctagtgctgcgatttggcacccagtctgggttggcagtctgtgctcttaaacctaccaggctgcactcatctcttgatttacttaaccagccccctaaccttggccatttagattgtttccaatttgttgttgttaaaagtaacacagcaatgcacagctttgtgttaactgtcctcccaccaccaccaaatttagcattttcctgagtgaataggtgtgcacatgatgcctagttgctttcaaagaggggaatccatgacattttcatacaattcgagaatgttagtgcttatgtggcaggaaattgttcaaggtcaccccctaaaaaatgatggcgaagaaaggacgaaaacctgagacttctggttgtagttctctccctccattgcttcccttacattaagatagaatgaacagtatgggccgggcgcagtggctgacgcctgtaatcccagcactttgggaggccgaggtgggtggatcacctgaggtcaggagtccgagaccagcctgactgacatgacgaaaccccatctctactaaaaatacaaaaattagctgggcgtggtggcgtgagcctataatcccagctactcggaaggctgaggcaggagactagattgaacccgggaggcagaggttgcagtgagccgagatggcgccattgcactccagcctgggtgacaagagcgaaactccatctcaaaaaaaaaaaaaaaaaaaaaaaaaagaacgaaaagtatcttcctcgcgaactgaatctcagttgatgctagtatcttccatgagacttccttgttgaggcaggtaactctgtgggttaacttgatggggctcagccaaagacctaagaactaaatggattaagatgcttaatgaggccagggctcaacttaatcccctgctcctgggccagctctccagttcagtaaggtagagctttggccgaggacgaggggaagatgtcacgcaagatagaaggctttttgttattacttctctttggctatgaaggtatgtgctattcaaccattgacattcattgcatacttaatacataatttaattaatatcgttgataaataggaatatagcctgaataatataaatattattaatta

SEQ ID NO: 43511 - DNA, 2300 bp, Homo sapien
gggaggaggggcgtggcttccgggttataggtagattgaaaaatgttctagttgacagttggttgagtttatccaaagacctgggatcagtagaaaggagatgtctgggttaagggactgtggagaccaaagttcttattgtgcagatagatgaagccttcaggtagcaggcttcagagaggacagattgtaaatgtttcttatccgtcctaaggtctgtgtttatattaataccggagaggtataatgaggcatgttggacctctgcttctcgtcatggcctgaagcagtctttcaggttaaattttaaagtgccctggcctaggaagaagtccattccaatggttgggcggggattaaaatttttcttttggtttacactccaaaagctatgaatgaggccaggtgtggtggctcacgcctgtaattccagtgctttgggagcccaagaatttgagaccagcctgggcaagatggtgaaacgccatctctgtaaaaaataaaaaattagccgagtgtggtggcgggcacctgtagtcccagctacttgggaggttgagtgaggaggatgacttgagcccgggaggtggaggctacagtgagctatgatcgcgccactgcactccagcctgggcgcgatcatagctcactctcgacagagtgagaccctgtctcaaacaaataaaaataaataaataaaaagagtactgtgttatagagcagtgcccctcaaagtatgcttcactgtcacctgggagcttattagaaatgcagcttcacagccccaccccagacctactaaatcagattgggattcagcagtgattgggcccgggaatctgtgttttgacaagatccctaggtgacttgtaagtgcattaaagtttgagaagtgctgttttagagttttacgcaaatgagttgtaagactgacagattgtgcaccctttaaattttggtgaaaataagagcttcggctttagtaaattagacctatattgaatcctggattctcctttgaaagtctcccaatcctagtctccagttagctactccgggtcacgagccttagctcaactgtatgcttgactccatcccccatcaacaccttcacctaattaatccacattcaaccttccactgtcaggtcaaagatgacttcctcagagaaggctttgctcgaccccccacctcactctcataaaatgaatacttgtcctttgcaatttcacatttatgattatttgattcatgtttacttctcctactagcctataagctttaggagggaagagaccttaccagttttgctaactggtatatccccagggtgtagaacagtacccggcacataatagatgctcaacaaatatttatttaatgaatatatgaatgaaaccaagccaggaataagtgcacaaaagaaaatgctctgaaaatgttttccaaaggcttctccgtgaacttttaggcatttgaggcagtaatagtgagggttttgaaaagaaagccctggatattttctaggacttgttttttttttttttttttttggcggggggcaggcgtggaacagagtcttactctgtcacccaggctggagtgcagtggcactgtctcagctcactgcaacctccacctcccgagttcaagtgattttcctgcctcagcctcctgagtagctgggattacaggtgcccgccaccatgcccagctaatttttgtttttagtagagacagggtttcaccatgttggccaggctggtcttgaacttctgacctcaggtgatctacccgccttggcctcccaaagtgctgggattacaggcatgagccatcgtgcctggcccaggccttgttttatcaacattcctccaagaaacaaacttttctttgtttaccatgttcatgaacacaaaaatagttgataaggaggcaatggtgacaaaaagaaagctggaatctgcctttcaataagcaagaaatagtcctctcatccaggtcatgtcgtccacattccattggcaggtattgtcatatctgcatcctacattgtgaggtcaccaaggcaacctattaatcattctagaatctacctcttgaagattacaaatgagactgggaaaccctcttcaataagacctgtgtgatgatagattgtgtcctgagcccgcaggtcaggctgaaagagtcaacaaccagcaaagtgaagatctaggagtctgttccccttgaacctgtgtggacctgatcaaacctcgagggaaaggtaagagaagagcacttagtggaccaggtga

SEQ ID NO: 43512 - DNA, 2300 bp, Homo sapien
tgggactgggctggtggtcacaaaaactgcagggcgcactggcaattctgcagggctttgcaggatggtggaaggtggtctggtgggccatactgggcagcagtggtgatccagcccctatggctcagtagcatttctacccaaagacagaacatgtaattaattgtcctacctccatcccagaggtgggtaccaggatggcttccatgcacctggggtgaggaggggttgcctgcacgcccctcttcactcctgacacacagccttcctcaggggcaaatgtgcctcttgcgtcagctctccagggcagaccctggcgagggcacaggtccttcttttatgggcagaggaaagaaaagcaagcattccagctggagcggacactgagtttcagatgtttggcatttgaacctccttcctgtgttcaggggatccccatgttatgaagtggggacctccactttggaaggcagaattctcaagatgcggcttttttcttttctttgagacagggtcttgttctgtcacccaggctggagtgcagtggtgcaatcacggttcactgcagccttgacttcccaggcttaagtgatcctcccacctcagcctcttgagtagctgggaaaacaggtgtataccactgtgccttgctgattttattttttgtagggagggtttcacattgttgcctaggctggtctctagctcctgggctcgagacctcctgcctaggcctcccaaagcgccaggattacaggcacaagccactacgcctggctggatgctgttttttctaacctctccctcagccgaggcagtatgcttgcctgagaccttgaagtggcagctagtggctgtttaaaatcccttttggtgacaagtagaagcctctacatttagtttccaaaagagcagaggcagtggtcccagtgacagtgcccagcattgggggtgtctgtggtgtaagtcctggggtatgaacctgggagtactggagaatgacatgggatcttggtcctggctagggagccgcttagcctggtgaccatgtgacctatccaatattgtttaataaacttcccacttaacccagccacagttggtttctgttgtttgcaaatgaacttcgagacaatggcagctggtggcacagagattagagccagttactgggatttctctttggcaagtccatcctgggtttgcatctgggaagatctttcacaaaaggagatgtggaaggcacaaccatcccctcgtgcccaattcagatgcagcttaccctttgcagagcctggcaccttggctatgccagctgcaggggaaaggggtggcggccacctgcaagggttgggccaatgctgcacaggattcgggctcaagacaccaacaccctgctaggccagcgcagggaacactcaccacgggagcctaggggcttcctcaggggccttcaagcacaaaaagagatacttttcaccctcccaccccccaaccaggctgtatgcctgcctggccctcagtgggcatggcagaaatgctaggattcgtgttggattcatgcatttttcagaatagtttaaggactgcacgaagacagagggacgaatcacatgacttcagagttcattggttccaactattccagctctcctgagaaggcatgttttgccaaaagtgcacatatgttcctctaaagaaaaccatggtagttttttgatggaattttttcctctcccaggcatcgtcagacgtgcccagcactcgactgcagagcagcctctctcacagtttccactctcatttctcaaagaactctcttggtacctcaaggccgtggctttcctaagtggctttttgagggagacagcagggactgggctttaagggggccacagcgcagctttcttttcccctcacaggcagagctatcagtagccacgtcgggtagaacagaaggcattctgggaacgcggtgctctcacatcctgcaaagtacaggcctgcagagcagatggcagggacttcaaaagctaagtcaccttgaaagataatggcacaaagggcgattgggggtggggtgggtgggaggcttttgtacccttttgcaacaaggaagcagaaaagacaaaagctatttgccagcctggtgcgggaatcaacagaatagagagatggttctgctgcaatttccatcaagggtggccaagcctccagtcttcttgtccagaagtaagtggcatcaaccaactctgccaaactgcatttcctgcctcctgatctggggtcttttccttttc

SEQ ID NO: 43513 - DNA, 2300 bp, Homo sapien
gaaactggagggcccggatcagctgagtcattgaggagtgcagctgtaattacttttatttgtgtctaattgttgccttaagtggcagtaatgagcccaatggaataacccagccgaactgccttttcaaaataagatctgttgaaatccaactgctgcagaaaggagagctccacctcctgccctgctagcacacttcaggatttcactttaaccctttacatttgactgtgcacatttgatgtgtggcactatcgagaaacaaaagtgccagatagtcccaggcaaagagatgtgtgagagtgaaggttatcccttctcgacctggaggtctcgaagctagaagccccgcagggcaagacagaaggctgggagctttgccgcagggaggggatgcgcccccactcacagaggcccgccccgccagcggtggggagcctctcagacagtgtccccctctggagcctgaatcagtccagccaatgttgaggtgggaaggagatggcgccctcttccctcacttcagcaaagtcagccccagttcagaggcagccattgccccaaattaagataaagcccagtgccaagaatagggaaagccggaaatgggattgcaaagggtgggtggatggaccctgatctgcgaggtcctcgccactaaacgcgggcttcactgtttgtcttcccccgtgtcatgtattgccttctctgtggttcctgtcctgtggaaacgtgtctgtcacttctctgtggcactgcagcaatgaagtgggcactatggagtttgtctccctgagccatggatgcctgctccgagggcccgttgtcaccctcaaagctctcccactgcagtggcacaggcgccacgtgcgggtgacagctgcccctcatgggcacttagcgcacactaggtatgcctcaggggcttctgtgtctccacgtggtgaaggcttccgggcagctctttataggatgcctgactgtgtccccactgtgcagatgagactgaggcccagaatcagtgttcatggcagggccagacggcctcgggtgtgtccttggcaccgctggcattgagtggggattagcactccggcagtctgacccccaagcccgtgctcgccctgttcggcctcctccttatgggttctagctttgggggtgggactgcctctcggggggcagggcagagtgcaacatggaatgaagtgatcaacccaaagtatgcgagtcatctcacatgaggaaacagacaaggtggactggaggaaccgtgttcctctctggcgagtggtgttctggcatttgtgcctaggtcgcagggccgcccttcgagatggcgcactttccctggggcacctgctgcgtggcttctgaggccccaagctgtctgtcttgcagaggtccagcaccccatcctcgcccactggcacgtcatcctcagactcgggaggacatcacatcggctggggtgagcggcagggccagtggctgcgcaggagaaggctggatggggccatcaacagggtccccgtgggattctaccagagggtgtggaagatcctccagaaggtaagccgagacgcgagctcctggggaagtgaaccgtccccttactgtcctggcaaggcatggtggcacctccaggcgagcaaacacacagccctgaggatggcttctctgcctcagcgctgttggcacctggggccgaggcattctctgctagggggcctgtgcgtggtaggatgtctacagcatccctggcctctacccgccagatgccagcagccatctcttctccccaccccacccccgtgtgacaactaaaagtgtctccaggcattatcaaacatcccgtgggaggcagatcaacccagttgagaaccacagcaagtaagacaaggtggcagtctaggttgtggttgtgtgggaccaacttggacgtattttaggaacatagaagaacagggaaaggctgggaggcttcagatgaaaaccctgtaaaaccacccagagcagcacctacaggcctggaacctggaatgacagttcaggaggggcctggagtaggccagccccccagcctcccgcacatccaggcaggagtagtgtccctgctgttcagcgatgtgactgagccccaccctcccagggtacctgccgtgttcagtcccaaggtgtacagaggtggagagcttccagtttagccccaggtcctgtgtgccctgaaggcacaatctccctcacaccctggggccccactcccctcagccagccggctgttgcgcttcccatctgcc

SEQ ID NO: 43514 - DNA, 2300 bp, Homo sapien
tagaggccagggatgctgtagacatcctaccacgcacaggccccctagcagagaatgcctcggccccaggtgccaacagcgctgaggcagagaagccatcctcagggctgtgtgtttgctcgcctggaggtgccaccatgccttgccaggacagtaaggggacggttcacttccccaggagctcgcgtctcggcttaccttctggaggatcttccacaccctctggtagaatcccacggggaccctgttgatggccccatccagccttctcctgcgcagccactggccctgccgctcaccccagccgatgtgatgtcctcccgagtctgaggatgacgtgccagtgggcgaggatggggtgctggacctctgcaagacagacagcttggggcctcagaagccacgcagcaggtgccccagggaaagtgcgccatctcgaagggcggccctgcgacctaggcacaaatgccagaacaccactcgccagagaggaacacggttcctccagtccaccttgtctgtttcctcatgtgagatgactcgcatactttgggttgatcacttcattccatgttgcactctgccctgccccccgagaggcagtcccacccccaaagctagaacccataaggaggaggccgaacagggcgagcacgggcttgggggtcagactgccggagtgctaatccccactcaatgccagcggtgccaaggacacacccgaggccgtctggccctgccatgaacactgattctgggcctcagtctcatctgcacagtggggacacagtcaggcatcctataaagagctgcccggaagccttcaccacgtggagacacagaagcccctgaggcatacctagtgtgcgctaagtgcccatgaggggcagctgtcacccgcacgtggcgcctgtgccactgcagtgggagagctttgagggtgacaacgggccctcggagcaggcatccatggctcagggagacaaactccatagtgcccacttcattgctgcagtgccacagagaagtgacagacacgtttccacaggacaggaaccacagagaaggcaatacatgacacgggggaagacaaacagtgaagcccgcgtttagtggcgaggacctcgcagatcagggtccatccacccaccctttgcaatcccatttccggctttccctattcttggcactgggctttatcttaatttggggcaatggctgcctctgaactggggctgactttgctgaagtgagggaagagggcgccatctccttcccacctcaacattggctggactgattcaggctccagagggggacactgtctgagaggctccccaccgctggcggggcgggcctctgtgagtgggggcgcatcccctccctgcggcaaagctcccagccttctgtcttgccctgcggggcttctagcttcgagacctccaggtcgagaagggataaccttcactctcacacatctctttgcctgggactatctggcacttttgtttctcgatagtgccacacatcaaatgtgcacagtcaaatgtaaagggttaaagtgaaatcctgaagtgtgctagcagggcaggaggtggagctctcctttctgcagcagttggatttcaacagatcttattttgaaaaggcagttcggctgggttattccattgggctcattactgccacttaaggcaacaattagacacaaataaaagtaattacagctgcactcctcaatgactcagctgatccgggccctccagtttcaggaggaagattcagcctctgctctgcggtgagctcaatccgagccctgcacgagatctggggcatggcaggtgcagagtgctagttggcacatgtgggcaagggctcaccatcctggctccataaagaggcatggaactaatgccccgaagtttccagaagctctgggaattggtgagaaggaaactcctcacccacactgtgccaaggagcacaggcagagaactgagagcttaagacggagaacaaagctcagggcaagcactttggggccttctttctaccctcctcagaattccagttggaggagcctgtgagcatcccgctgaaaacacttcagccctgctcgaatcctcagaagttgggcatgaggtgggagcatgaggaaggacgcgaggaggagcggggacggacacaataatcccgaggcactgttaccgcagacttggaggaatgcgcactgctggacgcggcctggcccacagaaaagaactacaaaacaaaaagaatccactcagttgacagcaatg

SEQ ID NO: 43515 - DNA, 2300 bp, Homo sapien
gtaagggtgctcttcttttatatcaccctggtgacatatgttctccacccccctctgggacactggagtcgcatttctaatattttgatgtgtattaccacaagagcctagagacatcttaatgacatgtaaaggccgattccacatgttgcccagaggtaaaacatgctttatctctcctagtttatgctgtttccaagtagggaactgccttttcaaacatcttcccttgccagccactcggtggcaccgtccctctgtccccgcatcccgatggcctgaccgtgggtgaatctgagtggttccttccgcctctatttcatgctgttcttgcgtgttacggggatgaagtgatcacctctgttctttgctgggcttagagtcacctagctagtacaaactttgaccacttacgtcaaggaacatattatttgttccaaaaatgtaataggtgttatggtattttcaatctctagtctcttttgtaagaataccttgtagatagcacactgtacccttgcaaattaagggtacattctagattttagacgaggaaatacttatgtggccaaaggtatcagcccgatcatcatattcattcatttaatgaatatctactgaatgttaggtgcagcatgttagtgtcagctgtaggtatttggttcatctgtagattttcacaattcttaccataaaatgtgagcatttcatggctgtgagtttggaaaataaatagtgtcctaacttgatgatgcaccctccacatatgacaggaacatttaatgtttacattcaatggtaacagttcatgtttttaaaaagagcagttagtaagtttcacgtggagtcgaagcccagagcggtgcttgcaggtgcccctgcacctgagcttgcctatgtgcgttgctgtggcaccttctctgcgcccgcattctctgctgctgctttctgtgggtgtttcggatgctgctccatgaccctcctctctgctgtgtctcttggtgtcattgctgtcaactgagtggattctttttgttttgtagttcttttctgtgggccaggccgcgtccagcagtgcgcattcctccaagtctgcggtaacagtgcctcgggattattgtgtccgtccccgctcctcctcgcgtccttcctcatgctcccacctcatgcccaacttctgaggattcgagcagggctgaagtgttttcagcgggatgctcacaggctcctccaactggaattctgaggagggtagaaagaaggccccaaagtgcttgccctgagctttgttctccgtcttaagctctcagttctctgcctgtgctccttggcacagtgtgggtgaggagtttccttctcaccaattcccagagcttctggaaacttcggggcattagttccatgcctctttatggagccaggatggtgagcccttgcccacatgtgccaactagcactctgcacctgccatgccccagatctcgtgcagggctcggattgagctcaccgcagagcagaggctgaatcttcctcctgaaactggagggcccggatcagctgagtcattgaggagtgcagctgtaattacttttatttgtgtctaattgttgccttaagtggcagtaatgagcccaatggaataacccagccgaactgccttttcaaaataagatctgttgaaatccaactgctgcagaaaggagagctccacctcctgccctgctagcacacttcaggatttcactttaaccctttacatttgactgtgcacatttgatgtgtggcactatcgagaaacaaaagtgccagatagtcccaggcaaagagatgtgtgagagtgaaggttatcccttctcgacctggaggtctcgaagctagaagccccgcagggcaagacagaaggctgggagctttgccgcagggaggggatgcgcccccactcacagaggcccgccccgccagcggtggggagcctctcagacagtgtccccctctggagcctgaatcagtccagccaatgttgaggtgggaaggagatggcgccctcttccctcacttcagcaaagtcagccccagttcagaggcagccattgccccaaattaagataaagcccagtgccaagaatagggaaagccggaaatgggattgcaaagggtgggtggatggaccctgatctgcgaggtcctcgccactaaacgcgggcttcactgtttgtcttcccccgtgtcatgtattgccttctctgtggttcctgtcctgtggaaacgtgtctgtcacttctctgtggcactgcagcaat

SEQ ID NO: 43516 - DNA, 2300 bp, Homo sapien
caactcctaaggaaggacccaatggaaacaaaagccacaatgaaaagaagcaatgatcccagcttttagatggagatgaatacatgaaaattctagcaagagtacatattcagattccaaaacatttagtggtgataacaatgtctagttttattcacccctagaccacagcaaattcttcatggaggcacatcacatggatcactgcataattcaaaagccaatattaagaaaacaaagtattatatgaagtaatatgtgagctgatgtggggtttggtgctttagttgagtgacagagtaaagccatagatttatgttctggaatatctaatataaacttggttaaggaccaaacataagggaacgcagctaagcaggactgatttcatttactcatgcgagcaacattaattgagctccaactatatgctcaacactgtaccaggcatagtaggagataccaaaagactgtttcaatgaataacgtacattccaattaggaaaatatgcctcatccacacatgaaaacataaataacaacaggaggcaatacattgtggccaagtgacaacgaaattagctatgatttattaagtatttttctactagccaggcttgtgctaaatgctttatattcatcctcttgatcttaagtcatcctgtgaggtaggtgctatgattatctccattttacagatgagaacacttaagttcaaacatgtaaaacgggatgccaaaggtcatacgacttgtaaatgacagaactgacatttgaactcaaaatgaactgactctaagtcctaagctcttactaaaccaatggctacagaaattcagaaaatggggaaggctaatagaggagctgagctggccgttaagggaaagataggcttcagttagtcaaggaggaggaagaagggccgaaggggtcaagcatagagtaaatgcatggagactggaaaagagcttgcggaaattgattgcattagtctagctgtccagtaaattcctatgtgggccagattttggtggacaatgaataccaggccgaagattgtgaactgtaggttatcagcagccacgaaacattataatgaatgccaagtttcaagctgtagacccgtgggagatgaactgcgaacctgcccgaggaagcggcgcccaagtggctaggggcggggtcacaggcgccagaggtgtcgctggggcacctctccgggccttccccctttttcttccgggctgggtcccgctactccagttccgctaggcggcggagacggggccagaggtgggactacaatcttggccctcagaggggtgcccaggcggccgcggtaggcggccctctttctccggcctcgagtgggactggcacccgtctcggggggctccacactaccacgcaggaaagccaactcgtccgccgcccgaagccgggttcccctagactcccacgggccgcctcctttttcgtcccccccgaggccgcgactctgagggttccgctctgcggcggaggtggggccaggggcggggatgtgggcggggccgtgaggtcgttccagggcgcggggcggggccgcccccttacctgtgcccctcagggttccaaacgttccactccgcggcaggggcgggggcgagtccggagggcgggtccaaggcgcccaggtggccgcggcagaagggcctgtttctctggccttggctgtggttggcagccggccggggagagaagggactcagggaggcaacctggttcccgcccgttgctgatttcgcagcggctctcccgggccgcccccttttccttcctcctcaggccgcgacttggagggttccgctccgcggcgggggcagagccaggggcggggctgagcgcggcctgggcgatctccccggcggctggggtgggctggcgtcttcttcgcgcccgggggacctcctcgcgaccgccgggacgtaaaaggggcttggcaggggcgtcctcgccccactcccggaacctggtttcccgctgctcccgcgagcgtcgggagcccagcaggcctggccgaggcgggaccttcgtcgctccagcccccgtccccgcccccgcgcctccccgccgcgcggagctctggttggcttgctttccaaccggactttggggctagcgtttagaaaagtctcgacctcctccggcccggtcccatcccaagaaccgactaaggctgtgagtgtccgggaaccagacccgcttggaggccacagccccgacgtcccgcgcccacgcggcagatcgggcgctgcggc

SEQ ID NO: 43517 - DNA, 2300 bp, Homo sapien
ttaagaaataaataaatgtagtaaatgacaaaatatggaaacaataatgtggacagacagggtgtgtgtgtttcagccaacacaagagcagtctaaagcaggccagccaaagtgccttgacacacccaactttggtccataccagctgaaaatcaggctccatactgcaaaacttattttagttataaaatgttggtgtttgcttttcccatgtttaggtagaggtcaagccattgaatcttttaaatatttaaatatgcaaaatgtgtgtagtagattgacttcttagcttaagtggagtcattccacaggaaatttatcacttgattaattgccttaatagcagccatattttaaaataacttaccaggaaatctggttaggtagtacagtattgagtggtagcaatttttttaatcctaaatttactgtgggaagatttgctaggcatcactgtaacagaatggcaccagcgtgccaatatatttcatgattgtaattcggcaagttatttaaaatgttttctagaatgctctggctgaaaaatttttaaagtagtatttcttgtattttggtctggttcctaatcttatttctataatattccataagtagttagcaagctttgcaatcacgggtctcaggttcactcatcttgggttcttttcctacaattctctgattaaattttatactcactgagcgcttatgggacatgcagatttaactacaacttggtctgctagtgtgttttctacttcttttcgtaattatatctcaaaagttttaattctttaaaatttgacaaataatcgtttcaaaatattgatttaatttttttttctcctgcagctaaattatctgttgtcagttttgccccctcctccaatggtactccaggcaagattttgaaaaaatttaaacctagatttagtccaatttgttaaagttttgttttaattatatctttgtattgtttttctcctcgggacaaaaagaggttgaaacaacaagcctcaatggtaagaatttttctgaagcaagtgaaaattgataacccttaatatgaatataagtataatgaatggtgttgaaggtttccatttctaaattatttctgaatacgtcgagtagtttcaaataacccaaaacaaaacttgccaaccctggagagtgacctaaactttctggttaaatgataacattcttacagtcatggagggaagagagcagtccaccactctaattgttagctaaaaataaaagaaatatcgatcacattttgaattatccattcccttgctgtccaacacaatgccaacaagttttacatgacagattgtttaaatgtgaaaagcacatccagttattcaatatgattcagcatggatttggaggcacagtgtgttcaaagacagcctttttacagatgatttgatcaatttttaaatagtatgaaatgggaaaaaaatggcttccctatcatgctagagaaaagggcaaagaagtgggctttattcaagggaagggggcagagcagtacattctgttccctccaataagtgaacagaatgggtagacagccttccttccatcttattgcgatgaaaccccaacacttttcacaagcccttggttaaaatcaaatctcaccatatggttggtggctaaggagctaaacaatcatagatgcagcttatactgatcaaaactggtttaaattcatatttggcccaatgggaagggacagatgttatcatttttatgtgcagttacttctcacagtgaaaataatatcttcaatttagctttggtgcagtttttggatcccattttgtgtgtgtgtgtgtgtgtgtgtgtgtgtgtgtgtgttttaagtatgatgtaataaatgccttttggttttttcctaaaatttcatccagaatcataaattctagaatgatttggatttaaagaaatgccaatagaatcgattttaaattggattttaaatcaaacaggatccaaatgagattttcttaaaagttagtcgaatataatggtcatttactccaaatttaagctagaattattttaaattgctttataagagtgtaccactggtaaaaatgtattatgcatccacagggctatatattaaaatcagtattaatgttggaaatgtcatatcccttagggacgttcattataatagagaaaaaagggacaaaatattaaacaacatagatgagtttattcaaatctaatggttacgggagtgttgctaagtgtttagacatgtaacttgcatttgaatc

SEQ ID NO: 43518 - DNA, 2300 bp, Homo sapien
agtctcactatgttgctcaggctggtcttgaactcctgggctcaagcaatcccctcaccccagcctcccaaagagccttaaagtccttttttaaacagcaagtttgtttaaaggaaaagcatacttactctggtatcacgcttaactttagaaattcaagcaactgttaatatgagatagacatatattaacttgttattgacgtgagacatacatacagaaaagtgctcatagatccgtttaaactgtacccagatcaagaagccagacattacctgtaagcccttcttattctccagtgaccgctatcctaacagcataggttagttttgcctgttttatcctttacagaaacaaaatcatatagtgtctgtgtttttgggcctgacttcttcactcaacattgtttcagaggttcatctatattaagcatagcagtggttcatgcagtctcattgctgtctgggattccgctttgtgactataccatcacaatgtctgcgatccattctgttggtgggcatctgggtcatttccaatctgggctattgcaaatatactggtatgatattctagttcatatcctttggtaaacatacacactgattgaggttgtgtgtacatccagaaggggaattgctggtcagagggtagttgtactctcagctttaatagattctgccaaagagttttccaaaatgcttgtaaaaatttacactcccactagcggtgtatgaaaattctttaggtatgaggtctatgtaaagcaaaaataaagaagttaatatgcaaaagttatatgtaagttaaaaatacgtgttaagttcattcaaacggaaccaatttaacccgttggagtaataccgggtgtgtttatttaatacaccattttccccttcatcaaaacttttaatttatgtaacctggatgagcttcctgactctactctcccttaatccaatcagttaaaagtctctctgaaaagactgtccattcatttattcagttagaatgttgtgagtgttaataaactggtgtttgcaaaacaaattcaacccctcctgcaaagcagaatatacatctcgcccatcatgtgtctaaaatggcagagtcagccaggatatgccttaaagatctgcacttgataaccatcgcgtctccagggctgtgaatgcaattcagaatccagaattttgttctagttgtaaaggaaaaatggtatattctcccgcaggtttaacgaaagagaacgatgcctttaaaacgacaaagcattttgcaaacacaggtgttattcgactataaaggcggcgggggaggggggcagtaaaatgagccggaaagggaattcagagcgcttattttttccctggtctctacaactaattcgtattgtagaactgagcctccattttcccatctgtaaaatagggtactttgacaaattgcttaggggatctgtaagtcctatccagatctagtttttattctatgaccatgcaggaggagagatgctgagacagaaaggtagaggggaccagggacaactcactttatataccccctccacctcgacccccagcaggcagagcgcccgagatcccggtttctgggaacccggtgtatttccagtccttcaccaggaaaaccatcgaactgaatcctttactgggacatttctcgtttactgctctctccaaattcccctctcaagtggtctgacatctgatctccggattcaggaatatcttggtagaagtgcgccctcggggctcccacccattacagcgtgcgacactgaaacgggcatatgggtaccggggcgagccctaaaggtgagccgctgagtctggaggttggggtccgttggggtccccaaggaggagctcgctgggctggacgccgggcatctgagggtcccgcagtgcctggagcccaggagcgctgcggggcccccggctgcggtggggtgggcggccgagctcgccgcccccgcttctccccggcccctgcccctgccccgagctcccagcccggcttcggccggccgcgctgcccgctccccctcctccctccgcgccccgcccgctccccacctccgcgcccagcctcgccgccgccgagcgcccgacgcgccacgccgcgctgggcagctggagagctggcggcggagcgggccgggagcggcgggggcggcgccgaggccgcgggcggggggaggagggccgcagccccggagaggggaaaaggcgggccggacggcgccagcagccagccccgaggacgcgagcggcaggtaa

SEQ ID NO: 43519 - DNA, 2300 bp, Homo sapien
cctgtattgatgataattctcacctgcaacagttactgtggtctttgccaaatggtgattttctttttctattttcatcattccttctatattaattaattggaattctactgtaaggaaaagttgttccttctaacccattgatttgttcaatcatgtatttaagtaggacctatattttacttgttccttgctatatcttcagtgtgtagtacagtgtctgacacaaaatcggtgctcaataataggtgttggatgaatgagcaaatgaatgaatgaattcatattcatatggcctacagagttcccgtacatgcacaaccaatatcaccaccccgtggagatgactcccaaattaatatttttagcaaatgttccagacttacaactccaacttcccgggggacatcttcagatagctgtgccactgccaccaccaggtcaacatgtcccaaaccattcagaccagctttttctcctgagctggacatctggcctccaaccttttcattctcttttacctttcatattctatcagcagcagcagctgctgaaatcataccatgcaagtttctcacgtccatctctgccttttaatggcgccctctcactcctttaagaagttttcttccactgcaacacgatctctcagtccagagtctggcccagtgcccaaattatttctctagctatgctgagagctggtcatgctttgaacttctgctttgaatactttcagtgacactgggagagaattatctcattggaccattgtcattgttagaaaattcattgttatgctgaaatgaaatgattttattcacacacacacacacacacacacaaaatagctcttcctcctggaacatgactggcctgaaaatgtgtgaagacatatccaatcctctctggttttactgttcatccaattttctgttctcctcctggcaggaggattatatttcaccttgtggaactcagacatggtcgggtaactagctctggtccgtgaaaattgagaggaagtgacatgtgtcacttctgggcagaagctttgagagccggtttaaatgatcccttttctcttcatccatgagacaagctaagttccagagagagggtgccacgctgtgagggacctgtgttacgagtacgatggctcgcgtcacttcaaattcttgaaatcactgaaatttggaggtcagttgttacatcataacccagccaattctagttagcctgttttcttcctaacttctttaatcgttcttcataagtcacaatcgcagcccctcaccgttctgaccactgtcccctggattccactcagtttactcattatcccccttaaaatgtggagcccaaatctgaacccggaaccccaggtgcaatcccactaggacacaacacaatgggttcctgagccctttgatcctctgaatagagccccttgttgctttggtgttttgtctctgtgtgtgcttttatcatcggctgagccacgctgttaactcgcagtgagcctgtgaaccaataactagagaaaaaagatttttcccattgtcctctcgacatatattgggaaacaaattttttgatccgcgttcaagtagacagggcagaactgtccaactgctacgtgatcttttaaagacaaagttagtggcagaccatttacagaaaccagatgttctgtcttttggctctgagcatgctgctaatcttcatcatctagtgtactgaacgagatgtactgaacgagggctgcagagctgcagcaccggcaggagtaggcgctcggtaggacggggcctgcacaacctccccggtagtcagcagagcggaatctaggaaggctcctttcccgcggcgccctggaggcgggggccccaccttcccacgcaggcgctatcaagccccgcctcctcacccgcccgcggcgtggcgtcggaaagagccctcagcccctccctctctggcgctgatacccaatgggcagcctcaggcctttagcgggggcggggcaccccctggacgccgttctggttggcccgcggcccggcgcagcgcatgacgttattacgactctgtcacgccgcggtgcgactgaggcgtggcgtctgctggggcacctgaaggagacttgggggcacccgcgtcgtgcctcctgggttgtgaggagtcgccgctgccgccactgcctgtgcttcatgaggaagatgctcgccgccgtctcccgcgtgctgtctggcgcttctcagaagccggtgagacctcccgggcgggccgggatggggcgc

SEQ ID NO: 43520 - DNA, 2300 bp, Homo sapien
aagcagtgcctcctaataagaaagctttctgaaaatgcctacagtgtatagtgtgtgtgagcacaagcagcaatttttaaagaaagagtgttatataccttaattgtagagggaaattgttacataaaacagggctgatggtagtgtagtatcttgggggcatttagcttttgtaggcattaccccaagtctacacctggcatactctacctgaagaggatcagaatttggagatgttcctctgtctggtatagagctaagggtaactgggtgttcaatccgttgaaatacatcaatcaaaaaagctaggttccactaggaaggcatgaattttacttttttgcttagtagctctggcctgtgattctggaatcccagttttgacacagttgaataaataagcctttgtagagtggacttctaaggaaaaatcatgtagagagcacagtatatggaaaaatgcactttgtgtaaatctattgttgaaaatggtagaatccttttagtgttacttcagatgatataggcataagatacattggttttgctggctgtgcttctttagggggacttaagggagaaaggcaaggcacatggatttcctgcttggcgctctgatgtctcaaagtctaattatcaccacacacaccatctctgctgtccccacccatgtagtatacaggagcccaaatgggtgggacaagtgacacttctttagaaccttacatctaaatcaaagcagcaagcaaaaacttggcccctgttgtcggaatgccagggaagccatgtgactcaccagtgtacggttttctagaaaagacagaagcagttattacagaatgttaggctgcgttctggtattttgaaagtataacaacaactctgccacgcctatagtgacataagcattggtatgcccctttgtttcagaaacacacttctgtatttcacctcattgggacaatccaaccccatatcatgtttcatcacgccgtccttgctctactggaactgctcttactgatcgattactacttttccctccccatagttaccgtacacgagaagaaattcaggaagtaagaagtaagagtgaccctattatgcttctcaaggacaggatggtgaacagcaatcttgccagtgtggaagaactaaaggtacagtcacttgttcatggtggtttgaaggttggctttaaaagttgccacccctgggtggccacagagtttgtgtgggttcctccaagcccagaaagtgatgtcctgggacataaatagttccatagttccaaagtcccttggggtgggggcttttcctttagtttcctctattcaaaattgtattactcttcagatttcagattttggtggactgtgaaccaccatcacagtggcaaagcccccacagtagtatggttcttttttcctaaaagtatactgtggatttttaattcataaaatagatacaccctagaaatctgtattccaaaatcttctgaattagcaactgttcgtacttgtagttaaagagttacaccagcaacaggtcctcagcagaactctagttggtacctaagctgctgttcattctaaaaccttttacactgttacctaatttttaggaaattgatgtggaagtgaggaaggagattgaggatgctgcccagtttgccacggccgatcctgagccacctttggaagagctgggctaccacatctactccagcgacccaccttttgaagttcgtggtgccaatcagtggatcaagtttaagtcagtcagttaaggggaggagaaggagaggttataccttcagggggctaccagacagtgttctcaacttggttaaggaggaagaaaacccagtcaatgaaattcaatgaaattcttggaaacttccattaagtgtgtagattgagcaggtagtaattgcatgcagtttgtacattagtgcattaaaagatgaattattgagtgcttaaagattatttttgacttaaaatagtatactttgaacaaatactctaattatgaaaaggaagaacaattccttgtatgcctgtttcccctgcccccagccacctttttgggaggagaccattatggcggggcccctcacagcattctaccaaccatagcacccaccccgagcagcgctggtgctgcagcctgttcgcgctgaccatttctctacaagatacaatatttattatcaggcaagaggacagttccattttaaaataagacttttgtaatcattccaattttgtaatcatttcaaaggccacataacttag

SEQ ID NO: 43521 - DNA, 2300 bp, Homo sapien
aacagatgcctttgagtatccttagaggacatgccgccctaggctgtggcccaagtcccatctcagttctctactgctatgtaccaaaccaccccaaaatttcagaagcttaaaacgatgactttttctcatgcctctttgagctgactgttggctcttctgtgggttttgcctgggctcactcacatggttgcagccaagtggtggtttgggggagcagggtggcctgagaggcccctccctcatggcagttccagctgggatggctggggcgtcctctccacggggtcgtacctcctgggcttcctctctgcatggtggtctcggggctttaagggtgactagcggagccacaagacctcttaaggcccgggccctgaaactctcaccatgtcacttctgtcactatctgttggtcaaagtcaagtcacaagatgccagtgagggggaaatggactccaccttggggtgggaggaacaagaacgtgacgttgcaagggggcatggattatgcctgtcctgggatgtcaggtgtacaggagctttggactgagacatggatacctgaattcacccaaggcctcactgacacatcggttacctctcccttaaatgcaggtgggcatgtttaagatccaccctgagattccagaagccctttcagctgaagcccgagccttcattttatcctgtttcgagcctgacccccacaaacgtgccaccactgctgagctactgagagagggtttcttaaggcaggtgaacaagggcaagaagaaccgaattgccttcaagccctcaggtgaggcctccctggacagctggggcagcaccctggccacaagaatgctgggcgctgggcttctctgctgctcaggagggagagttctggctatccagagccctgggctgctcacgtcattcccatttttgtgaagagtgacggggcctgtgcagtaggtttggaggttgtcaaaatccaactaatacatgcacctcgatctcctgacagaggcccagggagtctctgggtgactgggctgccgtctgctggaagttgttccttcgggattgggaagagagtggggaggcaagaggtaccccagctggggttctgcgtcttcaccatgtgccagagcctggggcttcagttttggagcctggcttgtcatcgtgtgccaaccctgaccttgattaaaggatttgtcagggaggtttgcctgatgtggctgtcctgcaggccaccgaagtccagtgacaccttctggggcagtaagtcctaactggcaatgatgtaagagtggcccctgaaaaggaagcagtttgtcctcttttccctggtaccgatcggggtcagaagctgccagagtgagtggctcagcaacttgctccatgagggacccccaactgcatgcatctgagtagaaatacagcacctgtggcccgtcccccgcccaacccacatttctacaggatcctgggtgcctgggcggttcacctgggcttgaggggctgccagggactcagctccaccccgtccctctctgagtctccccattcggtgtctggctgtccccctacagaaggtccccgcggtgtcgtcctggccctgcccacacagggagagcccatggccaccagcagcagcgagcacggctctgtctccccagactccgacgcccagcctgacgcactctttgagaggacccgggcgcccaggcaccaccttggccacctcctcaggtacacccgtattctgtctgtctgccgcgggcccgaaagggtgctggtagtcctccgccacagggcacctccctggtcccaaccagatggccactgaggggttttacttcccttctgcagggcagtagggcagctgagccgccccatcccggcaaggagggtgcttcgttcacttgctgtcccttcccctccctccctgtcctttcattccccacatgtgccctcccccacctctcctcttcccttctctctcccctctccttcgacacttcccctctctcctcttccccctctctctccccctcacccttgccccctctgtccctgcatcttccggccccctcctcctcctggcccctcctcctcccttcctccttttccttcctctctcttcctccttcccctgtccccctcaccttccctccctcacctctccttctgtgcttgcccccttccctccctccctccctcctccctgtctcctgggaggctcctttaccccgcctccccctccttctgctctccctcctgctgtgggggttgacagaacactgcat

SEQ ID NO: 43522 - DNA, 2300 bp, Homo sapien
ccaggttatgtactgtatgtacacatatttggcattgttttgtaattattgaaagtaggcaccatttgttcttatcgtatctcatgttgtttttctctctttgaagactattattaaatttagcttactctctttttaatgaacagcctaattttacactctgcagttagtccatttcagctttgttttgtgtgtgtgtgtgtgtgtgtgtgtgtgtgtgtgtgtgtgtgtgtgttttagaccaagtctcactctgtcgcccaggctggagtgcagtcgtgcgatctcagttcactgcaacctctgcctcccgggttcgagcgattctcctgcctcgacctccgaagtagctgggattacaggcacccaccaccaagcccagttagtttttgtatttttagtagagacggggtttcaccacgttggccaggctggtcttgaactcctaagctcgggtgatcctcttgccttggcctccaaaagtgctgagattataggcctgagccactatgcctggccccatttcagcttcttaatgggacgacagtattactgcttggcagtgtcctacctccacttaaaaattcctatggaaaatagacaagatattttaaatcaatctatggttgttgtaactcaacttatgtataccaagttaggtcatttttcaaggttttaaaccaaataccagataatagcattggctcttcaagagactatggtgatattccagcgtgaatttaactgctttaagtgtttttaagcttcctcgtgcttatctagctgctcacctgagggaagttttgtgttttccattagaaaactattcttgggtccaggcatggtggctcacgcctgtaatcccagcactttggaaggctgaggcaggtggatcacttgagtccaggagtttgagaccagcctggccaacatggtgaaaccccgttctggctgggtgcagtggctcacgcctgtaatcccagcactttgggaggccgaggcgggtggatcacgaggtcaggagatcgagaccatcctggctaacatggtgaaacctcatctctactaaaaatacaaaaatttaactgggcatggtggcgggcgcctatggtcccagctactcaggaggctgaggcaagagaatggcatgaacccaggaggcggagcttgcagtgagccgagattgtgccactgcactccagcctgggcgaaagtgcgagactctgtcttaagaaaaagaaaaaaaaaaaaggaaagaaaccctgtctctaatagcaatacaaaaattagccaggtgtagtggcacatgcctatagtcccagctacttgggaggctgaggcaggagaatcgcttgaaccagggaggcggaggttgcagtgagctgagattgcaccactgcactccagcctgggcaacagagggagactccgtctcaaaaaaataaataaaaataaaaaaaaaaaaacaaaaaaacaaaaaaacagaacatctggccattcaatatggtgaggagagcaaggctgtctgtaagtttccaggcatgacctctgtgtgtcccatcttgtattgctcagggactcaacaccagtttccagccctcacctcaattggggaaagcttcatgactactaatgagagacacctgatagagaaattcattttcaagtcattctcatgtatgtttcatgggttttggagctccgtttggctttgttactagtggcgaaaataaatacacaaggaaggtaacttctcaccctctatatgtttgaaaatgccggagacagtgggtttggttggctgcaagttctgtgtgttgtccaagtacagatgggagtcacctttgaaagtatcttcaaggttgaatgaactgatttttacttgtcattcattggtctataaaatgtgaataagtagaaagcatcttctgtttgctggtgcagggaggctcaggtctgggccgaggtccctatgtgttagcctaagtcaggtcaatgagaaccattttgggcgcaagacagtcctgggtgcgtgcagatgtgactggaggattttgtgtttttctttctatagtgtttattacaaagaaaccttgttaaatgacatccggaaagccagagagaaataccaaggtgaggaactggcgaaggagctagctcggatcaagctccgcatggataatactgaggttctgacctcagacatcatcattaacttactcctgtcctaccgtgatatccaggtatgaaatccacctagccgaggctcacgtatgctacgttcttccttggcttgagga

SEQ ID NO: 43523 - DNA, 2300 bp, Homo sapien
gggggatggtttcaggatgaaactgcttgacctcagattatcaggcattagattctcgtaaggagcacgcagcctagatcgctcacatgtgcagttcacaatagggtttgcactcctgtaagaatctaatgtcaccaatgatctgacaggaggtggagttcagacaataatgcttgctcacccaccactcacctcctgctatgtggcctggttcctaacaggccactgaccggtactggtccatggccccgggggttggggacccctgctctaaaggatttggcagctaatctctttgctatatttggcattatgttagaatttggtgcccagtattggttgtcatgcttggcaagatgtgaaaatttagagcactcagaagactaaaaggatcccaggtgatgggatgagtggaaaattgcactaagaggaaaagctaaagggaactaagccttgaggggtaccattagtagtcatcttcaaatgctatcctctttctgaaagaaaagagacgtttactttttccactccagatgggatggaagtagggtaaacagaaaaatggtttggatcagcagaatggacatcttgcaactaatggtggttaaacattaaaatagaatgtcaaagtaacttgggtggcttctaaggagaatttgctcaattgtcccctccatgtggattggggtgaccctggaatcagacacctggatcatacgaccccagagattccaagacagaatctgatggaattgtgggtttatgatcattttggaaagattttgattaacacacacacacacacacacactcatagttagtgaacagtgaagtcttataaataaggggtacgaattagatgccacaccctgaacatgtagccaggtgtttgaaatgatttctgaatatgtgaaaaccaagatgcattgagatctcttttcaaggagtcatttgatatttctaaaattgtacttttacccagaaagggagatggaaaaataaaaagtaataaaataataataacaaagataaaattgtgcttgatgatgtattgaattcagctttatgtggcagcgaagtgggcacatttatctccatttcttttttttttttttttttgagatggagtcttgccctgtagcccaggctggagtgcagtggcatgatcttggctcactgcaacctctgcctcccaggtttgagtgattcttctgcctcagcctcccgagtacctgggaatacaggcatgtgccaccatgaccggctaatttttgtattttttttttttttagtagagacagggtttcaccatgttggccaggctggtctcaaactcctggcctcagatgatccgcccgcgttggcctcccaaagagctgggattacagatcacgttgcctggccatttgtctccatttctaggagcagttgctttgcagggatgccgaggccaggaagccaaactccagacttcagggtggaccacctgcagctcttctgggtttctttgctctttggaaacatggtatcaccttttgtgttcacctctttttcagatgatgctcatattcttgtgttctggttttgttttgtttttttgaaatgctttatgtaggtataatttacataccacaaaatgtacctagtttaagcacacacaattcaatgatttttaataaatgacataattgtgcagccagttgtgggttgtgtaccacagtctagttttagagcatttccctgaccccaaaatgcttatttgcagacaatctctcttcccacacccagccccaggcaagaactaatctgctttttgtcttatagacttgccttttcaagacttctcatgtgaaaggaaccatacaatatgtgatcttttgcatctggcttctatcacttaggatgatgttttcgaagatcatccttaatgcactaggatcatggatgcatggatcagtagttctttcctttttattactgaatggtattctactgtatagatattccacattttatccattccctagtagatggatttttggatcgtttctactttctggctattatgaataataccactgtgaatattcgagtgcaaatctttgtgtgggcacattttttttttcctcttggatacatacctaggaatggaattgccaagtcatatggtaaatataggctttttttttttttttttgagctggaatctcactctgtcgcccaggctggagtgcaatggcgcgatttcggctcacggcaacttctgtctcccgggttcaagtgattctcctgcctcagcc

SEQ ID NO: 43524 - DNA, 2300 bp, Homo sapien
cgcccacctcagcctcccaaagtgttagaattacaggcgtgagacactgcacctggcccaggcaaggttttagaaacagctttgaggtctaatttacatgccatgatattgacctaatgagtatcccagtcagtgctttttaatatatttacagagttgtgtgaccatcttcacaatctaattcttgaacatttccatcacccccaaaagaaacctgtgcccatttgcagtcactctccatttccacgctcagccctaggcaaccactcacctttgtaatttctcctttttctttaaggagaatgttttctgcaaatgtattatttactttaaggagtctcccaaattataaactcttactcttggctacccggttagttactgcttagcctgttcctcccagcacacttgagattgcatggaacagaaacctgtctgggactgccttaaacacagacatttgttattttgcataattgggaggctagaggtagggtggaccccaggggcagtgtgatcagctgctcagtgtgacatcagaaacctgtgttcttgctgtctcttcccccaccgtgttgttctggcagtagcttcacccaagggctggcttccctgtggtcatcagatggttgtagaatggtgtccatctgcagtggggccctttgcttccttgctcacagcccgtatgtaggaggagttatttcttgcagtctgattgggtgagctttgttccccctgcccaccctgaagcaatgattggcttagaattaattaggctgtccttcctagagctggaaatgggctccatgggggaatggatggcacctgtgaccaggagtgggctctgctggggaaggaggaagggagccagctctactgggtaggcaaccagcagtgctcactgagggttcctgaccaactgcattggattgtttgtttcctttcacttgggggccttttttatgttaaatgcaagcaaggtgatcctctgattttgaacttgttatctgggggaaggcagaccaatcccagttcatcctggctgagtgacagcggatttgatcgttgatctcaataggcttgagagtaataatatgtgagtatttttgaagctgaccctaactttacatctctgaaaagtatcaattcagatctcactaattcaggaggttctgataatttggtcaagaagttcgctgaagtttacctttgaacagttttatagtgagggtaatattggtgatggtggtaacactaacatatgtgggaaataaatgatttgagtaacattcgaaaaacctgtttgctttaggatagaaatatctaaatatacgactagaagtaaatagtagaaaatcattcctatctagttattaacttagtcccttggaatctctccttggggaaaaaataaaatcctgctctgactatgtcagtatttgaattactgtatgaacctgaaattaacaaaaatggactttcaagtataattcatgcttcactgagccaaatagacattctgccagttatttggactttattaaattttactttattacttatatgtaataaaaaatcaaggtaagcctctgctttgcgaagtcatttatttgattaggagctgtattttagagtgcatttcagggcgaggtttgtccacatgtaagtaatgaacgtttgctggtgcagctcgtaatggtgagaacggatgttgaagaaagcaaacaccatatgccctttgtttcccgtgcatgtcctcttctggaggcctgggtggagtgtttcagctgtctcaaataatctccattttgctgttactgcagactctgcggttctccagctctctcctctctgatgttaattataacttcttcctaattaggtggctcttcctcctcctcagtcatacaggttccacactctcaagtgccagagattggattacttttcacttgatttgcgacagaaataagtgcaaagaattacaaaaaaaccaccagtgtgagtgtgtagtgggaggggcaggcgggttgggtacgggacaggatgcttagaataattttgctgccaagtgaatcagagagacttgcagttctcggagagcacggaacttattcctgcccagagttcagacacagccagaaattaccatttcatacttcacagaatggaggtttcagcagccaaagccccaagtgccgcagacttgtctgagattgtaagtaggccatacatctgttttgattgttgcgatgtctgcatcttttgtagcctgttgcccgactactttgtaggccagg

SEQ ID NO: 43525 - DNA, 2300 bp, Homo sapien
gccatctaggctcactgcaacctccacctcccaggttcaaacaattcttgtgcctcagcctcccacggagttaggactaaggcatgcaccaccacgcctggctaatttttgtatttttagtagagagaggggctcgccatgttggtcagcctggtcttgaactcctgacctcaggtgatccgcccacctcggcctctcaaggtgctgggtttacaggcgtgagccaccgtgcctggcccacttcacattcttttcttttctttttttctgagacggagtctcgctctgtcgcccagtctggagtgcagtggcacgatcttggctcactgcaagctccacctcccgggttcacaccattctcttgcctcagcctccggagtagctgggactacaggcgcccgtcacaacacccagctaattttttgtattttttagtagagaccgggtttcaccatgttagccaggatggtctcgatctcctgacctcgtgatccgcccgcctcggcctcccaaagtgctgggattacaggcgtgagccaccgcgcccggccttcacattcttaatctccgtgttctctgatcccttttttaggagtctgatattgatgacactaggacttcaattgcagcctctgtgtggatgggcctcttgtcccttgattagtctcctatttcgatcggtttgacacacatgaacggtatttagaaagatgatgctactgatctcttgtttgtaagaccctgactttgaggttttttgaaaaactcatgaaacagttataagaacaattttctacagaaatcccaggacggtaaccaatttacaagagttgccccgccaacacaggtgaggtatggagacagcccctctcttgggtagggggtcggctttcatttgtcccttttgagtccactagccctcagcctcctccatttccaggggccactgatgtaatttctctattgtcttacgtgctctttgcctaaatgtctcccatgtagttcactatcgcttcctaccaccagatggtggaaagggaaaaggaaataacgggccggtagaggaatgtggtggcaggcagagtatctatggcgaaaggtgtggtggtgaatggacccaaaacggagcttctgaattgcccacgaatgcccacggattccctgttaacattttagcgcccactcaagggtcggccgtccaggtctgggagtcagtaaggcacaataatgcctgctagggagggagccagccctcatctcagcggattcctgggaacgtcagagctcgggaacattcctgaacacccgaaccgcacctggcccaggcactggggcggggcttaggcgggtcccagcgaggcgatgcgtcccctcggccccgctgcgtccttcgcccgtttttccccacgtcagtgccaccgcctcctctgtgcggaactcgcacctggcctgcctgcgttcccacgccccaccgaagggacgccgcgtttctctcccttccaagggacccttttccttcccctccaacagccccccgggaaaactcattccagattgcctcgatgccccagggccacctgccatcaccctggtcaggcgtttggccccgggcctgccctggtctccatccccagcccgtcctccacctcttgtcgccccctcccgctcagcccccttctcctccttctccacgtgcccctgcactcccacgcccctcccccaagaagcccctctcctccggtctcgaggagtctcgcggcacttcccggggcgtcagcccagccgctgcgggtgggtggcagccgcgcggagaggggtgcctctggcgcgggcggtgaggagggcgcccaagcccctcagccgcagggacgcccccggcgcctgccccgacgcggccccggccccggccccgcccctctccggccccgcccccgcccggcggccgcgcgtccccggcaggcggagctgcaggagcctcgcggcagcgctgaggaggaggggagagcgggcggcgcggccgcggctgccgggcgctgggctgggcggcgctgtttttttttttttttttttttttttttttttttttttttttttttttttcgcaatttccactcgcggggagcaggaaacccggcgcagccgggcgcattgggccgcgatgcaacagcagcagcaggagtcgccccggggcagcagcggcagcagcagcagaggcagcagcgggcggcgctgagccgccgccgccgccactgaggaagaagccggcccagccgccgccgcgtccggaccctcgcgcctgg

SEQ ID NO: 43526 - DNA, 2300 bp, Homo sapien
ggaagcaaagacttcgttgtcccaagagttttccttgactctcctccacgtggcctggtcacctcgtcagtgcctttgtccatactggggcccactgttaccaatatttttgtcatctccattgttttactcagtgctacttctggggatgggcgagggatgaagtcataccacaccttgttgcatcagcttcttcttccttccttgcttggttgttcctggtgaatttgtgcctggtggttactgaatttgctgggtaataaagacaataagagtttctcatccagctttacttttcttgcttctgcctggaagtatccccgtcttttttttaaaaaaaaaactattcaaaaatgtaggatttattaggtaaaatgtggtacatagtatacatctacataaattgttacacataaatgtagcgagtttttttccaatagaaaaaaatgaaaatgtatcatctaaaatatttataatagtgttctctgtgataagactatgggcaattcttcaaattgaaatttatgttgaagtaactctagattcacatgcagctataaaagaaataatacagagagatcccgcgtacaatttacccagtttcccccaatgcatcaatttttaaaaccagtaaaaccaccaacagaatagtgccttctgaggttggtgaaaccaataggaaagaaacatgacgaggggatgctgaatcagaaatgtcaactttcctctcaaccttttgtatatatgtccactaaagtacttactctacattgtgattctttgtttttgtgaatctcttcttcagcagtgcatgagcttcctcacagcagggactgtgtcttattatctttgtcttcccagtaccagcgaagggcctagcacgtagtggaggaaggtgaggaggcaatggtaggggacttatcaaaaaaaagaaaaaaaaaaaaaacttctcttctcaagtcttatgcattcaagaagtcaaattctttccagtcaataaaaaatgctatggataaccttttgttcaatctccatatgaaaattacacatgtagttcctaataaacatattctattattccctatttattcattcattattcaactaatatttaatgaactcttaccacacgtcaaataggaagctgggtgctggggatactatggtggacaagacagacacggtccctgtccttattttatactctaaattataaagttggtttttccttttaggctttagatcttatacacacaatgttttctgcacaggtattttgcagataacacgctttgcatattgagacagtgccaaaagaatatccaaatagggaatcagttgtggaatgaataatagtaaatcagccatcttacctttatgtgttacaataaataaaaagcgagctataaaggcgatttaccaagttatatttctgtttaatgtccatttttcctattagactcttcgtaccataaaggcagggtccatgtgtcttgtcttcttgttcattgctgtaattttagtacagtatctgtgcaatacatagttgtcaatcaaatgattaaatattcaaagctcattactgtcccctagaatatgggagtaaatgaaatcaattattttaaaatttaagacagattttataagtacctaacacaatataaagttgccatactacctgtgtgcatgcatttctttcttaccataagtggaatgctaaatatgtttggaaaacctgacctatagagattgtacacagtacaagacaggccatctacccaaatttattacctgcttagcaatgaatcaagtgcacttgccccccttatcatgaactcacttaaggaaaaggctgccctctcttttaaagatatggacaagaaaactgaatgtactaagatttttcacatccagtcatgaaaaaccaagttcttatcaaccttcacattttaattttgaaagctctgtctttgtaagcacagaacagtgctttaaacactgtttaaacagaggtgctatccaaggctataagtctcaaacaaaattaaaataatgctctcacaaactggcaagtaacttatttaagcagaaagagcaacaacattttattttattacaaataaacatttcacaaaaatgtaattgggaatgtatatgtactgttaagcagaacacagaaaacataaagaaataaggtattggggcctaaaaatttcatttaaaaatcccatccatttgctcttacacatagtaggtatgcaatacatatcaactgaactaaaagtaaacactctataaga

SEQ ID NO: 43527 - DNA, 2300 bp, Homo sapien
taaaggaatgatgttgacaaatatatacgtgcatgtattttgaagatttcattaaccaaaatagaagaataagaattttctatcagcactgtttttgtttggaattaaacatttccatactaatataaatgccaaaaaataaatcaacttttacatttctttcagttttaatagtgtaagatcctagtgaaaggtaaggatatgtatattaataaatttttattttttaatgtccctaaaaaatgtgccattttaccatgtttgctccgttattacttgcatggtcttatgtccagtttgtggttagtaattgaatattgtgcatagtatcacagtatagaatccacgttcattattctctaatcatagtctcattgttcttgtaaattcttcttcctgtatttattgaagccttacacctttttatactgtagtcaaccatccaaaagtaagaaggcatttccccctctaataactttctctgcagttatcagtcagttaaaagagcccatgtagttttagaattagagatatagggtggaaaagataaaatactaatttgaggtgtgcgtgtgtagtgtcaggctccgtacttgagagccaaaggtttaagagtcttgattttatgccagggatgccttcactgaaactcacccaaatagcagaagactgttttcatcaatttactaatatcaatgttatctagcaccacatgttttctttgtcctattgatttatcatgcgatattgctttgatgtgttctgttgttactttgcgcctttggggttccacatgccttcgtgggaatctcggggtgcaagtaacactgtataaacgaaaatactttgaaaattgcagtgtaaacaaaactagctcagatgtttgacactttgtttgaagtctttatttctcttgttttctctcaataggaatatacagatgttgccacaggaatctaatctgaaatcgtacaaatggaaatgacgctacaggaggatgtttgggagcatctctctctttttgtcaggagttagaagtgacactaaggcactaatactgtaacttcttgataaaataactttattttttagtagtggaatgctgcaacttttttacacctaacaattgcttttaaattacagtattcaatttaaaagttgtattaactacagtttcctttgcaaaaagtctcaaaagaatcacttgaagggcattatttgttgatgcatttttctctgagcatggtttcatagagagaacttcaccaagtaatattcagacgtttatatgttgaaagttttgcttacataataaaaacaaaaacaagtgtctgaattgtatagtgtctttacatgaaagaactttaaacagtggccttatggtagaaaattttataccagatttttctttttctgatgacattttggcttataactcgaagttttcttaagtttctgaagatcaaggcctatataattcatacatttcatattataagaaggcaagagacaaggtgcttcaaatattccatcaggtagttgtgagtgcactgaatttttagtaatatgttcattcagtttttttccacaactatttgctcttttccaatttcaaaatgctattgtggaaaatatgtaaagattttgtaatctatagtccatcttatttttccctcagggcaagcttgtgcatatcatatttttaaaggctttttaaaaatctgacaaacaaaatctcatatttgaaaattgtactttactactacagcattacacattttgcaagcacatcttatagagtgtttacttttagttcagttgatatgtattgcatacctactatgtgtaagagcaaatggatgggatttttaaatgaaatttttaggccccaataccttatttctttatgttttctgtgttctgcttaacagtacatatacattcccaattacatttttgtgaaatgtttatttgtaataaaataaaatgttgttgctctttctgcttaaataagttacttgccagtttgtgagagcattattttaattttgtttgagacttatagccttggatagcacctctgtttaaacagtgtttaaagcactgttctgtgcttacaaagacagagctttcaaaattaaaatgtgaaggttgataagaacttggtttttcatgactggatgtgaaaaatcttagtacattcagttttcttgtccatatctttaaaagagagggcagccttttccttaagtgagttcatgataaggggggcaagtgcacttgattcattgctaagcagg

SEQ ID NO: 43528 - DNA, 2300 bp, Homo sapien
tgttttgttccttgatacagccttagtagagaaagtagacaatcagctggagaaactctgggcctggcttgggtctgagtttgaattgtagcatcattaaatcttagactctaatttattgtcagaggtaatgttcagtttgctggagaccctcctacacattgatttgtgtgagtcttgccttcctgcttgtttcttacctggcctttgaactggatgtaagcttttgttgactggccctttgaagtcactgcatcttcttttgccagaactttgctgtcagcagtcttccaaaatggatcctgctgtgcacctaagctggccctcctccaatgggacaggtgtgctcagctcatttggataagcacgtggaataccttagttcagatggaaagagtatgcttgttggttgggcagtaccataatcagacccccagatgtacaatttagaatgcagatgtagcaaattgatgaatttagtttgagtggaagaagccgagggatcctaggaaaagcaactgtttttggtaggtcatattgagacacgcttagttgattaaatggtttacacttttctgtgtttgtttacataggtctttatcaccagtacctagaaatgctgaacactacaagcaaagacattcacacgggcattatggctgtgaatataggaaggatccaaaaagacccgtcgcgtggagaatggacagtgagaaacatggacagagtaaaccaaggattccctctcgtggaaatatatattaccagtcttatgaacatagatcaccttcccctaacataagaaactctttagaaaatgtttatatgtataagcctcacagaggatattcgcctggaagaggggacagtaacaggagagctcagtatatgcccaaatactcagagggtataccctacaaagagcatgaaaggaattcttatccccagaaagtgcaaggagggcatagtcctgatgaccacagagttagaggaagtggaaaaggagggaaaccacctcagaggtcaatagcagattcttttagatttgaaggaaagtggcatgaagatgagttgaggcaccagaggatacaagaagaaaaatactcccagtcaactagaagaggctctgaagactttgagacaaggagctcatttcagaagaggtataggaaaacattaaacctgggtaatttggtataaagcctcaagtgaaaagatctgtttactttatggttgaagataaccaccttgaaaagcttttgtctaaaaagacaaaaagcattgtaatttaattatggggtactggtagtagtgaagtatttctttttagagtaaatcatgttgatggctagaatacttttaaaagatggtattttcctctttaactgccttgtgcctatagaattggcttaaagggttatagattaacttgccactgcattctgcatttaaagccatgctgcccgacattctacacatataaattctccctttcttctctctattgcaagtgtaaactgctttatgtcaacacaggtatcctgaggatcgtgatttcagaaaatatggacacacatcaaaaagacctaaagacgtggagaggtatgaaagcagagagcctgccaggaacccaaagtggaagcctgagcattccctcccaccttaccaagaggacacagaccagtggaaccttgggccccaaacttatcgacatgctgagagggaacacccagagaccagttcagcaaccaaagtatcctatgactatcgtcacaaacgtcctaagctcttggatggggaccaggacttttctgatgggagaactcagaagtactgtaaggaagaagatagaaaatatagttttcaaaaaggccctctaaatagagagttagattgttttaatactggaagagggagagagactcaagatggacaagtcaaagaaccttttaaaccgtctaagaaagacagcattgcctgtacttattcaaataaaaatgatgttgatttgcgatctagtaatgacaaatggaaggaaaaaataaagaaagaaggggattgtagaaaagagagcaattcttccagtaaccaacttgataaaagtcaaaaacttcctgatgtgaaaccctcgcctatcaatcttaggaagaaatcacttacagttaaagtagatgtgaagaaaacagtagatacattcaggtattatctttgttttttctttatgatatttaataatgtttctacaatctttatttgcagcttcaaaaatggaattaatagtgtgtttagagtccatcaag

SEQ ID NO: 43529 - DNA, 2300 bp, Homo sapien
aaggcctttattactcagaatacagcaagcagcttgagcttcatgttcctgtcattccccccaccctctgggtcccgtgagggctgggactgcagagccactgactggatggatgccgtgaggcagcgagctttccatacaggcagtggggttatagtacaactgaggaacatgagtcccttatcaggggctgcagataaacccatcatgcagcctttgccttggaggagacatttattttattatcctggacagcaaacacatcagcccttttccctgagtgagaccctatctctatcttgcaacactgccttagaacaaaggttgtcagtgcctctgctcacagggcgctcgcaaggcgtgcagaactcaagagactgtggagaattatctcccaacagactccttgagtcttttttgttcctttaggaaaaccaaaaacaatagcaactgttccagcaaacttcttcggaagaaagggacactgtgctatgaaacatataaaatagcatatcaaaccgatattgaatgtgaagtaaggattaaaagtaagttattgggaattccatccagactgcaagacctttgactctggctgccagcttttctccttggctgtgaaagagatgaaatcttccaggaagtcctcagaggctccacttgcttcctcctgtgatgaggtgtagccagctggatggcagagtttctgctttagctaaataacacttgccagtatgtctagcttggtgactccagagggcaatattgccaagttcagtatataactcctagtaggtacatgaggaaggtagatctgcctcctttcttgtagggagggcacagacttatcatcgaaaggaaagggtttcactcatggttgcgccaactccatggcagcttctaagagagagccataacagaagctgcaaggatcgcttcctcattgattagaagacattaaaccctcagggaggagatggagaaattgggcagctcagatggtggaaaggtccccaggtgcaaaatggaactttattgtgtcccagatagtggcacacctctctttacgtctaggcaacccagactggtttccctggatacagaagccttccgccttagtggaaacacaagcctcaatgttggcaatgctgaggtatggagaaggtagttccataaaggatgtgctgtccctggagagcattgtagctgctttaaagtataacttcaccgaagttacaagctctgttcgaacagcacatctttccatagatatgcaaaggaacagatctgggaaagaaaagcaacttacctatgttagaggtatttctggaggaactaagcatgagattcaagtcttaagagcctcttgttcccccttttcccccggttaagtacatatgttttgttccttgatacagccttagtagagaaagtagacaatcagctggagaaactctgggcctggcttgggtctgagtttgaattgtagcatcattaaatcttagactctaatttattgtcagaggtaatgttcagtttgctggagaccctcctacacattgatttgtgtgagtcttgccttcctgcttgtttcttacctggcctttgaactggatgtaagcttttgttgactggccctttgaagtcactgcatcttcttttgccagaactttgctgtcagcagtcttccaaaatggatcctgctgtgcacctaagctggccctcctccaatgggacaggtgtgctcagctcatttggataagcacgtggaataccttagttcagatggaaagagtatgcttgttggttgggcagtaccataatcagacccccagatgtacaatttagaatgcagatgtagcaaattgatgaatttagtttgagtggaagaagccgagggatcctaggaaaagcaactgtttttggtaggtcatattgagacacgcttagttgattaaatggtttacacttttctgtgtttgtttacataggtctttatcaccagtacctagaaatgctgaacactacaagcaaagacattcacacgggcattatggctgtgaatataggaaggatccaaaaagacccgtcgcgtggagaatggacagtgagaaacatggacagagtaaaccaaggattccctctcgtggaaatatatattaccagtcttatgaacatagatcaccttcccctaacataagaaactctttagaaaatgtttatatgtataagcctcacagaggatattcgcctggaagaggggacagtaacaggagagctcagtatatgcccaaatactc

SEQ ID NO: 43530 - DNA, 2300 bp, Homo sapien
gttttaagtggtagtttaatgttaggacaagtcaaagggcaaagcagggggctctgcttacaagagtggttgaaggctgggcacagtggctcctgcctgtaatcccaacacttagggaggccgaggcagcaggatcacttgagcctagaagttccagaacagcctgggcaacatggcgaaaccctgtctctacaaaaaaaaattttttttttaattagctgggcatggtggtgcacgtctgttgcaacagctactctagaggctgaggcaggagtgtcacttgagcccaggagtttgaggttacagtgagctatgattatgccactgtactccagccaggaccacgaccaagtgagacccctgactcttaaaaaaaaaaacaacaaaaaaaggccgggacgcggtggctcatgcctgtcatcccagcactttgagaggctgagacaggcggatcacttgagatcaggagtttgagaccagcctggccaacatggtgaaaccccgtctctactaaaaatacaaaaattagccgggcatggtggcgcacacctgtaatcccagctactcaggaggctgaggcaggaggatcacttgaacctgggaggcagaggttgcagtgagccgagatcgcaccactgcactccagcctgggtgacaagagccagactctatctctaaataaataaataggccgtgcgctgtggctcacgcctgtaatctcagcactctgggaggctgaggcgggaggatcacctgaggtcaggagttcgagaccagcctggccgacatggggaaaccctgtctctactaaaaaaaaaaaaaaaattagccgggcatggtggcgcagcctgtaatcccagctactcaggaggctgaggcaggagaatcacttgaacccgggaggcagaggttgcagtgaaccgagatcacaccactgcactccagcatgggtgacagagattctgtctcaaaataaataaataagtaaaaataaaaaagtggttgtagtcaaaggctatgggtttaagttgggtagtgggatttcaacatttaaggttttagagatggagcagtatcaagtgatgaatatctagattttctagactacgggtgaacaaagtagaagtaaaggtcattcggattgaggaactgaaggaaaccaggctgggttgtggatgttggattcattgggaggatggcagtaaatcagatggagaggaaaactaatgccagacagtcagtaggtgacagtgacaagggagggcaaaaggtgttactaccagatggcacagagcctgaaagagctatttcacaaggggaagaaagaatatcagtgtcaagcggaaagcttcaagagtgaagaagacacactacctttgaggctggtgcatggagtgtgggaggggagaaaccaagcgagtagacagagatgaggcaatcttttgaattggatgacggatagatgttggtaccatccgaccatttgggaagtccagaggggaggctttgttttccgggaatatgcttaatttgaggagtgggaaatggatagagggtaggtgaatggttagagatctgcacaaagctggaaggcccacgggatcaagttctgcccatgactgaggggtgacctccaatccctgggccttaacccccaggatccctggacctggaacgcccattaggtcccctcctttccggcgagagggcggcagagggcgcaggcgctctagccggacccggcgggcgggtggcagagggcgcaggcgccctggacagagcggccgcagtgggaacggccggcagggggcgcagcgctctggtccgagaagcccgggcggggcaccctcgccgggagagtagaggataggggtcggctggagaacgggcccagtgcgaggccgcgagcagtgggcggggccggggtgggggcggggcgaggcggttccggaaggaagtggttccgggtcccgcggcccggcagaggtggctggggtgtcgctgctgtgggaggcggcggcagagtgaggggcgaggcccgaggggccggcggcggcggcggcggcggcggcggcggcggcggcggcggcggcggcgggggcttcccggccgggtgagcggctcggggggaggcggggcgaggaggcctgggcccgcagggagggcgtgtccgccacccaggaggggcggttctcggggtggcggatggggcagcggggaggatgcggcggtccgactcgggttctgttgggacagctcctctgcgccccgtaggtccctcggtcagcgccttcccttgg

SEQ ID NO: 43531 - DNA, 2300 bp, Homo sapien
ggactaaccttaaataagacttgtgcactggacaagttttgttttctatatgtatgaatcaccccattctgactttttggggttccataaatcctcttctcttagaacttgcttatcatctatttctcatcatctctccaaaagtgggtgatacaaagtgagtgtgtctttctctcagggacaactgtgttttcatcggcctcctcaaggtctgaaggaatgaatctccagtggtgggatttggagcagctcagtggactggggatggatggcaggggtagtttttctagaggccattgaaaagtccaggggcaggtctggctttcagtgagcactcattcccttacaagggtgccccccagatagctgatcagtggtcaggctggttcagtgaagctcactattctttcttttcattggtcccctagtagagaagggaccactttgtgaggtccttctggcatgtaggaaatctaccgtaacccacccaatacttaattcactctaggatgaaaggtttcaacacttcagttaggtcattggttaaatactttacgttaaaccgtataatgaaatactattcagccccaatctcgagtggctgtacttcaggcatcacatggcagagaagttctcttccttccaagccccagcttttatcaggcagactgccagagttggccatcatcgtttaatgggccagggtcgtgaggactggactctgccaaggcatgcatactcacgattgtagagtctcaggccaaatacaagagcacagttaatagctaatacaaatctaagagttacaggaggtaaaaatccccctttctgcttacaggtccctggagaggcagtctcttagcaaagtgctattcagagaaaaattatgtagaggaggctgagatgtggagaagccagatcctcatctcatccctctggtatagacagaagggataaatccagatacctattaagtgacctttatatgtttctagtaagtgtgacataaaggagcctttcctgatctttaagtcatggttactcagttgatgatgtcctaaattaattttgcttctgtgtgtatttttttaagccatgacaattgtatctttttgttttagaatgggctatgattagcccagttcctggagcacctcggggttgggttttatgagggcaaaagggtgtcattataactgctagctcaggccttctccagtggagatagggagaggagttggtatttgcagtgtcacggaggtggtggggagtgcagaattagagcaccttcactgcagcagcaaggacaactttatgaaagtaacaatttgggtaatacaggagagtgtttttgataaatactgttacgagagaagccgaagcctaatggttgtttttctcttctggttaaaaattactgggttctgcctccctgcctcctccacctaagtaactctgggaacgcatggatgcttttttttttgtggccagaaggttctttactcttgcctcttgaaaattttgaaatatgcaatattatcccagattactatatagcagaaaagcgtcacactatgtaaaacagttggttcccctttaagaagttctaagatgaaaatgcagctttgcaaaatagatctcagtgtcatgtatcaccccaaaaactcaaattatatttgcattaaaattttctcaaagcaaaatgttttatgcttttaactagaaaggatgctcttggttctggagcagaattccagctctcctggttagggcaaaatgccttgagataggcctcaaggagttaatgcttattgggcattattcctagggcagcttctccccagggaggggaggggacaggacacacggtgtttaggttgagagccagtgctagcctagccgcattgtttactctccacctactcagaacacgctggtgtggcagagagagcacgtatgcctgggttttggatgctgagcacagaaagccccatttggtgactcacactgtgcactgaggcagcaggtagtgtggtggggctgggtagttaatcttgttaacacttgccttacacgaactgtgtaggaacggctggaggcgatgatgcgccggtccctggagcgcacacagcagctggagctgaaaaagaagtattcgtggggagcaccactggccattggacccggaggacatgatggtgagtgtagggttgcccctgtatttcaggtcctgggtgggaaataatggagcaggcaggggattatgggcaccactgggtgtctccaggatctgggggatg

SEQ ID NO: 43532 - DNA, 2300 bp, Homo sapien
gattgacattggcacaaacttggcagaaccaaaattgaacttgagtgttgtctttcatagtgctcacccaaggagctcatacgttggctcctttcagaaagtaggccgggcatggtggctcacacctgtaatcccagcactttgggaggccaaggtgggcgaatcatctgaggtcaggagtttgagactagcctggccaacatgatgaaaccccatctctactaaaaatacaaaaattagccatgcgtggttgcacgcacctgtaatcccagctactcgagaggctgaggcaggagaatcgcttgaacctgggaggcagaggttgcagtgagccaaggtcgcgccaccgcattccagcccaggcgacagagtgagactctgtctcaaaaaaaaaaaaaaaaaaaagtaaaatgttcagtgtctgtgtaatgagcagtattcaaaattttgtccatttttgtgcttctcctctcccccaggtggtcctgcttcaggcttgggagcctgactagacgaggcctagtgggcttctctgcacactgccaggcccgtctgtcacttactgtactttctgaccccttgtctgcctgggggcaaaggattaaggaaggggctttgtcctctggggctgatgttggcccaactacaggacagcttggcaggtgcatgcgaaagtggtagctgctgcccctcagctgtgtgtgtcatggagagtgacagattggacttcctttggttgaagtgatggagatggatgatgtgcacgtgcagtcagactcgggtgccatgcccagttgcctatagtacttagcagatagggaaagagtgaagaactgaaacataatctagttttctcctttgtaggcatggagggatttttgaaatcagatgagaggcagagattggccaaagaaagacgagaagaaagagaaaaatgtctgggtaagttatgcactttggctattttggtccaagggagtggagatatggtggtgtcttttctgaagattcttagaaatttgtgaatgaatgggaactaggacagttgctagatgaacatgaagaatcaggcgtgaacctacactgcaactggcatgttcacaaataggtaattttcagaatagttcactcggcaaacattgaacctctgctgtgttctagccactgtgttagggtctgcagttacgatattgaagaaagagaaacagtcgctgcccctgatctaaggaagtcctaacaccttcaagtgtcaactgtgtacactccctcaggttctctcttgggaatctaaaagggccatcctcaggagaactgagaaaatcagcacttgagtcattttatattttaggacagagagccctggttgagaaaggccgtcttgcctcttgcaggctgtagacagattagtgcagagtgttcttcacaggatgctgagggagatagcgtttccccattgcattgagacaaatgaggagctttcaggttcttctcttcttcactgcctcctgctggtcggtacaagcattgcctcctccagggaacccttccctgccttggctaggtggaattaagggccccttagtaaatgccttgagggtaaggcaaattttgttcgtgtgttttaccccctgacttagctcagtgtctggtgcttggtgcacacacagttaaactgcttttgaatgaacatagccttataagcatcattgctcaacctagcatatagtttagccattatgcacaagtttgacttaatgacagccgtcatagtcatagctcccacgtggggaggcacttactgtgaacttcacggtcatcatcttgttcaatcttaacaacactgtgatgtggcaaacatgactgtccccacatcgtagaggaggaaaccgaggcagagagatgatctagctaacatgcttagggttacccagctagtggcagaggtaccagaaccctttatctcaatcactgcatgctaggatcctaccaggctctttttagggctctgctcttgcttccttgtttttggtcttaatccaaactgcatgggatgctctggtaatgacacctctcttctactttccttccccagctgctcgggagcaacagatcctggagaaacagaaaagagccaggctgcagtacgaaaagcaaatggaggagcgatggcgaaaactggaagagcagcggcagcgggaggaccaaaagagagctgctgtggaagagaaaaggaaacagaagctccgggaggaggaggtaaggcccaggtgcaccctccgccaccttccagccccctcagc

SEQ ID NO: 43533 - DNA, 2300 bp, Homo sapien
gggagactgagttacagagagagcagaataagagtcctcaaaccatgtgggagcacagagcatcatagggctgggggacagtgggggtcttgaagatgggcagggtttaaacagatggagcagggtagaataaaggatggcatgagctagaaggtgcatgggagaaagggcagtgctgaggtaaagttgggaaaagagtttggagtcagattgcggggtggctggaatgagctgaggagttggcctttaaatttttgatgacgttcatattgttgatagtgtcataatgattaagagatgaccaaaaacaaaatgaagaatggcacttggatttttctagtacttatctcattttaatatccctgatatttaatctaggctgcaaaaccagatgtatgtggggaatcatgacaatccagtgtttgtcacgccatcccccttcctcattcccactgcctacactgtgggccaggccttcaggcctccctcctggacagcagcaggaacctccttagaagaagcacaggttgctgtggcagcaaggcacactatgatgccaacttgtgatgctcccagagaggaaggcacagatgctggggaagtgaacctggttatattaacatgaaagctgacttctaaagaatggtgtgcttctttgggaggccgaggcgggtggatcatgaggtcaggagatcgagaccatcctggctaacaaggtgaaaccccgtctctactaaaaatacaaaaaattagccgggcgcggtggcgggcgcctgtagtcccagctactcgggaggctgaggcaggagaatggcgtgaacccgggaagcggagcttgcagtgagccgagattgcaccactgcagtccgcagtccggcctgggcgacagagcgagactccgtctcaaaaaaaaaaaaaaaagaatggtgtgcttaaatattatatacataatatactgggtccagttgtaacagagtgcagtaaattatttgtaatcctaaaatgatcatgaagatccatttaatcttttgtttagaaagccctttagggttctgcaggggttggttggagatgaaaagctccagggatatttctcagacattttcggggaagttgtcatttgttccatcttatttgttgtagatatttggatgattctaagatactaagattgacattggcacaaacttggcagaaccaaaattgaacttgagtgttgtctttcatagtgctcacccaaggagctcatacgttggctcctttcagaaagtaggccgggcatggtggctcacacctgtaatcccagcactttgggaggccaaggtgggcgaatcatctgaggtcaggagtttgagactagcctggccaacatgatgaaaccccatctctactaaaaatacaaaaattagccatgcgtggttgcacgcacctgtaatcccagctactcgagaggctgaggcaggagaatcgcttgaacctgggaggcagaggttgcagtgagccaaggtcgcgccaccgcattccagcccaggcgacagagtgagactctgtctcaaaaaaaaaaaaaaaaaaaagtaaaatgttcagtgtctgtgtaatgagcagtattcaaaattttgtccatttttgtgcttctcctctcccccaggtggtcctgcttcaggcttgggagcctgactagacgaggcctagtgggcttctctgcacactgccaggcccgtctgtcacttactgtactttctgaccccttgtctgcctgggggcaaaggattaaggaaggggctttgtcctctggggctgatgttggcccaactacaggacagcttggcaggtgcatgcgaaagtggtagctgctgcccctcagctgtgtgtgtcatggagagtgacagattggacttcctttggttgaagtgatggagatggatgatgtgcacgtgcagtcagactcgggtgccatgcccagttgcctatagtacttagcagatagggaaagagtgaagaactgaaacataatctagttttctcctttgtaggcatggagggatttttgaaatcagatgagaggcagagattggccaaagaaagacgagaagaaagagaaaaatgtctgggtaagttatgcactttggctattttggtccaagggagtggagatatggtggtgtcttttctgaagattcttagaaatttgtgaatgaatgggaactaggacagttgctagatgaacatgaagaatcaggcgtgaacctacactgcaactggcatgttcacaaataggtaattttcagaatagttcactc

SEQ ID NO: 43534 - DNA, 2300 bp, Homo sapien
ttatgcagtgtcatttatatacaattaaaatacatgcgtatcttcaaaacagtatttcaaaattgcagctgcaaagatatcagaggaggtgtttataattagggagaggaatggaaagtaaaaggaccccaaaaatagaataaaagtagagagggatgctacacacacatgtccatgagctcaagagttggatgaattgaactcaccaaaggtccctaagataagggaggagaaagtgacagctcccacgctcttaatttggcttaatctcaatgtgttcgagttttcattacagctcagggtaccagcccccacctgctcactttcctactcatttatgtttaaacttcctggctttctcaccacacttgaaccctactcccggcacacctttgggcgtgtcaggaacacgttcatcacaaacattttttgtgccacaaagggactttcccagctttggccaagagtacaggtgcccattcctgagagtttcagcttcacattaaaaaaaaaaaaatgagacataattaagggaccataaaattcacccgcttaaaatgtacaattcaatagtttttagtatacttagttgtgcactcatcataatcctagaatattttcatccaaaaaagaaaacctgtacccattattcagcttcatttttaatcgtgtatatctccccccaggagtggtaataaaactttcaggctggtcaccttccaacgagaaaaaacatgcagcctggggctccatgggaacgggttatcacttggcaggcctgggtaaacaaaaggcttgagccggccctgccaagatgtctttttcaatgtttttgaaaagataataaatgtgcatggcagtggtaaaagtgcctacttaggaggcaacccgtttagcagtttcttgtgtgtcttctcggagagatcctcctcagaggttttttgttttattttgcttttgagacaaggtctctgtcgcccaggctggagtgcagtggcgtgatcactgcagtctcgacctcccgggctcaagcgatcttcccgcctcagcctcccaagtagctgggaccacagatgagtcgccatgcccagctaatttttaaaatttttttgtagagacgggggtctcgaactccttagctcaatcaatccgcccgcgtcagcctcccgaagtgttgggattacaggcgggagccaccacacccggcatcgcggaggtttcagtcagcattatttacgcctcaggagaagaggaaccaaattggctgcggagtagggtgtcgttgaaaggcctaggtcggcctacggcgcgtgccgctgcctcttagttgaagatcgaccccaatagcttgctgctgtccctctctgggtgaccgcacgctgagggtggggcgtcactaaacactgattacccgtgcgcctcgaaaactggaacctaactatgcatggagggcgggtcctctggcgtctgcacagatgtcactggcccaactggcacccacctgggggcctagccagaaattgttcccaaggctgcattgctgagtttgcatgcagacacccagtgagtgtaagcgtgtgcgtgctgagtgagcacgtgtgtgcgcgttatgtgctctgtgttcacacattgagtgaggatgtgtgtgcacggtgtctgagaaactgcaccctacatctacacacgctttgagtgtgtatctgctactgtgagaagatgcatttacgctgggtgtgcacgttgtgtgtgcatgttgcatgtaagcatcgtatgaagaactgtgtgcgtacgcacgccttctgtgtgtgcactgtgtacagcagcgtgtaaggacgcgtgcacgcccgtacgcgctgtgtgaggactgttgtgcacattgcatgcacacgctacaagcgcgcgccgcgtgagaaccggtgcgcctatcgcacgtgcacgccctgcgtgcgctgtgcgtggaagcggtgcgcctatcgcacgtgcacgccttgcgtgcgctgtgcgtggtaaccggtgcgcttatcgcacgtgcacgccctgcgcgcgtgctgcgtgaggacgcgtgcgcatgcggacgcgcgcgggttcggtgcggcgcggcgggcttggcagtgcgcctgtgcggccggcgcatcccgatggagcgcggcggcggcggctccgggacgggatcccggcctgaggggactgcgcggggaacctctctcccagggaagatcgcagaaccgggcgcggtgcggacctctcagcccaactaccggcctcaaggtattatccccagagtgtggcgggcgcccgag

SEQ ID NO: 43535 - DNA, 2300 bp, Homo sapien
aataaatttcataaaaaatcctttcatcctcaattatgtaaattgaaaaatattgcagatagaaagagaaacccagaactttgagtcccccattatctttcaatttcactctaagaagtgcatctgtcattgggtttctcaatatcagctctgctgatgttttgggctggataattgtttgcttgtatgggggaggggagattgtactgtgcactgtaggatgtttagccgcatccctggcctctgcccactagatgccagcatcactgcccccctcctcaagttatgacaaccagaaacatttctggttgacgctgccaaatgttcacagaaaagaaccactatattagatgatgatactttatttctgtcttctaagtatgtgcaaaccctggtgtttgtggaaaggtgatttatttaaaataagtttacttggtttagtcaaaataagtttacttagaaataaatcttgtagagtacagcccagcattagccagctgtattagtttgctaggactgtcataacaaagtaccacgtactgagtggcttaaacaacagaaatttattttctcattgttctggagactgaaagtctaaaatcaagcgtcaacagggttggcctctctcctgggcttatagatggctaccttcttgttcacgtggtgttctccctctatgcctgtggcctaataatatcttcttgtaaggacaccagtcagataagggtccacactaatgacctcatttcaatttaatcacgtctttgaagaacttatgtccaaatacagtcacattgagttactggggattagaacgtgaacatacgaattttgggggggacacaattcagcccattaacattgagcttaagtcttttctcccctccctcccttcctttctgtgtgtattgaacacctattatgtgccagacattcagctaagtgggggtaatggtaagcaacaaacatggtctctgcccggtaaggtttacagtgaggtaggacagacagacttaaagagtaataacaagtgccatgcaaatattatgctttggtaatggatgccaggaaagccttgcccttcccatcaggctcccaacccggctgggcgagtgaaaggactgcgttatgagctaaccggctgggcacggtggctgacgcctgtaatcccagcactttgggaggccgaggtgggcgcgagttgaggtcacgagttcgagaccagcctggccaacatggtgaaaccccgtctcaactaaaagtactaaaattacctgggcatggtggcacatgcctgtaatcccagctactcgggaggctgaggcaggagaatcgcttgagcccgggaggcggaggttgtagtgagccgtgatcgcgccactgcactccagcctgggcgatagagcaagactccatcttaataaaaaaattaaaatattggccgggcgcggtggctcacgcctgtaatcccagcactttgggaggccgagacggatggatcacgtggtcaggagttcaagaccagcctagccaagatgctgaaaccccgtctctactaaaaacacaaaaattagacgggcgtggcggcacgtgcctgtaatcccggctactccggaggccgaggcaggagaatcgcttgaacccgggcggcagaggttgcagtgagccgagatcgcgccactgcactccagcctgggcgactctagagcaagactccgtctcaaaaaataaaataaaaataaaaatatacatattttttaaaaactgagctaaccacgaggttaacgagtcagccacttgtgaaaccgggagacgcgcgtttgctacaaagcagcagaggtctggtcttaaccagcagcaagcgccacctcaacccgcccttttctatgacgcagagtctctccccctccctccctgactccgccttttccctgcttgaggccctgcccctcgcgtcctctctggcttgctgcgcaccctcccacaacgcgtctccctcggctctaacaataggagtcagtcggccacgcctgcgtcataaagcctgggggcgggcccagccggcgacgggaggcggggaaaagcgacgcaaagagtcgcggcgccatttgctgccgccgagcgtggacgcaggcggatctctgaagagctgggtcgccagcctctcccgcgcacgttgcctggcctccagcacctacttggtcccgcgcgctccctcgtgtcgcccctcggagcagcagccgccgcggtcgccgctacccggaaagaagtcagagacgccgcgaggtcgccgccaccgc

SEQ ID NO: 43536 - DNA, 2300 bp, Homo sapien
gaggttttatactgggtaattgacagaaactttttatttttaaacatttagagttccggactcttagagtctaactacttaccatgtactaggcacaattgctaattgaatgcattatatcaatttaattcctgcaacaacctaatgtaagtactattcttttttttttctttttttttgttcgtttgtttgttggagatggagtttcactcttgttgcccaggctggagtgcagtggcgcgatcttggctcactgcaacctccgcctcctgggttcaagtgattctcctgcctcagtctcccaagtggctgggactataggcgcctgccaccatacccggctaatttttgaatttttgagtagagatggggtttcaccattttggccaggctggtctcgaactcctgacctcaggtgattcgcccacttcggcctcccaaagtgctgggattataggtgtgagccactgcgcctggccggttagtactattcctacatccaatttacagatgagaaaacggaagcttgtaaagagattaaaacttgcccaagaaaatagagtaataagttactgcagagcttgaatttgaacccaggcctctctaactccaaagctcaagttcataattatttgaccttggagcaaaatttaaataaatttcataaaaaatcctttcatcctcaattatgtaaattgaaaaatattgcagatagaaagagaaacccagaactttgagtcccccattatctttcaatttcactctaagaagtgcatctgtcattgggtttctcaatatcagctctgctgatgttttgggctggataattgtttgcttgtatgggggaggggagattgtactgtgcactgtaggatgtttagccgcatccctggcctctgcccactagatgccagcatcactgcccccctcctcaagttatgacaaccagaaacatttctggttgacgctgccaaatgttcacagaaaagaaccactatattagatgatgatactttatttctgtcttctaagtatgtgcaaaccctggtgtttgtggaaaggtgatttatttaaaataagtttacttggtttagtcaaaataagtttacttagaaataaatcttgtagagtacagcccagcattagccagctgtattagtttgctaggactgtcataacaaagtaccacgtactgagtggcttaaacaacagaaatttattttctcattgttctggagactgaaagtctaaaatcaagcgtcaacagggttggcctctctcctgggcttatagatggctaccttcttgttcacgtggtgttctccctctatgcctgtggcctaataatatcttcttgtaaggacaccagtcagataagggtccacactaatgacctcatttcaatttaatcacgtctttgaagaacttatgtccaaatacagtcacattgagttactggggattagaacgtgaacatacgaattttgggggggacacaattcagcccattaacattgagcttaagtcttttctcccctccctcccttcctttctgtgtgtattgaacacctattatgtgccagacattcagctaagtgggggtaatggtaagcaacaaacatggtctctgcccggtaaggtttacagtgaggtaggacagacagacttaaagagtaataacaagtgccatgcaaatattatgctttggtaatggatgccaggaaagccttgcccttcccatcaggctcccaacccggctgggcgagtgaaaggactgcgttatgagctaaccggctgggcacggtggctgacgcctgtaatcccagcactttgggaggccgaggtgggcgcgagttgaggtcacgagttcgagaccagcctggccaacatggtgaaaccccgtctcaactaaaagtactaaaattacctgggcatggtggcacatgcctgtaatcccagctactcgggaggctgaggcaggagaatcgcttgagcccgggaggcggaggttgtagtgagccgtgatcgcgccactgcactccagcctgggcgatagagcaagactccatcttaataaaaaaattaaaatattggccgggcgcggtggctcacgcctgtaatcccagcactttgggaggccgagacggatggatcacgtggtcaggagttcaagaccagcctagccaagatgctgaaaccccgtctctactaaaaacacaaaaattagacgggcgtggcggcacgtgcctgtaatcccggctactccggaggccgaggcaggagaatcgcttgaacccggg

SEQ ID NO: 43537 - DNA, 2300 bp, Homo sapien
gcagatcacttgaggtcaggagttcgagaaaatcgtatttttaaaacaaggcggccgggtgcagtgactcacgcctgtaatcccagcactttgggaggccaaggtgggtggatcacctgaggtcaggagtttgagaccagcctggccaacatggcgaaaccctgtctctgttaaaagtacaaaaattagccgggcgtcatggctcatgcctgtaatcccagctactcagaaggctgaggcaggagaattgcttgaacccgagaggcggaggttgcagtgagttgaaattgcaccactgcactccagcctgggcaacagagtgagactccatctcaaaaaaaaaaaaaaaaaaaaaagaagggaagtctgggaggaaaggagaaaatgaggggagggagggaggaaaggagaacagcagaggagtgaagcagaggagcagaaagcaaggggaaaataaacaattttttaaaaattttttagttgacaaattatgtatattcatggtatacaacatgatgttttgatacatgcatatataaaagattacttcttaaggagttcagtttcaatacattctttttgttttgtctttgcccctgaaagccaagtagaatgtgttaattctggagcttcctgacttctaacttatcaagatttgcctagtattgtaacttgaaattagtagaactcagtagtcactgaggaacttatgaccttgcagtcatcaaagtcttctgtgttcttttcccaatgcctcatcagtaattcgttattaaaatagtctggagaagtgatgtcctggatgtgaggaactaaatctaatttgattgattggaacacagactcagaatttggtgacagaaggcacacttaagtctaaaaaggaatgtcagagaagcttatgataaaaaagtacagtagtcccccactaatctgcaagtttgctttctgtggtttcagttaccacagtcaaccattgtcaaaaatattacagtattttgagagaccacattcatataacttttattacagtatattgttacaagtgttctaatttattattagtcattgttaatctcttactgtgcctaatttataaattaaactatatcataggtatatatatctaggaaaaaatatagagagacttcggtattatcctcaatttcaggaatccactgggggtcttgaaacatatacgccacggataaggggggactactgtactcaggtagatcattaaaagaggaaaataatacagaactctaaagaagaggtttcttgcatgtgtaacaccttgtatatcaaataggcagtaccaaaaataaagtccagatttgttttggttttttcctttttactcctcaatgccctgtctattccatttagtctatcagaatatatttgttgtgtatgtatcttgtacgtgctgttccttctagttagaatgactctcccttactgttcttatggctcattcattctgttcttcagctattggatcagatgttacctaatctagagacccttcctgactgccctatttaaagtgacctccctagttatgtcccatctctcaacctattctctgcttcccccagaactgtgtaagctcctagcatggaaaggccaggatctcatgggtcttgttcaccacggtatctacagcagcttatataataccctggtacatgatagacactcaatattaaatgagtgatcaacctggaggtagatatattattgctgtttgcaattttccttaacccaattactcagttggacaaagaggagggaggtaagtactattctttcttcctcctcctccttgcccccggtctatgttagagagttatgctttacattatcagtattttataatgttaggctaatttaaaggtcagcactcatcatcttgttaagtgcattgcttgacagtttgtgaataaagaactttcagtaatggaaatatattgttaacataactctttaatttgtatttcaattaggtggttcatagagacttgaaacctagcaacattctttatgtggatgaatctggtaatccggaatctattcgaatttgtgattttggctttgcaaaacagctgagagcggaaaatggtcttctcatgactccttgttacactgcaaattttgttgcaccagaggtaattgtgagagagtttgcttgcagtattagtatgttttaaaactcattcactatgtttaataccgaattattaataataatttaattgaagacttactgaagaaataattaggataaaatgccagcc

SEQ ID NO: 43538 - DNA, 2300 bp, Homo sapien
aaatagtacacaactccttatcctccaaacttctgcaagcacgttttaccgtcgggaattacacagagaaggtgctgccaaattagctgagtttgggcccaggttggatttgcaacacctgaatatagcatgtgaagggaagtgacaaaggcaagagccaagtggccccattcgccttcttccccagaccacgttgagtctgcccagatgttgtccaacctgagcggtccccctgagtccaaagcttcgggagaaggcgcgcaacgaggacttcctgccgccttctcaggctccctaaacagttggagcctccctaaatggccacgaggttccccggcctcgagcctgtgccaaggggcgcgctggcgaaggcagcagaaagagcccaacacctgcctctcgcaggcccagcgagaaacctcgcaccgcccgcgcagacctggccggctgggtttggggctctaatctcatcctcacacctgcttagggaggcaggcgagggttctccaggtgtctgggtcccgggaggatgaaaggaagctgttaataggcgtgcgctgggagcgcagcagcggacgcgccgtggtcgctgggcgtgggaagaccgggatgcctgggccacggcctgagggtttgaagggacaggccggctcggagatctccctttgctttttctcttcccctcgctgggcgactagccaggggctgcagtagctttccactcagccctgcgacttttacacatttctgcccgggcgcacttagcgcgcagcggctcctggcgcagtgaacacagggtcgagtcctcttgggacgcaccccggacgcccaggccttccccccaaagctctcgccgtcctgtggggctccgtcgccgtcggggcattgggtttccttaatccagggcttccccatcttgggcaggaggaggagtcagaacccctcccctccctctgtccccctcctcctcctcctccgcccacggccagcctgatttttaaatctaatctcttatttaaagtcaacagaggagcaggaaccccgcgctcctgcctacaagatatttttaaataattctccaacctctaccgagagggacagccttaaggaacctccctgttttcccctcttgaagatttaggtagcagacgtggggcggggggcagcggttccagggtcgcagctgaaggccgagagctctgcgcacttggggaggagaatttgggctgggggcggtgcgggggaagcgactaatacaagaggaattaatcccaaatagccacaatttaacaaaagagcgtcaacttgaaaagacttgaatcaaaccgggagccgagcccccaggaggctcctaggcacgaagcctcccttgcctccgtcgggggagatggggggcaggtgatttcccagcatgtgaccctgaagagggagggtcttgggccattacgggatgcgcccagagactaggcgcgtccgcacgcacgcacccccggaggagacaagccgaaaagacactccgcacccctccccgggtccttggctcgggactgcgcccccggtactttgcccacctccctccccagctgggcggggaccactgttctccctcattcccaaggagcctccgacctccttggacccttggcggtgaaaggctcccagccttcgcccctcctgcctttcccatttctttcccccgcctcccgccgacgcccccagatctgttgggctcgcccttcctgaaagtaggcgaggcccagaagctgaggttggggcgcagaaggaggggggtgggaagagggaggagcggagcgcagcggccgggggcgtgtcttccactagcccagcccctgggtgcgcgcggcggtggtggcggcggccgagcctcgctttgagagacaggtatcgcttaggcgccatgttgtgagcggaagtgggggagcgcgcggcggtcgctgttctgctgggagcgggcgcgggaaccggcggggggggcggagccgtagtcccggcggcggaaggaggagaggaagaaaggggcgagacccggtgcccagcggaggcgcgaggctctcgctcagcgcgcgggcgtctctggccaggcgcgcggctttcgggcggtcggcgtcggcgtcgagccctctctggggccgccgccgctgctgctgctgctgccgctgccgctgccgctgccgccgccgccgccgccgccgccgctgccgtggggctcgggcggcgacggagcggggccggccgtggggcgggcggggagggaggaggcggtgaaggcggcgggccgg

SEQ ID NO: 43539 - DNA, 2300 bp, Homo sapien
acaatgtatccattacatttaaaatatatatatatacacacatatatatacacatatatatacatatatacacatatatacacatatatacacatatatacatatatacacatatatacacatatatatacacatatatacatatatacacatatatacatatatacacatatatacatatatacatatatacacatatatacatatatacacacatatatacacatatatacatatatacacacatatatacatatatacacatatatacacatatatacatatatacacatatatacacatatacatatacatatatacacacatatatacacactatatatacatatatacacatatatacatatatatacacacacatatatatacacacacacacacacatatatatatatatatatataaagctactccttcaattactgacactgaaaacggtcttttctagaaacattgatgtaatgttcttagactctactggaatgtaagcactccaaaatacaatacctttcacacctggtcagccaagaaaaaattgtaagtcacaaccacgatctggattgtgaaagtaaggtgttgtatctgtgtcctctgaatgtaggcttgtctagataattttctaaatgtctttccaaaattctgcatatacttctaagtttggatagttagaaaaataaagaagcctaaatacaggccatcttaaattttacttgttcgctatcactagcattgaaatcagcagttaaaaacgtcacaatattttaactactgtggtttcagctgtttgtgtgtgtgtgtgtgggggggaagggtgtcgtcaactcatgccggttaaagaacgtgacatttctgcatcttataaaattggactagagaaaatgggttaccataggaactggcaaaacctattgacattactggaatgcttatttaaaaagtttcttttacttaatggacctatttaagaatgatagagaaaacgcctataacggtggcagagagttagcatctacactctaggaatatttgtcttttaaagtgaagcctcattaggcaaactgtattttactaaccgttgcatagtagcctgtgtatggtttttgaagaaaatgagttttgaaaaatcatgtctacaatttgtcactcattttaaatcccattgttgcccttcggttcttattaatatataagaatatcaaacacaaaatgacttctctaaaataggtactttagaggagttggcccaaaacctgaaacagagccctttaaaatggtacttggggcagaacctgtctcaggatcaccacaaccagcagctggcaggtgacagcctcaacgcctgacttcccaggacccgctcatcacccggggaagatccgacagcactagccctcctgcctcatcatcgctgcgcttctggcaggcggagccccgttctcgtccacggcagtccacacctccgtctctgcaggcgtacgcgggtctcgggaatcacctccggagcccactcagcagcggggagggcgagggcgaaagcgagagccaggaaagcccgggctctcgctgtaagccccgcgctcagtggtgtccccctcccctcggtggtggggccgcggatacctcctcagccgcctcagctgtcggagttcaactggtgggcggcccgtcccgccgtggccgccaccgccgggtcccctcagaggcctcacaaagccatgctccagccgcccgcacctgattgaccgaccccgggctctggctctgcctcgcgccgccaccgcctccgccgccgcgcacgcgcacttcgcgcgcctctgttcccggacggcccccagagcgggaacgccaggctgcgagctgctggcacctgtctgcctgccagacagaccctgggctccggcctcgtgccggcacgcgcacgcgcacgcgcctcgcgcgcctgccgtcggccctgggggcgggaccgcgcggcagcgagcgggcggggggctcgtggcgcgcgcgccccgcacccgagggctgcggagagatattttgggtggcaggaggcccctcgtcatttccgccgggcagctagtcgtgctcggggcttcactcccgcgcgtgaggcgagcgggcaagttggctgagggcgtgcggcagaggctgcttccctcggcgacgcgacccctcagcaactcaagctatgaactgaagctccctagggacggagaccggagcggagcggcggaggcagcagcagcagcagcagcagcagcagcagcagcagccgccgccgc

SEQ ID NO: 43540 - DNA, 2300 bp, Homo sapien
aaagctattagagcatttaaaaagcatactgaatattagtttttctctcacagtgtatctgtttcaaagaattggagaataatattctgttaagtgaatgttttctttgctacatttctattatggtgaacttttggtcagatttattgtttagcatcgtctgtatttaaaaccaagatgtcctgacagagaggaaaacagttataaacagagtcacatcacagtgactgtgtgtatgtattgttgaatctgccattcaaggatttgttgtagaggcatgaaatgcatccttagaaataaaatagttatttatttccttgggatttatggtattcatcagtacaggtgactcctatgattacctgtataatctcaggatttcccattgcctcaagttttgtttctaaaagacaggaatagttgaactggaccctattccaaaattagcatagtaaaacataatctttactgtgtaattttataatagcttacaattcttcaattaacatgtaaaacttctgacctttttaaaaatatcgtataaggtggaatattgtaaactcccaaattacattatcattccttttccctttctctctctctttctttaatttctacttcactacattagaatttaactgtcattttggtaggatgtatgatttcaagctattaaggtgagctgtataacagggaaggtcaaaaccgtgaactgagtcctaaattatgtagcctaccccagtgacttacattgtactttccattgtatttatgcttggctttttaagcgaattttgtttatctgtacaaaagtattgtcacaatacaaaatagttgtaatatgccactttttgagtgtctagcaatgcatattaaaacaatagaactgtgagtctatataaatatgctaagagagttttcatactggctaaaatggcaacatcttgtcatgtgaagatacagttcatttgtgatcattatttttgtgtttgtgattgcattaaaatttttatttttaatgtgttaattgtatacatagctaatcattaagatctgtaagataaacataaaacttgtgaattttagtttcacttcaggataatttcacaaaccactagattattttcaaatgctgtgaagcttggaattgggagtgctcttaagttaatgcatcctcatgtactgtttaattcagtatatatattatcttaactttaagaaaacaacctcctatttaatacttaaatacaggcctgaaaatgagatctatatatgcaactaaagattattttaaatgatagataaatgtgtgtgcctatgaatggtgaaatgattgtgttacataattaccatacttttgatgatgtaccataaaatggctttgagaagacagctatgcttattttgacagaaaaaatatgtctttctagcaaatactctcgtattggcctttcatactcccacttttgtaaccttttctgagcatctgtaacattttactaacctagaaatatggtttatcttttttgggagaagatctgaaatagctttctcatacatcaatcaggatgtgagtgagctaattcttttgagttactcatcattattgttcttttaaaggtgggattctgacaaagttaatttaatttaaataagtttctaactgtgagataaatcttcccattttgaaacactgcatggtatttttgctttataaatagtatttcagtgtttatgccatagattaaggtgagttgggagtgaagtggaaacctttaccatactgtttgtttttggagattgaaaggaatatccatgtactaaataacatgtttcttgatttcagccaagttcaaaaactgcagaaatagataattttaaaatgataactatgtgtcattgttgttgttgttgttgttgttgttgttgttttgtgtgttgtttgtgtgcgtatgtattttctttttcattttaaccagcctcttatacctagaagtcccacaagcagcgttgccacgccttccagcaccatcagtacacccaccaaaagagacagttctgccctccaggatctctacattccccctcctcctgcagaaccatatattcccaggtataaaactatcacgttgtcctaggcagcttctagctaaaggtaaacctaacagcatataaactgcaaagtcaattctgaaggaacaccttgaatattttctcacagttaggaattctgaacacattctgcaaaatcattcccattatagagcatgcatgtttattaataataataataactaatt

SEQ ID NO: 43541 - DNA, 2300 bp, Homo sapien
gatgggataagatacaatttctggattaaatatatgctgtttaaaagacctacttaaacagctttaagttgaaaaggggataagtgtactttatcaccctatttggcttaaataaactgtgtgttgcacaattttatttttatcatacataagctcacataatatagtggggagggagcccttgattctagtacagacttggtaacttaatatccaagtcatccagacaaaccgtactctcactggggcttgtttgtcacatttgtttaaaaagaaaaacaagatttcagagaaaagggacaaagtttgactaaatgatctcaaaaatcccttctagcaaaattctattgggttgggtaaaggccatttgaattcaaaatgtagatctgtgcaaagtgaaccaaactggtattttacttgtgaatcaataattttaatgctaaaacccccaaatccccacaaatccagcacctgccctcccaacccagctttagctctaacattaggaattcaaattggagtatttttagcctctggagtttaaggaagcccaactggagcccctgcctgcactttataatttggctaatttaagtcataatgcagtttcatctttgacagcaaaatcattttactaatacttttatgcatttaaagaattacttctaattggagaccttgtaagtactaatggcatgccaggtaggaaatgacataattttatccttccttgaactgtttttccctatgaaatacaaccccagctgtcagaaatacgagttattacagatgccctcaaaaggctcacctaaaaaaggctgccagaggggttgcactagaaaatagaaaaatcaatcccagatgaaagcaaaagaagtctccaaattggcaaaaaataaataaataaataaataaataaataaataaataaataaataaaataaatagaaagaaagaaaaagaccagttatattaatcatttagttatttaagaacaggatggagatggagagatgctttcctaaagtctcaagatcaggctggttttagtcatttccatgctggggcgtttcttgtaaaaaataactttatgaggaagggccctacgaaattccagctttaccgagcttgcaaccgtacggctcattatcccgggataacatcgaggatgtagcagccagtaattagatcagagcgtggaaaatcggggagagaaattggaaggaatgactttttttttttttccccaaaggaagtgtacaatgagtggcagaaaatccaagtcaaccacagtttccttgttcatgctgcaaagggatgggtcggggcagggtccaagaataggaagggaaaactcaggtgaggtctgggaacgggcgtgggaacaaaggtgaaacgagccagcctgggagacgcgagctgcctcaggaagggctcagagtaggcccagaatctctcaagggtgagtccaggtgagggacacgttacctagcgccgctggcggggagcttgggattcgcccgggcgtggttcccgccagtgcctcttcagcgcgcagcggcctactgggtgtcagcgcgcaaagtcgcagcttaatcctcgctcccgctggattaattagggcctcttcaaagcagaaagttgagccagggcttctttcccagacacagggacaccgggaggtctacactcctcctgcccagccggacgcccctccgccgacactaccgggtcgaggggctccggcgactcgtgcctctccagtgaactccggctcccgcaaccccaaccgggttcctgggaccctctggtgacactggtggccagtagggtcactggagtcaagcccttggcccgggccgcttcacccgcgcccgtgccctcggttcgcggccagcagtcagggcacggggcggggcgcgcccgggaggccgaggcggcgcgctattcctgtcgctgtgagctaccggcatgttatgtgcggcgcccaatcacgcctctgacccgccgctctgacctgcgccctcccctccctaatcccctaggctttgagttgatcctccgcgcggaacaagctcacccccccactgccccgtgaccagttgtccccggccttcgcgggtgcccgcagaacccgtcctcctcgtccaccccggagaggtcagagtcctcgccctgcactcccgggacgccgcatctgcgccgtcggacatccagcacccccggagtccaccggcaactcggttcttccaggtgatggtgtgcagccaccgccgcccctggcgtgcaggtgtgggctc

SEQ ID NO: 43542 - DNA, 2300 bp, Homo sapien
gaaaccttcctaataaattcctttttcttagttcgggttgcctcaactccaaatgctgagacaaggacttggttgcaggtgatctacttggggcatgatcccagagaatgcaagggagtgggggaagtgagggaaaagagaaagccaataagggtatattaatgagcaaatccccatggtgggcaactggggctcagtcctgctggggacctctgggaaactgtagatcacacctcagaatattccgaccacaggatgaggaagtggggacatctatcactcaacttccattcccattggttgaggcttatccctaggggtgttgtttcccggcacttatgagttatgtctcctgcttttggatgatgtgcagagtcccagtgtagagaaaaagagagaggtgtgaagctgacagtatactggaagctgcctacaactacagaactcaggtggacagaagtgatactgagaaaggcattgactgtctgccacacccctcttggcttaaactggttccctttgggttactgtgacttatgaccaacagagccctggttatgcagctcactttagtttttcccacagaggcagccacactcatattgggccagccctgtgtacaaggcatttctgccaggagcagtttcctcaacatatacaccatcagtggctactgaggggccaccggggcaaaaggactgtggcagaaagtgtggtctaacttcaggacaaggggccaaaaatggctcattgttggtccatggagtgatgccatcatttgtctggtgaagagctctgaacacacagaagtagccaaaaacctggagaaatattaaggtgctcactatattctcttctccagtgtataaataactcacttttggcaccatgtgatctcaaaggatgatgtctaaactgaattttaaagatacaattcttttgaacaacacctaaacagaagttaatggtgaaccccaatctaaaatgaaccacaattatctgttgacctcctaaactcccagaaagttggttttccttctacagttctgaaaaaagcccaactacttccatctggaatgcattcagctacagggaacagaagcctgatgtctagggctcctacaaattggagctgcttcttttcctcatgtaacaagaagactggtaagcgatggttgctggtaatatagttcagtggcttgaccatgctgtcaagaactcagacatggagctcacttccacagtggatggattttaagtctctccactctgtttaatacttctactgaagtacagctctgggtaaaggtaatttcagagagtggagaggttaaaaaaattaaaagtggtgttaaaaatagtgagcatgtatcttaggatttggaagttttctgtttaaaaaatgttttgccttgtacctgctcctgacccttgccatatttaaaatagacatttcttctttgttctgttgtctcacgtactctaaggtcaaaatctttgtcaccagtagaggcagtagagcagagtgggcagggctgtaggccctggaacctcaccagcctgtcaatcttggaccatttttgacctacaaaaagggcaatgtcatatagttcaacttactaggataattatcatcatttggtgactatttgttgagtacttattattaagtaactttaacagctcccaagtgaccaagctaggattcaaaccctgtttaatgtcagtacccctgctgagaggcatggtaccatgctgacaccccccaatttttattgaatactcatcttctggcatccaggtaataaagctaaagatagactttccttacttttcgaactttgctatacccactcagaatatatgagaaaatgcagccagcatcttctggaagattaggagggcaagtaagataccatagccacctcccggctgacatttgagcctgctttccgcacggtcaagcctttcggaggcagccagcgtatggcttgtatcaaactctatatttaggaagaacaactgtgagctatgacaggaattctctttaacacttagccttaacggtttaagttcccctccagccccgagccaggagcagttctcaataccgggagaggcacagagctatttcagccacatgaaaagcatcggaattgagatcgcagctcagaggacaccgggcgccccttccaccttccaaggagctttgtattcttgcatctggctgcctgggacttcccttaggcagtaaacaaatacataaagcaggtaagcagaaggacgcagctccggcgact

SEQ ID NO: 43543 - DNA, 2300 bp, Homo sapien
cattatataagaacagacaaaggtcagaacaaacacaatagtgtatccatagcctcagtatatggccaggcgtggtggctcacacctgtaatcccagtactttgggaggcagaagccggcagatcacctgaggtcaagaggtcgagaccagcctggccaacatggtgacaccttgtctctactaaaaatacaaaaattagctgggattggtggtatgtgcccataatcccagctactcaggaggctgaggcaggagaattgcttgagtccgggagaaggaggttgcagtgagccaagatcatccgactgcactccagcctgggcgacaggagtgagactacgtctcaaaaaagagaaaaagaagtctcagtatagtgttaagcttttaataacttcaggagtataaattatatgaactcatacattatttgaaagtaaaattatttaactgtattaactataaaattatttaactgcctatttggtttgtgaatttttgaacagaaaatgtgttttaattttttgtttcagtcaatgtttgccatcttccgttaaagggactaaaaaatttaaaaatgttcaaaattcacaaaataaaataaacatataagaaatttaaataaaccttcaagtgactttttgcaagttggtagcattaatacttcagaaattattaaagcttaaaacagcactaagtcttttgggatacttgtatatggaaaactgtggagtaacagggtgcttgaatacaaacttttataatttacacccagctatgtccaaagaaaacggaaataatttataacaacacatacacacacaaataggcaaagatatgtaaaacagtcataagctgtcttgaagctggagaaacatgtccctaagtgagtaaaactttaggaaaagcagggagaatgaggcaaattagtagcaatatttgtaatataggtttctggtattattgtatattttcacttggaagggggttgaggatacatttttatttgggatacttgttcttgagatagtattatgttctcaatattttggtattagcattattatagctaatgatgcttttccagaaaagttgaaacaaataacttttaaagatgcacataaatagaacgtaaaaaaaccccaataaatagttttcttttctcttagagattatctagttcagtggttctcaaccttggctgcacagtgcaatgacttgaggagcttaaaaagtataaatgcttgggtcccactgagcatctgatttaattggtcgaggatacagaacgggcatcgggaattttaaaagaccttggtgatcctaaagtgcaggtaaggttgagaactgctgctctagttcaatatataatcaggtatacattaacgttaaaatgtgtaggtgttcagagttctgatttttaaccatagcaccatctcaaatattataaaaggttgaaaaaagagcctaatttaatcaacatggataaatttcaaaaagcatgttgaacgatacaagccagacacaaagagtacttattgctttctatttacataaagttaaaaataatcagaacagggggaggggctactgactaggaagggacgcaagaaggaaattcctgagagggaaattttctccattttgattagggtacacgtatatatatatatatatatatttatcaaaactcacagaaatggacaattgagctctgtatgtatgatttcattacatgtaaatttacacttcagtaaaaaggataaacaattaaatctggatatctatgacagggtcggggagggagagattattacttcagacgaccccaaatcctcatgggttaaaagaaacagcaaacccctgaccagaactggcgagaatggagagtagacagcagggagggccaaagcctaagaaatcgctacaagactagatgccgagttcgaactactgcctggacggcagcgcccgagcgcccgcaaaaataagcccccgtgccatttccggtactagcaaatcctcctgtatgtccccactggaagagtccggtgggaaaccgtgccaccgcaaggaaggagccggcggtagcttggttcctgagcggatgctggggctgtaaggcgcgcgcggtcagctgttggcggtgcagggaggaggacgccggggctcgccttccctcctctgccgccgctgccgccatgattccggtgtcgctggtggtggtggtggtgggtggctggactgtcgtctacctgaccgacttggtgctgaaggtgagggccttgggcctaaggtccaa

SEQ ID NO: 43544 - DNA, 2300 bp, Homo sapien
gaagggctttctcaatcagtttaatctgctagcccaatttttaaccatatggtagaattcataatgctgttgattctctggtatgaataatatttattattccttatttttctttttcagtgagcatcaccagttttatcccacgttttaactttctaagcatagatctgccagtggttgtggagacatttgtcaagtatcctttctggtgtgaaacatgttttaaaagtgtgttacttggatcttgatcaattttaccttgaatacagcattacaaatatagacctcacaagtatcacttaattgctaacaactaaaaaagagtcttgaaagatgaaaaagatcagattgtacccaggagggaagaagtcagaggagaaagattaatcagagtgagaaaggtttagatgtagaagggaaagaacccagaatacaaattgagaattgaatttacaagtctaaaacattttagtaagtttataaaggatggaagcttcagttactactgaggtaatgaattctgccccatccgagattgttagttctgaccaaatagagaatgtaatcgcataaccaggaattatgtaaatcccagggaggaatgcacaagaaagatcgagctggtttcaactactaagatagcaattcagagggccaaatcttattgtggtctttcgcatattatgattgcacataaaagatgaattttttcatattaattattatgcagaattgaattactggaaaattgtggaagagttctttatttttgtcgcttttaaattttttaatgtcgttcctcaattatttaaattaaaaaaagaaatggaaaacaaatgagcagttatttttaaaaaatgtgtttaatcaagattgtggccaggcgcggtggctcacacctgtaatcccagcactttgggaggccgaggcaggtggatcacctgagatcaggagttcaagaccagcctgaccaatatggcgaaaccccatctctactaaaaacacaaaaattagccgggtgtcttggcatgcacctgtagtcccagctactcaggaggttgagacaggagaatcgcttgaacccgggaggcagaggttgcagtgagccaagatcgctccactgcactccagcctgggcgacagagctagactccatctcaacaacaacaacaaaaaagattgtactttatagactctgcagctttgtcacaaagagacttatgctataaccttacagagggtagtaaaataaagtaggcttcaaggaccaaagtctttgtttcctaatataaagtaatactttgtaaggcccaaagagtaattttccccttatttcttattccttccacattcctttccctgttgtatcattaaaggattagaaagacttagtcttcctacgagttcattatagattggcttagtttataagtggttggcctttatttttctagtcaaggtttttgaactttgaaataatataaactcattttttttaagtagtagagatctaagaaggaatggcagagatttaaagaaagtagagaagtcaagtgtaatctctaattcagtcacagtaaaatatcttctgactcatagaaatatggtttctactcagacctctcacagttggttccttaactgattttaacccaggtacctgatttccctctcaggagctctggctattgttaatgcagtaccctgctttgctttggatggacaatggattctaaactctttcttggatgccacccttacctcagtgattggagacaatgatgtcaaagatctaatagggtttttcatcttgctgggtggcagtgtacttttggctgccaatgtgaccctgggactctggatggttacagcacggtaatgtttgcactcatctgacagaatccctgagttacagtatacagctatgtggtaatattcattgccattgaaattcttacttggtatgaaatataaagtgtttccttaaaattacatcttagccaacaaccctgagctcctcccatatccagagtacccaaactctgtggtagaagataagcagaagaaatgaaaggcatagtccctgactatattctaatttaggactgaatgtacccagatgcttgtggaataatatctaagcaagtgcaaattcatgtaataccgttttgtctgattacatattgtgttgaaatagtataaaggagaacagaactgggtggaattaattgggaaaaacttcttacaaaagcatcattaatcaaaatttgaaggagaccagactttggccaagtggaagg

SEQ ID NO: 43545 - DNA, 2300 bp, Homo sapien
aggagagtctgcactttagcctcatcacaaataggaagccattgaaaatttcaagcaagatttgccttttggatggatcatctcagctaaaggtaaagcatgaatgggagaatagcaagtctggtagcaaagaaattagttagaagactatttcacagctcggcgtggtggctcgtgcctgtaatcccagcactttgggaggctgaggtgggtggatcacatgaggtcaggagttcgagagtagcctagccaacatggtgaaaccctgtctctactaaaaatatgaaaattagctgggtgtggtagcaggcacctataatcccagctactcgggaggctgaggcaggagaatcgcttgaacctgggaggtggaggttgcagtgagccgagatcatgccatttcactccagcctgggtgacaagagcgaaacgccgtctcaaaaaaaaaaaaaaaaaaagactatttcagtaatcttcaacaagagatgacagtgatggcgaatacagtggtggcagtagagatcagaaggaagaagagaacaaaccaaaagtagactccactgtatttgatggttaggcgtgtattaggttcaaggagtcaagaaggcaatgaaatgatggaaatgccattgacagagctagggaataccagaaaaggagcagttcaatttggaactccttttttttttttttttttttttttttgagatggagtctcattctgtcgcccaggctggagtgcagtggctcgatcttggctcactgcaatctccacctcccgagttcaagtgattctcctgcctcagcctcccaagtagctgggattacaggcgtgcaccaccacgcccagctaatttttgtatttttagtagagataaggtttcaccatgttggccaggctggtcttgaactcctgacctcaggtgatctgcccgcctcggtctcccaaagtgctggaattacaggtgtgagccactaggccagcctcaatttggaactctcgagtttgaatacctgagagacttccaagtggagatggcgagtaggtagttgtatgtacagatctggaacttaggagaaattagttggagatgccatctgtgagttgatgcaccccaaatacataattgaacccatggaagtgcatattgtccagcaaaaacagggaaaaatgaaaagggaaggtgtcctaggataaagatctcaggaataacggcatttaagttaaaaaaaaaagtacaggaataggaaacaaaggagcttcagaaaattagaaggaaaactgtaagagtttggtattagagaaagggaagagaatgtgtcaagaagagggggatgtccataatatgagatgttgctgaaagagaaatgatgtcggatgaggactgaaaaatatccatgggttctagtagaacagcagtccccaacccttttggcaccagggactggtttcgtgggagacaatttttccatggaccagaggtgggggatggtttcaggatgattgaagcacattacatttattgtgcactttatttctattattatggcattgtaatatataatgaaataattagacacctcaccataatgtagaatcagtgggagtcctgagcttgttttcctgcaactagatggtcccccgtctaggggtgatgggagacagtgacagatcatcaggcattagatgctcataaggagcatacaacctaggccccttgcatgcacagttcacaatagtgttctcactcctatgagaatctaatgctgccactgacctgatagcgggcagatttcaggtggtaatgcaagcagtgagaagcagctgtaaacacagatgaagcttctctggctcacccgtcgctcacctcccgctgtgcagcccagtttgtaacaggccatggacccgtaccagtccgtggcctgggggttggagacccctgtagtagaagagttcatagatgatcttgagagagaaactctagtgtggcaggagaagttgagccaggttggagtggatgctggatggtggagtgggtggggtgtgtgcgggtagagactgcaaatacagaaaatgccatcgagaagttccatttggaaggggaggagagaaaaactgtgggacctagtgaaggatgtaggagaaagttgttatcattgttttagcaataggagaattgtgtgcatgtttttggtgctaatggaaaggacccgagataaaataattgagggaagagatgggagccagggcacgatagagccttcattaagagggatgccctttctaagaggaggaaaaa

SEQ ID NO: 43546 - DNA, 2300 bp, Homo sapien
acaattaccacaaacaaaatgattattagtcctgaaacaggcctggaagccaagggcctagattataaaactcaggtaatgagaacatgttcctgaatccaaataggtactcacggcccaattggaggtgtttaaaagaggcctcgagcaggattatgttactggtaagtaggacgtgcattgggaacatccttgcaataactcctaatgttatcccaacaatgtaggttccatattgaggccaatttaactctgatgctgtgctaacatcatgaagcatttgttgtggttttttatttttcgttttttgagactgtctcgctctgttgcccagtctggagtgcagtggcatgatcgcggctcactgcaacctccacttcctaggttcaagtgattctcatagctcagcctcccgagtagttgggattacaggtgtgcaccaccaagcccagctaatttttgtattttaggtagagacgggattttgccatgttgaccaggctggtctccaactcctggcctcaagcaatccgcctacctcggcctcccgaagtgttgggattacaggcatgagctgccatgcccagccaatgaaacatttgttaaactccacttttgctatggctgtctgataagttaagcaaaagcatctcaggtttttcatctctgctttgtaccttgcaggaaacaaggcgaggcacaagtgctggggatgagatttcaagcccgagcccgagggccacctgtgctgccagacacaagctgcagagcataaccagctacgcagtttgcaggccaagggcaaaataaaaacacggggccccttgttcgagagttaagaatttcaagatggcaacagcagagaattaaaccaagtgcagggcccttttgatgtgaggcccacactggtgctgagtggggaaaggcacacctgaggcccatggagccctactgctcctgcaacatgcaggacaaagacaactctattgtcagtgacctgactccaggggaatggcaagaagtgaagaacatcccaggaagaaagaggagctgcagactgacatagctaactgaaggatgagaattgcaatagctaacaaaattgagaatctaggacacagagaagaatggtaagacatgcagaataacaaacaggtggccatgggtagacaaaaattaatgcaggtactagaaaaagattcagttcttaacagagaaaggtctgttcaacagacccttgttgaacacttgtgaagacactgcccagtttttgtagaaaggtgaagaactcagcaaaacagccgttgcctgggggaagaggtgagtttaatatccaggttcttcgttgcttttgtggaggtacatgagttcatggatttaaattttgtctaaccattacagcaattcctgtggccgtgagaggcacaaaagcctgacacgatgatggaggcatttgcccagggatattgtcagtgcagtaaagaataattttagttcagacgctcatgctgtctcccctttgccatcattttgttgaacagcagccataaccccagtgtcaaaaataagccccccgcaaaggctattgccattaatagaggcgccagtgatggaggagtcctgctagacaagcaactccggagtctgcagtttcctaattcaatattaacaacaatgctgtcctcttactggcttctccctcattttattttgcgtgaaactgtggataacgtaaatgcccaagcgctttctattcagtcctcaaatgcaaagcagacccttgctaataatggtaataatccgaatgggtttaactgcagcattgtaagaaaaggcaggcagtactcttagactacaggggtggatctcatcatttgattttcccgactccgccaggaaataagaggggccttggcttggggagaggtgtgtggggaggcgtaaggggtgggccccccggaaatcctgctgcgctgtttaaacctaaggtgacctaacggatggcgggagcggccgcgcgagccttggagcagggcgcggccattggtgacgcacgccggggagcacggcgcccacgtttccaccattagcgaggcctcacacccggcgctccaagttcggggctggaggcgtcccggcttcctccctcccggagcgggaccggccccgcccccgcgccccgggtcgctcccggcggcccctcccacctcctagtcctggcctccccgggcgcagcacactcccagccggccgcagcctgacacgccgcgcggccccccagtctcccgcggctgctcccc

SEQ ID NO: 43547 - DNA, 2300 bp, Homo sapien
ctgcagcctccacttcccaggtccaagcgatttttgtgcctcagcttccccgagtagctgggattacagtcacgtgccaccacacctggctaatttttgtatttttagtagagacagggtttcgccacattggccaggcagatctcgaactcctgacttagagtgatctgcccacctcagcctcccaaagtgttgggattacaggtgtgagccaccacttctggccccgaagttggttttttgttttgttttgttttgtatttgtttttttccagacagtcttgctctgccgcccagactagagttcagtggcatgatctcagctcgctgcaacccgcctcctgagttcaagcaactctcctgcctcagtctcctgagtagctgggattacaggcgcctgctaccacgcccggctattttttgtatttttagtagagacagggtttcaccatgttggccaggctggtctcgaactcctgacctcgtgatccacccgccttggcctcccaaagtactgggattacaggcgtgagccactgcgcccagctgaagctggttgttaagagtaagtggctagggctaacttgtatgatttttattgctctccttttcactgtgaagggccaggaaatgtcgatgttggagctgcaacattgaacatggttcctgactttgtggaactcatggtctaagatgtgttctagagtgaggtccaaaaactcttgggagaatcccatactaggggccaaagtcctgctagggtgtgttatggaataacagcaacaaaataatgtcaacagccaatgagcacaggataactacaacacaccatgatgtcataacttggacaaaggcttgtgaccccctgactttggcgcaacatgaaatgagcagaaagtaaggtatattatggaataagccccaaaacttgagagaatcccatgctaagggcttaagccctgaccaagacaagccagacaggaccatgaatgtgtggccatgttatactgagctcatcagcacctgctgagctcctgtgtcacctctaaagccatgcgcacaagttttgcattgagataattgctctactggtttctagatatagttgaattctccacccccactcccactgccctatgacctccagcaaaacaaaagcaggtaggtagtaattgtgttgtgagttaacgatatctatatctttggataataaaatctatatcatttcagtggtagcattggaatatcagttgcccttccccatgaagaaagcacattgttatcgtttaaatcattatcataatcaaaaatatcaaagacccagtcattcatcagtctttccagtgaagtcaactgcctttgttttttgtttgtttatttttgagacagggtctctctctctgtcacccaggttagagtgcagtggcgcgatctggctcactgcaacctccacctcccaggctcaagcgattctcccacctctgcctcctgagtagctgggaatacaggtgctcaccaacatgcccggctaatttttgtgtttttagtacaaacaaggtttcgccttgttggccaggctggtctcgaactcctggcctcaagcgagccccctgcctcagcctcccaaagtgctgggattacaggcgtgggccactacgcccggcctgaaaccaattgcctttgaattcatcctggggaatctgctgaagtggacagtttatgtaaacacaaaaacatcctaatgaatggctgcctcagtaggagtggcagacaaaacacatggtgcacttttcatcaaaaacacacaaggaaaaaatttttcatcatatcttttgtagttgctaataaacttaattcacgcacttgtgtttttttgtgggtttttttttttgtacacttcttagtaccacaaagaggaagtgctttttctccttcctttaagaaaaagttccagttcaaaccatcagcctctgtaggttgtcttaattgctactttgcactgcactggactatgactgatttttggcacatgctatcatacacaaagttcctgaaataaaatgctccaggatatcctaggaactcttagaaggctttaaaaagggactcacacactgaaagaatatctttgatgaagacaattcaggcaagcagaatgattcttgcaacagaattacatgattaattgagatcttgaagtgggtccggtgaatcctggccacctaacttatcatgatttgggggagtttcacgagaatccagttttgataaaacaattgtttttttcctccccaagtgac

SEQ ID NO: 43548 - DNA, 2300 bp, Homo sapien
ccttgagacaggttaagtgtttgggggtaggcaggggccagtcactgttattcacatatgatagatgggaaacagggctaaggagattacggaatttggcaaagctacaccgtccaagtcatttggctctgactccaatgttattttcgttggtcttaataagagaaccagtgattcaaggacaaagtgagattgaggaagggagtagaagcagtgattaaatcaatcatgatacaacttacttgaaatactatacagcagttaaaatcatggtaacaaaggctataaagacagtagcaaaacaatatgttactgtaaaggttggtgtaccaaattatatgtaaacatcaattacggcagtacagaaatagagaaaaacaaattaataaactgtaacagaagtatatattatgtagcaatattatgagtgcgttttctctagttcccaaattttctgccaaaaccttcagaatatgattataactgatagaaaattcagatatgttcttgggctcagaacactttctgggaaattttctcagaagaatttccttcaaaaatattaacttttaaaaaataatatcagtgggatcagtttttacttttagaagacttgctaattgtaataatattttgataattttaaatatttcaaaaggcccttggatgagaaaaagaattgaaacccagcaactattgagaaagttctattttttctagaagtagaaacaagaatgaattcgcatgaatattttaaagccgcttgtaatctccaaaatgaaaaaattaaatttggcaagagacaatacttggctcaaaagcctcttgtcctttcagttactggaaaaagtctaggtcaagttgatgatcactttcaatcaattccatctcttgacttttcaattgcgtgacctttggggaattaattgggattcttgtgtcatttcccaggaacagctgtcccgatcataaaattcaggagagcctacatttctcttcttgaatatcctatcccagatccacagactaaatggaagaataaagttattaccaccaccaccaccccaaagatggagaacctgtaataagcgcagaacaaggaaatgtgttcagcttctctgtaggataagtacatgtttataaggcagtacataggaatgcaaatgatctgtagtatagtcttcggcctacatgtaggaataggcagatgaaaaatactgaagcactaattgtggtactttccttactgtgccagtaggaagtgtaaattctaggatacctttcatttaatttaaatccatttaaagatactcagagatatatccaaatatctattagaaagactttatgttaggcacccaaaggattttctgaatacttaatggaatccgtattttatatctacatgtccccttattcaaacaacaaagcaacatgcaagattggtgtgtttagatggctttgcccaaaagtaatgtgtgtctatacatgtagacatacttattatgttggtgcaaaagtaattgcagtttttggcattaatagtaatggcaaaaaccacaattacttttgcaccaacctaatatatactgaggtgatgctcaaaatgtttaataatccacatatacagtgtaccatggaggatgcaattcctacaaacagctatgtgaaggtgggtctgagggagttccagccagcacactagcactggaaccagatgtcccatctccacactggggctggtcttggtctgctctgaccagtggaacagtctggatgaaggccaatgtgagagagttacagaggcctggctggaaggttggggggcaccagggtgtcccacctccaatgcccacccttagctctccagtgccatgatggccaggggtcccttgaaagagctgagcgcaatgttttgtgttttttaacaaatagtaaagaattattttaatattttaacaacctctttttctgcagcattctagcattccatctgaatatcacctcactcttgcagagtggcactctctgtcatgtacacacacacacacacacacactacacacacacactagtgtttcactggccaaagtagaccagacccaccacagagaatcttacataggttcacatatctgcatatccctatatgcacatttatgtctatatatgtgtgtatcactcaccagaaactttggcctctgaaaattttctcatttccaattctcctaagtaaatggaggccagccatgattctgactttggtccttagtaacgtccttaatagtgccagttattta

SEQ ID NO: 43549 - DNA, 2300 bp, Homo sapien
gagtattgtgtctttgctggggcaattgtgactttgcatattgatggacactggtgcctttggtggttattggggcattgttgcgttttcaccattagtgaagtcaagagtcaacaacttggccaggcgcggtggctcacgcctgtaatctcaccactttggaaggccgaggtgggtggatcacctgaagtcaggagtttgagaccagcccggccaacgtggtgaaaccccgtctctactaaaaatacaaaaattagccaggtgtggtggcacatgcctatagtcccatctacttggaaggaaaaaaaaaaaaaaaaaaaaaaaaaaaagagtcaacaacccaacaagccagagccagggaaaaggaaaatgatcactgctatgtggtaactgagtactgaaaccaacataattctctgtcgctgtgtaaaacaataacagacgtgggaatagttttctgttcccatattaatccatgttgagaataagcaaacttagctacttgctccaggaaatactttttcctgaaaattaaaattgtaaaccaactaaaagagtttacttaacaagaataccaccttccccatcaaaacttgcttcaatattctcctcctgctatgcccaccaatctacagctattacgtcacaaaatctacccaatcccaattagaggcctgccttgcaagacccgccctgaaaccacccaacttagtccctaataacctatcctgtcatttcccctctgagacactgcctagacaccattaaggcagagttctctcatactgcagtaagtctcataagatacttcactttgatggatcagtgatgtttttctagtattttaggggagggcacggagtaggggttgacagccaacgaagctaaaagggtgaatgtctgcacattcaggagaatagaggtgccacaattatgggtggagtggaggcagaaaaatatggtgtgttgctgtttttacgatccagtttgtacttagaggcaaggtaagatgtgaggaaatgtgggctaaatacccataaccctttttaaaattaagcaagaacagcaaatgtctaaaaaatgtctagcccagtgaagttaccatctattcactcctgttttttttttttttttttttttttttttttttttttttttgagacagagtctcactctgtcgcccaggctggagtgcagtgacgcgatctcagctcactgcaacctctgcctcccacgctcaagcgattctcctgcctcctgagtagctgagattacaggcgcgtgccaccatgcctagctaattcttgtatttttagtggagatgggttttcaccatgttggccaggctggtctggaactcctggcctcaaacgatctgcctgcctcggccttccaaagtgctgggattacaggagtgagccaaggcgcctgacactattcactgccttttacatgatttttccttgacgagataaatgtaatgctcccttcttccagacaaaggtgattttaaacttactgtatcgtgaaatcacaaaatcttaaaaggtatgtgtattttgtgtgtatgtatatatacatgcacacacacagacatatcatcctatcttattccaatgagtgatttaaggtagttcacaaaaatgcaataggataaaaataagtcagtcctagaaggcaaagctctgcagggcctgctgggaatttattccccacgcccatcagtttctgtttccatgaagacccctttctctttgagtactgaagagcagcatcagcaacctcaacactgaagctttttctttctctgcccaaattccctcactagagtggtgggacagggtaggtgaggagagaaggaagcccttaaacgtcaaagcagtggagggttggggaggcatcggatcgcactttcgcctcctaggctggggaagatggtgcacatgcgttgtaatgcgcacgtgttactggcacatgactcccggtcccttgtgagccgaaacttggatcctaatgacgttgataatgggttactaggcactcatagttctggatcgttgggtggccttcacgttagcagaagaattcctttaaacgtcatttttgaggaagtagacaaacctaaatatgtgtctgaactccaaggaatatgaacaagatgcctgctggtgaacaagaatgtgaatataacaaagaagggaagtactactctaaaggagttaaactggtgagaaaaaagaaaaaaattcctggttaccgttggggggacattaagataaacatcataggtgaaaaggatg

SEQ ID NO: 43550 - DNA, 2300 bp, Homo sapien
atatcatagctcctaaaatatccaataagcattgtgattttaacagagagaatatagggtgctgtgtttctcaaacatatttgaccagaaacctttttatttcttcaaatagcatcttttacaaaaagtactgacacagagaagttttctcccaaggtgtcagacttctgtcctatactagaccatgatgaaattttaatcagtgactgactaaagagacaaagatgctatgaacattaaattggcagaagacttgaaactagagactaatatgatggatgacagaataatcattaaaattatatttcataggttacatcaattgatcaaacttaataagatgactataaaaggatacatacatagtcttcatttaggtaagcaaattaaaaaaaaaatcagctgagtaagtaaaagaagcaagaacttaaatgcacgtcatgttactgtgagcagctttgtgtctcaggagttcttaggtcaaattagtagaattgtcatgctcagtaaagatgccctaatagtaggagtaatgccatttctgcagattgtttgcttgtcttttcctgttttttagttctgcgtgctacattgtaaatggtcctcaatgaaccatttccaaaggagaggcaataggatgatgtgtgtcttggaaaccatgtcatagcaagaaacgtcgaagaaactggaaatgttgccctgatgcacagaaaactttgacagaggctgggcgcggtggctcacacctgtaatcccagcactttgggaggccaaggcgggtggatcacctgaggtcaggagttcgagaccagcctggccaacatggtgaaaccctgtctctactaaaaatacaaaaaattagccaggcttggtggcaggcacctgtaatcccagatactcgggaggctgaggcaggagaatcacttgaacccgggaggccaaggttgcagcgagccaagatcatgctattgcactccagcctggccaacaagagtgaaaccccatctcaaaaaaaaaaaaaaaaaaaaagaaagaaagaaaagaaaaagaaaaaaaagaaaactttgacagatcctttagtacacaaggatacaggagaatcaagcctattctgtataacttcagaactcagaaggacttaaggacacaggaagccgcacgttttggttcaaaaaacttttgtaaccattaaacagcctcataatggaatggatatttttgaaatgaagtgagctccctgcctctgggagtgtctaaatggaagctggatatccctctgtccagactgcagctagaatgtcttctacgtgtacctaataaatgagttctacacaaccttccagtgctaaggtctcagaagctatcaaaccacagggaaggaaaaaaaatgaagaggcactgagaaaagtgacaaaccactaaaaacagcccctaaagtaccttaggcactgctttacctctcttctaaccatcatccctgtaataatatctggaaactgcctaaacaagtgttgacatttagttgatgaattaaggcaaaacgctgtcctagagtgtgcacctaagagatttctgattagtagaatttaagttacactagaggacagggaatgatgaatttatcctgacaaagtactgtattcactccaaaagaaatttaccaaaataaatgaacacacgaatatataaataaatagttttactttaaatgcattatttttttctcttagggaaataactggcttatataaaggacaatgtgtatatggtgtgtatgtttaaggcgtgcttcaaggttgctctcaagctgagccagaactatcacgagaagagtgaaaggagcacccgggacgcagaagttaaggaggcagttactcctagggtcctgtaagtgctggcagggtcagcccgtgagagtgagtgcctctttaaatttgcgtcacagacgcctgcttacctcaccccagtccaagccctgtgattggtcaggccatcaaagcctcgccccctacacgacccggaattcgacgccaacactggtttctggggcaacttctgcgtagctatgtgactagcacccggaaataattgccaccgccatcttttggtgcagaaggtgacgggaaacaggccgcagacctgaacttccaaccgtatgtaggcgagaagccggtgccgatactcccactatcccacaatgtcccactgggccccagagtggaagagggcggaggctaatccaagagaccttggggccagctgggatgtcaggggcagcagaggcagtggctggagtggcc

SEQ ID NO: 43551 - DNA, 2300 bp, Homo sapien
tgacattaaaaggccggaaattctagggacgagggcgaaccgaggttggaagggagccaatcggagggtcaaagacttcagaatgaaaacagcttcgccaaaatgttaaaggcacctaagcagacctgtcggctggttttccttctcttacttttatccctgcgctggcatcggggcacatgaaacagctctgttcattccctgtgcagcgaccgattttaggcctcctgagaagtgcccacccactagctgccgctggctcagtcgcaaagagctgggttcgcagtatttcccaccgccacccctcctccccgcccttccatctttccgtctgcccgggctgagagccacgcagggcatccaccctgtcatttagcacctcggctacgcaatggtgggtggtttcccaaagcgcgtgccctcgcagccactcgcgctcgcctcgccgcttgcaggggcacaagtcaatgaggcttttccctccgcgatcatggtgaatcagcaaagcgctgcagagcagcggcacctccacgagcagaaattaagatgctgggggaacggcacgagtggagtgtggcaggggaatttctagccccttccaatgtgtccctcccagggacggcgatactgggggaggggagtcagctggaagctgctggacttaggcgtcgcggggagcctctggaaacagagcagtgtagggaataacgaagatgagcacagaaagtggacgagaaatgggtggaaggatctagggagcacaagcagagcagggcaggtgcgcccccggggtgggcagcgcagcaggagcaggtgttgctgaggaaaggtaggaaggaagtccggtatgggggaagggaggagatcatcaaataaggaggatttcccaaaccgcgacttgctgtttccaacgtgcaagttcccaagttcagtttgagaagtgaagggccgctaggtgtaggggagtctggaatgggaacgttagggaaatgcctccccgaggcgcattctcctacccattctcctctttcttcccccccccccactccccttcctcttcctgtccctattcgtcttccttcagctttgattaatatgcatgtctatgctccgtagtgcgggccaccgcctcccgttcgacccctggcactgggagactgagctgtagcgaccaaaggcttgggatggggaggctgagcgctcagagcgcggagtctgaggacccctcgccgcgccctgtatcccacccccctggctggagagagcgcctcagtgacccagactccgagatcccgctcggtctgcgttgcagtggacagacccaggagcttggagcgcgaaatgaaacgcgctaaattgtacctgtgcgtggccgttcccgccgccgccgcaggtctatcccggggccgaagccggcgcccgccttctcggggaattctccggagggggagtgcgaggggaaccacggtgactgcctgctagctcacggctggcgcgcacacgcacacgcccaactttgccaagccgtcggcgccccgcgggctcccccgcgccccctgcggctcaacacgctcggagacctgtatctctcctgctctgagataaggttccctccactctcacaccttcgcatgtaggggaggagagggcggagtgaggcagagaagggggttaatgctactgactccctggccagcctttctcaaacactctacgcccgcaggggcgcccgcgccagccacgccgcaccaggtcccccagacctgctggtgacgacagagagaggaggaggaagagaaggcagggcgaagaaccgggagccggggagccccggagctcgggagcccgggagcccaggcgacggacagttccatcgactgaccgtcattatcagcacttttattactaaaggactgggtgggaggttggggggtgtgcaacagagctggccagccccaatccactctggagcgaccctaaattagagccacagagaaagattctccacggataccttttgagtggacgtgctccagacacacacccggaccccgtggtcccgccgaagctgcagtgttgggggtattttaaacggttcttatttggaaggaggcgtgatttccacgttcgagcgtcttcgctccccaccccctctcggcaccagccagtgcgcgccaccacctgagcctggcgagagccgggacgcacgcagtcttcagcctgctcctttaagcctctggagagactcggctctgagcgggtccgcccgacacccgccccctccccccactcctgagaac

SEQ ID NO: 43552 - DNA, 2300 bp, Homo sapien
gagtctggaatgggaacgttagggaaatgcctccccgaggcgcattctcctacccattctcctctttcttcccccccccccactccccttcctcttcctgtccctattcgtcttccttcagctttgattaatatgcatgtctatgctccgtagtgcgggccaccgcctcccgttcgacccctggcactgggagactgagctgtagcgaccaaaggcttgggatggggaggctgagcgctcagagcgcggagtctgaggacccctcgccgcgccctgtatcccacccccctggctggagagagcgcctcagtgacccagactccgagatcccgctcggtctgcgttgcagtggacagacccaggagcttggagcgcgaaatgaaacgcgctaaattgtacctgtgcgtggccgttcccgccgccgccgcaggtctatcccggggccgaagccggcgcccgccttctcggggaattctccggagggggagtgcgaggggaaccacggtgactgcctgctagctcacggctggcgcgcacacgcacacgcccaactttgccaagccgtcggcgccccgcgggctcccccgcgccccctgcggctcaacacgctcggagacctgtatctctcctgctctgagataaggttccctccactctcacaccttcgcatgtaggggaggagagggcggagtgaggcagagaagggggttaatgctactgactccctggccagcctttctcaaacactctacgcccgcaggggcgcccgcgccagccacgccgcaccaggtcccccagacctgctggtgacgacagagagaggaggaggaagagaaggcagggcgaagaaccgggagccggggagccccggagctcgggagcccgggagcccaggcgacggacagttccatcgactgaccgtcattatcagcacttttattactaaaggactgggtgggaggttggggggtgtgcaacagagctggccagccccaatccactctggagcgaccctaaattagagccacagagaaagattctccacggataccttttgagtggacgtgctccagacacacacccggaccccgtggtcccgccgaagctgcagtgttgggggtattttaaacggttcttatttggaaggaggcgtgatttccacgttcgagcgtcttcgctccccaccccctctcggcaccagccagtgcgcgccaccacctgagcctggcgagagccgggacgcacgcagtcttcagcctgctcctttaagcctctggagagactcggctctgagcgggtccgcccgacacccgccccctccccccactcctgagaactctttactttttgtttggaaaatcggggccatttctttatttatctctgggtcttcccggaggagggcagagaaggggagagcgagcttggcgggccggaccgggggaggggagcgaagggaggggaggggactgggtgtagcctggaattctccgtcctcgtgttcctgggcgggcgcgcagagtctcctggcgatagcgccgtcgccgctccccgcgccaccccgtcgttggccttgggggtcgggtgagtggggtcatgacgagccgcgggggctgccccgggccccgcccgcgctgagaggggacgcggccgcgcggcgcggagcccccctggcggggaggccgcggggggtggggagggcgcacgcggtagggcggagtgggggcggcgcagaggccgccaagctggggggctctccgggagggcgcggccgcgggcaggagggcgtgtctccggctcgaggggaccctcccgaggcgcggcgcgggactccccgatggtggtgccgcggctccgggagagctcagggtctcgccgccgccgccgtcgccgccgccgcgggcgccgctgccgccgccgccgccgccgccgccgccgccgcccgaacccgcgccgagcgtgcgcctcgccctcctcccgcgcccgctctgctctaggatgctgcggcaggttctgcacaggggcttgaggacgtgtttctcccggctcggccacttcattgccagtcaccctgtcttcttcgcctcggcgccggtgctcatctccatcctgctcggcgccagcttcagccgctaccaggtcgaggagagcgtggagcacctgctggcgccccagcacagcctggccaagatcgagcgcaacctcgttaacagcctcttcccggtcaaccgctccaagcaccgtctctactcggacctgcagacccccgggcgctacggccgggtcatcgtcacctcctt

SEQ ID NO: 43553 - DNA, 2300 bp, Homo sapien
tggataacccatttgccatgatgtgattgttacacactgtgtgcctgaatcaaaatatcccatataccccataaatatatatatatacatatacatatatatatacatatacctactatgtagccacaaaaaattttttttaatttaaaaagaaagataacaagcacttgcaggaggacagagggcaccctgggatcatacaggctcatgcctgtaatcccagcactttgggaggccaaggtgggcggatcacaattagctgggcatggtggcgcgcacctgtaatcccagctactcggcaggccgaggcaggagaattacttgaacctgggaggtggaggttgcagtgagccgagattgccactgcactccagcctgtgcgacagagcgagactctgtctaaaaaaaaaaaaaaaaaaaaaaacaacctaacacagggttaagttgcaacattgcctgtttgccccatagttcctttccagctggaagagaagaaatggtctagggatatggcttttcaggttagacttttcttctccaagttttctggggacctgaaaagggctccgacttgagagaggagtcatggctgttcacaaagatcactgcaaggaaaagaataagaaatgtctgttagagggataaaacgcgagctattcagaggcagaaaggtcagtttccctttgaggggcgggggtggcgtgggatgaggaggctttttgggagagatgggcgtggaaggatgtctaacaagtgctggcggcgagggtcgttggcacttcaatggtgggaagacagccatgggcgaagctttgtggaagaaataggtgtgaaggatgagaaggcctacaacagtgctgagggcgcgaggccagtcacctgcgaagttttgtgtacaagatgggcccagaaggatgaacagggtctaaaacagtgctgagggtgggagtgcagaagatcggtcacaagtgacgacacaaggtggtcttagtccagttggtggacgctcggtggcctgggcctgcccccagtgcgcagacgcacacggcaggttgcagcggcaagcggggcggtgcccacggcggggagatgggtggggagggcagggaaaaggccaggggttgggtgatggggtaattgtcagaaaaaggaacaacactgctgggagagttttctggtaacttttcaagtcttcatttaaattaaaaaaaaaaaaagctgtctttgaaacaatagattaggtcactaaaaactgcctgtacgcccttgcatgctggaggaaagtaaatggttagacctaccctccctaagtttttccaggacttaaaagagctgcaagtagtgcagatcatggccccgttcacacaaatcacttcaagaaaaaaaattagtaaatgtctattagatcttgaaacttattcctgtctatctggaacttggtaacctctgaccaacaactaactccccattccttccctctcgcctcgccttccctacttcccaacctctggtaagcagcagggtaaatacagtcaataataatgtatatttcaaaatgaataagagtaaatttgaaatgtctcaccataaaagtcataggtaaacaaggcgatggataagttaatgtgatgtaatcatcccacattggatacatatttcaaaaaatcacattgcatcccacgaatgtatacaattatgatttgtcaagtaaatataatttttaaaaacgttaagtgactttttaaaaagcttattagaagtataaaatgcaagccattcacaagcatataggttagattccgcttgtgaggggcttgtgtgcagtggtgaggctttgtggaagagatggacgtggaaagatgtctaaaacagcgcggaggtcaggagaccttgtcgctgccttcacagagttgggcaacgctcccggtcctggtcagccgcgggacgcaggcgcaaatgcaggcttgggatgggggaggtgcggccggcgcccacgtggcggggcggggagcagatagggggggtagggggaggagctggtctcgcgaggccgcgccccggttcgcgcgggcgtcgtgcacgcggttgtagctgcccggcggcggcagaagcggcgctcgcgccaagggacgtgtttctgcgctcgcgtggtcatggaggcgctgccgctgctagccgcgacaactccggaccacggccgccaccgaaggctgcttctgctgccgctactgctgttcctgctgccggctggagctgtgcagggctgggagacagaggagaggccccggactcgcgaagag

SEQ ID NO: 43554 - DNA, 2300 bp, Homo sapien
tctgtacagttacttacagaaataaccatgttagtagattgtgacccagtacctggccatgagtctgggtgagggggttcctggtaagtcagggcaagggttccttaccctgatgccacagttggctagtccaggagtgtgtacctgatccaaattggaccaatgaatctcttctcagaacttttttgtatttgggccgtagaaatttcagtcagtctgtatgtgtgtggctgtggttgtaagatgtaaagttcaggagcttctattgccatatggagaatgtcattacatagagagaaaaaagaatgaagccagtatgcaaaggaaagcaaagataagcaatagagagaaggcatctgcatggcattaagtccctggtttcagctgttccagccaaaatcgatggtgtttattatattgatgagaatgtgtctttataatttggaaattgacggaaggcgacttgattgcgggaaaaactataaactgtacctacctattataccatttacaaaaaattctctcttgtacttattttttctccctgagcctcctattgcttcaaagaaaagttcaagtaaaaagaagaacaaaaatagcataattcaatacaatatttattgccctctgtgttaggtgtggtagagtataaagaaatatggctgacccaaaaccaacaagacaatcactgaaaagtgacttgtgaacaatgtgaacaatgtgacaaaaatgaaaagacaatgtgaacaaaaatgaaggagagatccttgtaggctaaaaggggagtcttccagatgtgagattgataaaagcagggaaaattcagtagaaagagaaagccgaagaccatgctccatgtgtaactcatgaagtgattcaaaacagaaagctagcttaattcaaatcaatacatttttactaagtatggggtattgcgaaaaagcatatggcccttgccttttaggaaattgccgtatttagaggcaaagcaagacttgcttatattctcaaaagatccccactcgttaccttatttcccctttaaaccgctttaccatatttgagatcatgttatttgctaacttgtttgttgatttgttttccttccttatcaagaggcaagccccttaagggcggggatttttgtccttttttctttttgcaaccccaacctctgcaatagtgcctggcacaatgcaaacagctcaataataattcgttgaaagaaatggagaattagatcgtagggtgaaataatcttaaactctctggccttgaatctctctagctcgcccaagatatcaaacattgggggtcaggccgagaagaggagaggaacaattttttcctgttaggtcagtggtttttagcctttggttacattagcatcacctgggggcatctttagacatcatcccgaagcccagaccgcacccaggactaaactagaatctccagccagtgggtctcaagcatcagttttttgttgttttttttttgagacattgtctccttctgtcgcccaagctgaagtgtagtggtgcgatctcggctcaccgcaacctccgcctcccaggttcaagcgatactcgtgcctgtcccccgagtagctgggattacaggcgtctgccaccacgcctggctaatttttgaatttttagtagagacagggtttcgccatgttggccaggctggtcttgaactcctgacctcaggtgatctgcccgcctaggccttccaaagtgctggaattacaggcgtgagccaccgcgcccggccaagtatcagtattttggaaagttgcccaggagattccaatgtgcagccaaggggaagaacagacggagccaaggcgcggggatcaaggataaaggagacaagctccactaggcagagccgggcctcttctcgacgtcacgccctggcgttgctgcgtggttcgtttactcaaccgagaataggccggtcctcgctgtagcaacacgacccgcacaactgattgagtgggaagctccgcagaggcggactccagcctcccgccaatgaacgggtagggtccgcccggcacagcgcggccacgccccctggacgccgcggtcccgcccccggacaccgctgtccggctcccgggctgtcctcagcaagggcgcggtctggtactcgtgcgtcttttatcgcctcagtttccctccgccgactagcgcgcggggcccggttctccatcgcgcgcacggcagcctagcgcaatgaggcgggcagcactgcggtaggtggcggggcgtggaaggggctggcagggc

SEQ ID NO: 43555 - DNA, 2300 bp, Homo sapien
gttttcgccatgttggccaggctggtcccaaactcctgacctcaagtgatctgcctgcctctgcctgccaaagtgctgggattacaggcgtgagccaccatgcctggctggtttactgactttgaagtcaagaaatcttttactgtactactgtgcaattatgaccctcatagattttctggcagaaatggtaaataaaaaaaacagacgtggccgggtgcggtggctcacgcctgtagtcccagcactttgggaggcgaggtgggcagatcatgaggtcaggagttcaagaccaatatagtgccaacatagtgaaatcccatctctactaaaaatacaaaaaattagccgggcatggtggcggcgcctgtaatcccagctactcgggaggctgaggcaggagaatggcttgaacccaggaggcagaggttgcagtgagctgagatcgcgccattgcactccagcctgggcgacagagcaagactccgtctcaaaaaaacaaaacaaaacaaaacaaaacaaaacaaaacaaaaagagatcgagaccatcatggccaacatggtgaaaccccatctctactaaaaatacaaaaaaaattagctgggtgtcgtagcatgctcctgtagtcccagctactcgggaggctgaggcgggagaatcgcttgaacccaggaggcggaggttgcagtgagccgagatcgcgccactgcactccagcttgggcgacaaagcgagactccgtctcaaaaaaaaaatttgttctctctaaaaaaacagatgtcatatgaaatattctcctagggctggaacttgggcaaaaatctgtaaacaaaacacttgagtccacttcttacaaattaagtttcactagcacacgtcttgttttaattaccacagggagtgctcttgacagttccagtctcctcaacctcttcctcttcgtaagcctttctcctctgctttgcatccctgtccccaatcacaagaataggactgataagtagagctctgcaatatgggttatgaacacctgcagtttaagacaagtaaacaattgatggcagcagtggcctgtctggagcggctactgtgaagatgccagctgtagtgtgggaggcacggtgggggctgcgtgctccgtggagctggccggagccccaccctcttctgagttggccgggtgggagccccacgctttccggcacagctgcaaccacccagccacagctgcagacctggacatccctgtgctctcgggggctgggaagaccccctgacccgcaggcttggaagtgcctgctcctgctgcctggcctctccttgctcctggagcccactctggggtggagcaaagttgtggctgaggccaagcgctgtctagacccagctgggtgtgcgtgcgcctggggcgccgctgacatgccagccccctgccaccctggccccctctaggctttgggcactgagaagcacaggagagaggctggcggcgtggggtgggggagctgagggcactcggtgcgggctgccggtactcctctgcaggaacagcctgggcgctgtggatgacatgattgatggtggcaggaggcagacaggctcctgggcggaaagaggtgggtccccggtaaagccccaccatcaagccagggaggcctgaagcccaggggctaggctgtcagtcccgggtgaagtctgtggcccggagtgagaacttatggtgatttttccgggtcagcccatggccacccatgggccaatcagcatgcacttcctcccttctgagcctagccagactcacacagacgctgggactaccagctgtgggaaggagctacccaattcaggtctcctcgactcatcaagacaacctgcctgaagaagggagctacccactctgggtctcttctccactgagagctggacacttactgggacaacctgcctgcggaaaggagctacccacttcaagtttcccgagagctgttctgtcactcgataaggctcctctccgccttgctcaccctctagttgtccgcgtacctcattcttcctggatgtgggacgagaactcaggacccactgaatggcgggactgaaagagcagtaacacaaacagggctgaaacacgccctcctcccgtccccacacccccgcgacttgccatgttgcgggtgatgtgaaggagagaagtgctgtggcccttcagggagcacagacctaggggctccctgagccagggctgtgacaccctctttggggctctgcggtttctggtatcttcaaacttccgggcacc

SEQ ID NO: 43556 - DNA, 2300 bp, Homo sapien
gttgcccaggctggagtgcaatggcgccatctcggctcactgcaacctccgcctcctgggttcaaacgaatctcctgcctccgcctcctgagtagctgggattacaggcactcgtcaccatgcccaatttttttttaaattatttttagtagacacggcgttttaccatgttggccaggttggtctcgaactcctgacctcgtgatccacctgcctctgtagaaggagggatcagactatccccaaaagaccacccctcacattcaacaagtgattctctgcctttgctagcaatatcctgtatgtagaaaagaaagcagaagtagattctctgttacccttcctgccctagggggattccacggatcctgagtcaccctgggagattatgaaactcaaaggtctttctcaaagatctttaaaaaccactgattctcaactgccaaattacagctactagtctttcctgatagtgttggctagacctcatggatgaccagaaggccttttcctcctctgcttctgtctaaaatgtcaggacttaggagagcttgttatacatttcctggtaacagtaaattagaccgctatgactaagcgctagtgacagctgcgtagctaaagcaaaaccaaagccatcttctgtttgggttgcttagtttaatagaatagtgattgttttggccgggcacggtggctcacgcctgtaatcccagcactttgggaggccgaggtgggaggagcacttgagcccaggagttcgagaccagcctgggcaagatggtgaggccctatctctaccaaaaaaaaaaaaaaaaaaaaaaaaaaaaaaaaaaaaaaacttatcaaagaatccaaagaccttaccttcgaaaattgtaaaaaacagtaatacacaagcacatattcttttagtcaccagagcaatgacatcatcacatattctgtaaatgtataattatttcaaaaaaaagttaaaggaaatgaagcacagaagatgaatcaagtagggattacaacaactttcaacagcaaccgaagtcagaagacagataccatcaatgtgctgaaagaggaaaacttctgaacctcaaaatctataaactatgaaataaacccttcaagaattttaagatgggctggtccaaaggtagtgagttatctcagttgattgttcacaatcagttacacatcaaactccttattttactctgactactgcacttgactagtctaaaaaaagaattataagatgaattaaagacacgttcagataagcaaaactgagaacgtttggcaaaagcagatctttactaaaggaaattatgaagaatgtacctcgggcagaaggaaaagtgtcaagatcaagtgtcaaggaagattagagatttaagaaggtataagaaggttagaaaagtaagaaaaaaatatgccgtcaactctaaaaactacaagtataaagaaaaaagattattgggaaatccaaataacctaccttaggaaattctaaaagaatatacgagctcacattcctttggtcataagagcagtgtcatcattagacatcaggtcgcctctggaaaattccattgtgagtttaaaaggcaaatgacgtctataattctaaaactagttctcccaccgaaactctagaaaggatcttgggatctgcagggtctcccggatcacactttgagaactgctgctttagtcttcctcccatctcctaaggccagagctcctgagtttgcttcccactggccaaggagaaaagagcaaggtcacttgtcggggggctgcagagggaattaccttctttcatttgcaaatgttactgggggacacaccggctcccagtagggtttccgccaaggctccgcgaaacgccactagagggcgccgctagcgaatcccacagcgcgccccgctgcccccacttttgtcctccgggttcacacgggcgcccggaagagagggtggtgcctgggagaggaaacgatgcgccccggggccgcggcctcattggatgagaggtcccacctcacggcccgaggcggggcttctttgcgcttaaaagccgagccgggccaatgttcaaatgcgcagctcttagtcgcgggccgactggtgtttatccgtcactcgccgaggttccttgggtcatggtgccagcctgactgagaagaggacgctcccgggagacgaatgaggaaccacctcctcctactgttcaagtacaggggcctggtccgcaaagggaagaaaagcaaaagacgaaaatggctaaattcgtgatccgc

SEQ ID NO: 43557 - DNA, 2300 bp, Homo sapien
agccccacaaagaaggacccaacccaaatgtcagtagtgctgagtttgagaaatcctcgagtaaatcatgtgttctctgcaaactaagaattatggtcctggggagtgttcatttgtaggtctcccaggtctcctggggtgaggtttgctttttctttgttttgtttgcttgtctgttgagagcctgctggaagctgaaaaggccgctgcaggagccagctttctttggtgctaccacccttgtggccacagttcttgctgtggaatgggtatcagggtaggcttagggaggaaaactaataggagaagaggaagaagaagaaaacagtttaggcagtaaagggaggcaggcctagaataatattaaaactagaaaaacaagtaagataagaggggaaggtaaagtagaaattaataattaagaatccaataaaatgttaaaggaaatgagttgagatttaaaatcaaagataggctgagtgtgttggctcacacctgtaatcccagcactttgggaggccaaggcgggaggattgcttgagctcaggagttcgagaccagcttgagtaacatgatgagaccctgtctctgctatatatatatagttatgtatagatatagttatatatttatatatatatataatatatatatttgccgaggctggagtgcagtggcacgatctcggctcactgcaacccctgcctcccagtttcaagcaattctcctgcctcagcctcccgagtagctgggattacaggcgtctgccaccacgcctggctaatttttgtgttttttgtagagactggatttcatcatgttggccaggctggtgtcgaactcccgacctcaggtgatccacccacctcggcctcccaaagtgctgggattacagacgtgagccaccgcacccggccttactgtgctttatgagaaataaatacacccctgaagtgctgaggaagtccagacccaaaaaacatgttcttatggacttaaaatttcaggtcaactttttcttaatttccaaaagacaacagtttctaagtttgcctactttagcttttcaagtaaaataaaagatacatagatagatgactagacctctagctgtctgtcggtctctggaacatgtccaaaaccaactcatcatttttccctcagacttgcccctctttttctacttcctctctcaggaatgctgtgtcaccacccaactagaaaaacccatcggaaaccccaaggtcacttaaaatctactcttttcctgattttcgaaaatccaatacattgttgttaactctagtcattatgttgtacaacagatctcttgaactactcctcctaactgaaactttgtacttttgaccaatatctccccaactccccccagcccttgccctggtagccaccattgtgctctctacttccattagttcaacctttttagattccacaaaaattaatttgtgaggtagtgcatatgttaattagctcaatttagccattccacaatgtacacatatttcaaaacagcatgttgtacacaataaatatacacgattcttgtcagtttaaaaattaaaataaatgaaaataaaaattaaaccaaggtcatcgtcactcttcctttccctttggtcactaagtcctgctaattttgcctattaaactatctcaattctactttctcctctttctcctctcctgtgcaatctttccttgggcccttatttctttccttcattgttttagcagcaccataactggtcagctggccctttaatgacttaaagcgccacactgagaaataatcgtctttctaaatggcaaactcgattctatattccatccttatttgagatcttttggtatttattacctaggacttttatgtgagccacacgagtcccattatgatctggctacaaccaacttctctgactcatctctctgtcactctgctccctcccacaaaactcgaactccctacacttctcccatgctgtttcccagcttcgtggcttcacacatgctgattcctctgtctataatgtcctatacttgttttgtctttctgtagaactgcctaagagccgggagaattcatgcttttgaaacaaggggaatttcccttgtccctcttacagggcatgtgatgggagtgtggcccacttcttaggtgccccactgctcaaaacccctagggaaagcaggcagatgggcaggtcgtggggagtgtgggctccaaccccatggcagcgtctaggggtggatgtttacagcttctgcagccccag

SEQ ID NO: 43558 - DNA, 2300 bp, Homo sapien
acttctactggtaacaggtactgctaatactactgtgatttgttacagtaggaacttgtaaaatgaatggcccccagcgaagtgcaccaactcatatctatgaccttgtgtggttccccaccatatcaactctggacttggctacgtgacttgttttgacatcagcaaacatgatgctgtgtttgtgccttgggacttgccctcttggaagtcagtaaccaagtgaggaagtccaacctaggcacatggaggggcaccaagcccccagacatgggagtgaagccaactttcagtcaagtcaccagcagaactgcccagccaacccagattttgagaaacaattcttgttttaaggcactggtttgcagtgatttgttacccaacaatagataactgagacattacccatatgcgtaactaaaggaagtgctcaattccaattggagattgctaaaaatagttatgttttttccccatcaaagttcagggatcctctgaaatctatgtgcagatcctttgaggagctgagggccccaggttaggaacccctggttaagccaagtggatcctgctctcctttttactactttactacactgttggtacacatatagttaaactggccacagcatatctttccttgttgtaaccctgaaatggagctgagctcctagcacataacaggtgtttaacacacaaatttatcaaatgaatgttgattataggatctgtcttcctgactaaactgtgagctgcctgaaaacagagtaagagcaaatactaggccttttccaagtgctttacacataccaacttactccttataacaaccctatgaggtagatgttattaccccaacttcaccaaaggaagataggcacagtgacttgcccaaggtcacacagctagaaagtggcaatgccaggactagaaggcagaatgcatgttctgattttacagcctttattaacgtacccaaagcacattgcagagctcaataaaacttttaaatgaatagtacaattctgagatttcattagcactattttatgggtactatgcttcttgaagactcaattttgtagattaatttctggtagcctgtgattttttatgacaaaatacatataatttactttttaaaaagtagaataatggctttatgctaaagtgcagattttcgaaattaagtcttcatcgtaaaagtcgatttttttccaaaggacacgagttcacaaaacgcagggaagggggtccactggcccgtattaaataatgttccctgaggagtggagcaaagctccagcttccctcgtcacccagccatcccaccccagcctcccccataccctgcacagcttctcctaaaatgaccctcccccatccacacatcaggttctgaaacctgaccctgccaggcaactaaagccgcgaaccccacagtgccctgagctggcctcaccctacccacgatcccaagagggtactagccgaggggatgggtactttgggggaaggcactttaaattttcaaagtgtttaattcacgaaagcacaacccaaagggccgcccccacccacccgggggtctcccgcctccgcccggcagccgctcatccccagtagaccagtgaatgaaccgcggggccgggacgcagccggcccagtggcgggaaaagcctcggggtgagccaggcctggctgcagagaggccccaagagagcgcggggagggctcgggcggccgggagggggcggtgacagctgtgactcgactccacgctctcaccttgaacatgtcgctggcagcggaggctccggcagggtcaccccggcctcggccacgcccactatagagaggtgactacggaggcccggtagggccttgatttctccaaccgcaagcaggcagcggtgcgggtgacggccgtactgcaaactcggtgcggcgaaggtttagttcaatcacccggttctagaagccgcgtcgctgagccgcagcgcgtcgcgcccgggcagcgggtgaacgcaaaccccgccctccaggaggctccgcccctgcgccggcggttgctaggcggcaagaaagcgccggctctgtgtggacggtacgcggaggcgcgaggagggaggcgcctggcgttgccgcggcgctgggaaactgtctttgcagcggcgactgggcgcccagcggcgtgtactgggatttctgtgagcagaggctgccgagagggggcgcttggagggccaccggcggcttcgaaagcttcgcagccggaagccgccggttggcggcctgga

SEQ ID NO: 43559 - DNA, 2300 bp, Homo sapien
cacctggagttaactttttaactcaataattcaatctcctcactctccagctgtctaccaacaagctcattgagggcaggaggcatcttgttaactacagagtcctcagtgcctagcacagtggagagtttttacatgtttgtctaaaaacgttttgtcccagttttatcaccaaatagcagtgagactttgggcaagtcacttaacctctcagtggttcagttccctccttggtaaagtgagagggtatacactaaatttctgattccacctccaactttctattctttaaagcaacgagtttggatgcagtaatgctccaatttggatgcagctcccaaattcttactcactgcttggtctctgttactaaaccaggggctctttatcatttcttttggtgccatggacccctatggacagatctcttctaagaattggttttaaaacgcataacataaaatacataggattacaaggtgctccaattatattgaaatcatcaaaatattttttaaaacaaaattatagtaaatgtgtcttcttaatgcattaaatgagctctaataactactgtatttttgtagtaacgagcataaatatttcaagatccctgacatgactgcaatgtaacatgaaaatatctgtgctttccattgatgacaaagtcatcaatgttaatactactgtggcttgttatctacactataattgaaagaaacaaagttcagttagaggttagtgaaaatgaagttgtcattttttcccccatacaagttcacataccccctgaattaagaacttctgccctaatttatcaatatgtttcacatttttatgtatgtgtgacgttacactgctgatgcagagagccttctgagtctattcagtatttctccttggggatgccttggaatatacaatcctcttaagaaagagaaaagcagcccttaacatctgggagctaagctgggcttaactaacaccaaggctggcagtcacagctgggccttggtgttaccactgcttcctaacaacacccgatccagagcaaagctcctgcttccttgaactcgccccaaaatcaccgaaccaaagcccaaatcctataataaatctaactcttttactgaaatatgtcactgtgttcctacgtgtgcgttctccttgcagcaatgagaaacccaatttcttcaactacaggtgtgcccctagtggtctttggctggagggcagtggcacgtcactgtacaaattctaaatttttccagatgctcgcctggatggggcttacactttttataggattagggcagaaatacagaatgaaataggaaatacatcctcattatgagacagtgcaacaattgttttggctagaacacaggtttcaaaggcagactaatgggtttggatcctagcttcccacttcctatgtggtcttgtacaaattacttctacgtgcctcagtttcttcatctatgtattgggaataataatcatgcccacctacttccgttgttggaaagattagatgaatgtgaataaagaacttagatcagggctgcgcatatcaaagtgctgtatcagtgcttgtttactcttgttaataagataattattgccattatcagttacttctacaagtattaagggacaaacatttgatttccagagaggaggcttaccgcttgtttcttaacgggaaaaaataaggtcagagccttttccgattaaaggacacagcatattagtttaaatttaaaacctgagaaacctcaagtccttggttaaaacctttcgtaaggtaaatccaggccgccaaccggcggcttccggctgcgaagctttcgaagccgccggtggccctccaagcgccccctctcggcagcctctgctcacagaaatcccagtacacgccgctgggcgcccagtcgccgctgcaaagacagtttcccagcgccgcggcaacgccaggcgcctccctcctcgcgcctccgcgtaccgtccacacagagccggcgctttcttgccgcctagcaaccgccggcgcaggggcggagcctcctggagggcggggtttgcgttcacccgctgcccgggcgcgacgcgctgcggctcagcgacgcggcttctagaaccgggtgattgaactaaaccttcgccgcaccgagtttgcagtacggccgtcacccgcaccgctgcctgcttgcggttggagaaatcaaggccctaccgggcctccgtagtcacctctctatagtgggcgtggccgaggccggggtgaccctgccggagcc

SEQ ID NO: 43560 - DNA, 2300 bp, Homo sapien
accgcacccggccacatttaccacattctaacaggccacataatttgcttatttattttattacctgacacatgtaatccgtacaagggctagagttttcatatgttttattcactgatggatccccagtgggtagaacaagacttggcatgtactaggcacttacacatacttatggaatgaataaataaatagtatagtagattgcaaaccaacaatttgtggaattaagtaggaataaaaatacaactatgtgaagatcatttactatgttaatataattacatggtacagtggaaagatcatggggtggctgggtgcggttgatcacgcctgtaatcccaacactttgggaggctgaggtggatggattactagaggtcaggagttcgagaccagcctggccaacatgggaaaacccatctctactaaagttacaaaatttagctgggcgtggtggtgtgtgcctgtagtcccagctacttgggaggctgaggcaggagaatcacttgaacctgggaggcagaggttgcagtgagccaatcacgccactgcactccagcctggatgatagagggagactctgtctcaaaaaaaagaaaaaaaaaaaaagtaaaaagaaaagtgattaccaagacaactaccacagactgggaatttctgaaaagcctcaacttttcttttcttttttttttttttgagacagcgtctagttccgttgtccaggctggagtgcagtggtgcaatctcgactcactgcaacctctgcctcctgggctcaagccatactcctacctcagcctcctgagtagctgggaccgcaggcccgcaccaccatgccagctaattttttgtatttttaatagagacggggtttcactatgttcgtcaggctggtttccaactcctgacctctaatgatccttccgcctcggcctcccaaagtgctggaattacaggcgtgagccaccacgcctggcctcaatttcttaaaaagcaaaaacaggagggaggaggagggtatgcagtatcctaaatcctcagaacccctggggaagaacctcattccaactccaccagcactcccaggcccaggcttctagcatgcttccgacctcgctagctgctaaataaatagctattgaggaatgtgtattctcaaatacttaggctagagggctaagaaaagacagcttccatctacctctgtgggactctaccagtgtgaaaggatactctcaaggtatttaacaactcccattacagtccagaaattggtggggaaagttaaaatatattttcttttcttttttttttttgagacggtgtttttgctctgttgcctgagctggagtgcagtggctcacgcttgtaatcccagcactttgggaggccaaggcgggcgatcatgaggtcgggggtttgagaccagcctagccaacacagtgaaaccccgtctctactaaaaatacaaaagttagctgggcacggtggcgagcgcctgtaatcccagctactcgggaggctgaggcaggataatcgcttgaacccgggaggcggaggttgcagtcagccgagatccactgcaccccagcctgagcgacagactccatctcagaaaaaaacaagcaaacaaaaacaaaacaaacaaacaaacaaaaacaagaaaagaaaagttagccgagcatggtggggcacgtctgtggtcctagctattcgggaggctgaggtggaaggattgcttgagcccgggaggtcaaggctgcagtgagctgagatcatgcctctgccctccagcctggccgagagtgagactgtctcaaaaaaaaaataataataataacataaaaataagaaataagagtgaaagaggcatcattgattgaagataacttggggaggggttcatatagtaaacgtatagattgattgaaagacacagcccagttttaaaactacataaatatccaaaaaagcacatttgaaattccacgagaccttgcaatgtcaaaataaggagggacgggaagcacggtgatcacacaatggcttatgacatacactcactacatttatacctggtacaaagagcgcagaaacgtttcaactcttgcttgaatcaagaacagaagcctctctttagacaggtcagtgccacatagtaatgtatagcttaaaatgttagttaatgtacaaaaatccaaactcagcgtttagatgttcgggaataatgcatgaacatttaaatattcagaagtggaatgtatgcatttttaaagtttattttatgatttaatttt

SEQ ID NO: 43561 - DNA, 2300 bp, Homo sapien
aaccattgtggaagacagagtggcaattcctcaaagccctagaggccgaaataccattagaccaagcaatctcattactgggtatatagcctctaaaatataaaccattctgttataaagatacatgcacacatatgctcactgcagcactattcacaatagcaaagacgtggaatcaacccaaatgctcatcaatgatagactggataaacaaaatgtggtacatacacaccatggaataccatgcagccataaaaaggaacaacatcatatcctttgcagggacatggatggagccgaaagccattattctcagcaaagtaacgcaggagcagaaaaccaaataccgcatgttaccacttataagtgggagctgagtggtgagaacacatggacacatgcgggggaacaacacacactgggggctgtctgacggctgggggtgggaggagagagagcatcaggaagaacagctaatggatgctgggcttaatacctaggtgatgggatgatctgcgcagcaaaccaccatggcacacagtttacctatgtaacaaacctgcatatcctgcgcatgcacccctgaacttaaaagtcggggggaaaaaaaagagaggtagcaattatcaccttaatgaattcctttcttcacttctcatattgcccctcattttccctaatttccctcatttttttcatttataatatatatatattttgagacggagtctcgctctgtcacccaggctggagtgcggttggcgcgatctcagctcacggcaagctccgccttccgggttcacgccattctcctgcctcagcctccggagtagctgggactacaggcgcccgccaccacgggcggctaatttttttttttttttgtatttttagtagagacggagtttcaccatattggccaggctggtctcgaattcctgacctcgtgatccacccgcctcagcctcccaaagtgctgggattacaggcgtgagccaccgcgcccggcctcataatatttatttcctaaataagctaacttgatgactacttacaagtattctaaagtgagcttggcttctcagtattcgtcattgtggctttcatattatcttttcacttctctttactatacttttgcataatagctgtctaacaagtttttatggaaataaatttattgcaaacaaaaaaggaaatagctgtttatgataaaatttgtatagaaatgcaaggagaaaaacaaatcactcaactgcttttcaacacgacgaaaagtgggttaaggtctcaaaattctttaaattttaaaataccgatttatcggtaatcgaggtttttttggatctgcttctttaagaaaaaaaaaaacaaaacacacacacacaaaccagcgaacttcagacgctcttacgacacctagctatattcactgggaacgcaatctaacgtcaccaaggcccacctcccgggccctagaaatcgctctctgggaacaagctggggactttgattttgctagccctgcccctctgagcccttcaccaaacttccgcgcgggggcgcccgccccacctcccgccggggctcagcacgcggccttctcccagccaagagccccgtcataggtgggcgccgaccccgagccgatctcgctttattaaattacagaaatcggtattcaaaaaaaaaaaaaaaaaagggcggggaggacactccctcttctctgttcccacaccctagctgattcccaggtttcgggaaactccacaggaaacggaaatggtctctcccaggccagcgcgcgcgccgggttgcatcacccgcctcgcacgggccggcggggcgggggtttggtggctgccctcagtattgcctgcacaaatatctaccaggtctgcgacgaatagctccagcaacttcgcaccgtgttttccactcagcctaccgacaggcactgtgcagattcaagcggagagatgtccaagcagtgaggccgctgctgcaccggccatcctgagcccctactcggccttcccgtctccgcttccccgccccgcactaggacccctgcagatgatcaggcggcagccggggtgatttccttcctcttttggcaacatggcgggcggagaagctggagtgactctagggcagccgcatctttcgcgtcaggatctcaccaccttggtgaggttttgcttggggaggatgcagagtgagctcaggagtggaggtgaccgagcctcccggtggtattgggactagtcagtgtcgggagcatgggtcaggagcctggg

SEQ ID NO: 43562 - DNA, 2300 bp, Homo sapien
aggagtttgagaccagcctaggaaaccatgagatgccatttctccaataaaatagtaagattagctgggtttggtggtgtgtgcctgtagttccatctatcattttatcttttgtgtgcatgtgtgtggtaaacaagggaaatctggaaactttttaaaaatttaacttaaggaacttttttaatttcttttttttttttttttttttttgaggcagagtctcattctgccacccaggctggagtgcagtagtattatctcggctcgctgcaacctttgcctcctgggttcagttaattctcctgcctcagcctcccgagtagctggaactataggcacataccaccacagccagctaatttttgtatttttagtagagatggggtttcgccatgttggccaggctggtctcgaacttctggtcttaagtgatctgccctccttggcctcccaaaatactgggattacaggcgtgagccaccacacttggcctaaggaactctttaaacataggatagaatactgtaatgataacccccatagagccatcactcagcttcagcaattattaatgttttaccagtcttggctgggcgtggtggctcatgtctgtattcccagcacttcgggaggccgaggtggacggatcacctgaggtcaggagttcgaaaaaccctgtctctactaaaaatacaaaaaaaaaaaaaaatttagtcaggtgtggtggcacatgcctgtaatcccagcctgtaatcccaggtcacagtgagccgagatcacaccactgcactccagcctgggcgacagagactgtgtctcaacaacagcagcaaaaaaaagttttcccaatcaatcttgctccatctatatatcttctttcccctactcccctcaagacacagctagaatattttgaagtagatcccaggaatcatatgtagtttttttttttttttttttttttgagagtctcactctgtcgcccaggctggagtgcagtggcacgatctcggctcactgcaacctctgcctcccaggttcaagtgattctcctgcgttagcctctcgagtagctgggattataggtgtctgccaccatgcccagctattgtatttttagtagagattgggttttgccatgttggctagacttgtcttgaactcctgaccttaggtaatcctccaacttgggcctccccaagtgctgggattataagtgtgagccactgcgcctggcccatatgtagtctttaactatcttttcaatcagtctttcaggggagaaatggcatgcaggtattctgcaaactactcattttgaattttgtattctttcggtctttgttaaggatattcggactcattttgagttcacttattatctctatttgccctttgtttagaatttattgttttcaagaccaggtcagtaatacttaccatctcctgcattaagttctcagccaagccatcattcctagaaaatcagatttctaaaccctttgtttagaatttaaatcaagagaatcgttctgttctcatttgcccagtcatctcatgagtgtatatttctatttgtctagataaaacaggtattttcttgtacctatatagctattatatgagtataaaaataaaagtatgaaagtgtgtaggtatatgctgtgcttatatggctttggggtatctaattcactttttttttttttggagacagagtctcactctgtcacccaggttggagtgcagtggtgcgatctcggctcactacaacctctgcctcctgggttcaagtgattctcctgcctcagcctcccaagtagctgagactacaggtgcacgccgccacgcctggctaattttttgtattttaatagagacagggtttcaccgtgttgcccaggctggtctttaactcctgagctcaggcatccacctgcctcggcctcccaaagtgctgggattacaggtgtgagccactgcacctggccaactaattcactttataggtgttttaggaaataaaaaattgagctatatacatcttatttttatataggagttggaacaaaaattgaccccactttgtgccgggctgacagaatggtggggcaagtacttggtgcagtcggagctttacctgagatattcacagaattggaaatttcctatttcctgcttagacggcttctaggtgtacgcactgaaggagacaagaaagcagcaaaggtaaatgcttttttaaaaattcctgtttctaaaaaagtgacaaatgggagtgttaaaccagtgttgagttt

SEQ ID NO: 43563 - DNA, 2300 bp, Homo sapien
gttgcatggatgaagtgaggctctattcttcttctttttttttttttttaatagagacgaggtctcaccatgttacccaggctagtcttgaactcctgggctcaagtgatcctctcgcctcggcctcccaaagtgctgtgattacaggactgaaccagggaacctggcctccattcttgccataccgtagcatcacactgaggcccttggaaagtacttaaacgctgattatcaatgttttgaaatattaatgtgggcggccgggcacggtggctcacgcctgtaatcccagcactttgggaggccgaggcgggtggattacctgaggtcaggagttggagaccagcctggccaacatggtgaaaccccatctctactaaaaaaatagaaaaattagccaggcgtggtggcaagtgcctgtaatcccagctactcgggaggctgaggcaggagaatcgcttgaaccccgaaggcagaggttcagtgagccaagatcacgccattgcactccagtctgggagtgcaagaaatattaatgtgggcacacaagctatttctcatttttttttattgaaacaacattgcttagtttcatttacctttctgtgaaatgtctttctgtgaaagtctatcacagcctgatgtaatttttataaacaatgaatacatgctgttactatttttgaaaggaaatttaatcgcttggaaaaattcagactaaagccccgagaggaaaattatcatccagtgcatgctcagagatttcttcttactctacttttgtttttcctttttgaaagcatttgtgattgagagatgtctgagggaagggacaaattgcattctgggagttttaaagagttatgtcaggcaactaaaatacgtggcctctgtatttaaagagatttcacaccagtatactatttgctttataatttttgtgtttcttattgtttaaaaatgcctttaacatttagtgctgtgttaaaggatagcatgccagattccagattaatgtaaagactccactatttaacttttccctagtaactttaaaacagagtttgggttccaagttcagcatggaaagatagcataaacatttaaactaagtaaagtgcgaaatacacatttttgaagttggtaagtgctgtttaatcattttccccttctctcccaagtcttttgaaacttcaaaaggcttgtttaagcagtgtgtttaaaaaaaaaaaaatccatacccaattgggctcctctctattaaggaatgtggaaaattcatgatttatgaaacgatgacaccagtcttacatttcacaggctcccaagctctgaaacacgggtacataggaaaatacacagaaaattcctgttctttgcaacgtgcgaaacgtttcaaaatgcaactttgctcatctccctcccccgtacaaactaataaaatcagtttggctctgactgcttatttttaaaaagtagacggcctggtaggtgctctagggataacccttctccccccactccaccccccttcccgcacacccatttagactggcaagcccgttttcattttatttcaaagattttttttttttaagcgaaggcaggggacggcgggggttgctaaatttatcttcctccccagccacggggatgaagaaaacacatttactgcgggcgggggtctgagggcctgcaaacaactcgagctggagcctcggccaggaccggcgcgagaggcggtaggtctccagggaggcccccggggggcggccgcggcccacgggacatggtggggggcggccgggccgcctgcctctccgcggggtcggccgaccgcggccccgcgcgggctttacggccgaggcggcggcggcagcggcgcgtgtgtggcggcggcgggcgggagcgcggaggaggtggaaagaaggggggcgctgtcacggagactccggccgccggagaccccgccgcagcgaggccactgggctccccggtcgcggggcgggagcggcgccgacacggggtgccaggaggacccaccgggcggaggagggggcctgtctacccttccgcattttcctgggtctctctcccgggcggtgacgtgacgtgctgacggcgggcccgtgccggggagctgggccgctttttgtcagctccgagctcggcccctcctccctccctccgcccgccccaccagccggagcccggcccagtgctccagagaaaggccggcctgcagcacccgccaccgtcgccggccgcccgcacgtccgtccggtgagtcccgggtgccg

SEQ ID NO: 43564 - DNA, 2300 bp, Homo sapien
ttcctgggtctctctcccgggcggtgacgtgacgtgctgacggcgggcccgtgccggggagctgggccgctttttgtcagctccgagctcggcccctcctccctccctccgcccgccccaccagccggagcccggcccagtgctccagagaaaggccggcctgcagcacccgccaccgtcgccggccgcccgcacgtccgtccggtgagtcccgggtgccgccgcggccgcggggcctagtgcgcgcacagcggcctggtctcggcctggtcggcggcccgcaaggcgccctcccgcgctaggccgggcggcgtggcgcgcggcgccgagcaggccccgaggaggccgcagttaggcccggggaggagcccggctgccccgagcggcggcggaggcgcgctccgtaagcgggcgggggttgggggagggtcgcccggttgtgccggaggcggtcgaggggccccgggtcggctccgcggccgacctggggcaccgcgccggggtgaggcctggcgaggaggcgaaggctgcaggcgtgaggtgaaggccgcaggccggccgggccgattttcgctatgtaaatatcggtgagggggggggagggacgggggacaagatggcggcggctcggcgcctgctgcaggggacgatagagggggttgccgggagggggagccgccatcttggaggcggtgtctggagagaaaattccgctacagcccgtgagggggggtgggagagcgggcggcggcggcagcggcgccggtgacgggccccggaggcccggcgcggcggcgtgtgcgcgcggaggggcgtgctcgctccccgtggcggccattgcccttgccgccatgatgagcgctcgggctccaggcgctcggcggcagcgccaccttcctgccttgcctcccgcagccccgtgactggctgcagtttccgctgcgtttcagctgagctgccgcaggcggccaccgccgccgcccggacgccgggaccgtttcaccctcagcgcccctggccctgcgccttcccccgcgcctgtagccacccgagggcagtcggggcaggtggcattccggacacctgggcttaccagggcatacgggaccccaggaaatgttatttttgcttaagtcaaatcatatgtggctgctaaggtgctttcgatgcagttgtttttccaacaatctttgccgccccgagtatctgaataaaggaagaaaaataaagattgatgggaaagtttttgccattcttttgtcctatagggaaaaaaattgcacaacacgagagcggaggaataaaattttgaatcattcgtactcatttatgtggaaacaactttcttgaaaaacgatttaagtagtgatctgttggtggtatttttttaaatcgaggaataagggcagacttttttattttcttattggaggacaacttagtgtggtgcatatttattgtgcatttgcctgtcatggtatttcgatttttcatttgtgaagttttaaggcggagtttcatcccctaacgtacttttttgattgcacactgtgcaactttcttgataaactcggagcctactgttagcgatgcaccgtgctagatgctaagaaacattaaaaaggttcttgtaatgcagacggtggctgcaagaagtctcatgtttagaggtaggtggggcaaggtgaaatgcagtaaagtgagaggtacaactaattactgggatttccgagggaagcaaggttgccattggaggatcagggagggacgggttcctgaagtattaataggtggcattttgagaaggttaccgagggatgggtaggactttgttaggtagaggtggaggtggagaaaggacgtttcaagggtgaagcttcttcagtaaacagtaagtatttacagtttggcaaaagtggatggtataggtaggggagtggtgggaattcaggctagaaaagttagattgcagaagggcttgcttgccaggtggaggggcttatactcaatggggtaggcagcgggggtgccctcaactagaagagtgatggcacacctgagctgcaccttgttatttacttattttttattttgagacaggttcttgctatattgccccaggctggtctcgaactcctgggctcaagccgttctcccgcctcccactgcccgcctgtcactgccgtctgttccctgagctgtgctttacggtacttagtagttccattggactaggaaaagtttcaaagttgaaaaataatgagagtagtaagttgatcagtgttttcattatcagaacg

SEQ ID NO: 43565 - DNA, 2300 bp, Homo sapien
ggattttaagtagcattttgtgcagtggaaaaggaagaagtgaaacaagcgatttgcaagctcagaaagatcagcgctttgttgcttaggctgagaaaatctccctctccacaaacatccagcttcttcctgctcactgacaactgccaccaattatcgctccacttccaggtagcacctgaaagtcactttaggaaccacaggccactggtcttctctttgtctgcccatgcacaccaactggattacttagctcttctggtaaagctcctggttaaataagttgttagtatgtcttttttaatgctttgatttaatttgaatggaaaagacatggtagtctacatacttctaccaagatgaagatgaccaagatgttcttgaaaatccaaaagtctagaagaccactggatgtctttttttttgagatggagtcttgctctgtcgcccaggctggagtgcagtggcacgatctcggctcactgcaagctccgcctcccaggttcatgccattctcctgccccagcctcctgagtagctggggctacaggggcccgccaccacgcccggctaatttttcgtacttttagtagagctggggtttcaccacgttagccaggatggtctcggtttcctgacctcgtgatccgcccgcctcggcctcccaaagtgctgggattacaggcgtgagccaccgcacctggccgaggtcttttactgtgtatgttacttttctttacattcagagtagagatgcaactattttattaagcaaagaattggctgcataaacgtccactgaaggcacaaaagctaaatagctacccaccaataatctcattcagtgagaaaactagtccaatcagagacccaaggagtggcttccagtcacatttgtacctttccttaaagaacattcttcctgtccttttagttacatatgtttatgtttacatattgccaaaaaaaaaaaaaaagccaaggtttggtggaaatggctaaagtaagctgtactttattcactcataataggaaataacaatttcatatactgagccctgagttcaagttcacttttttttttttttgagaggggggtctgggtatgttgcctaggcagatcttgaacttttgggctcacgtgatcctcccacctccgcctgcagggtcgttgggactataggtgcatgtcaccatgccaggctctcaagttcacttgagataaagaatacccaacactgtgtaagcatagactcctgtccaaaagtggtggtgaagcgtgaagggggctgtcctatggtggtggtgtagagaaggggtatgaaagaaagtgccagtgaccttacatttgatcctttccaatggtagtagtggggtgggggggtatgaaacagagtcagtgaccttgcaattatcctgtccactggcattggggaggtagggggtgttattgacccttgacctcacaatggatcccgtccaacggtggtggtggggggacatgaaatgcaatcagtcacttaatcttgtgcgggaaggaggggaaaggaaccacgaaaaagagaatcagcgaactaacaatccagtccaaaggtgttccaaaggtgttctcttgggagtcaggcagggaggtgggggtggggctgggccacgaaacagagtcagtctagttaggctgtaaaatctaagtgtcaggatgcagcgaacggcaagtcctcctcccggaaaaggcgcctgcggttgagaagggtcttgagcagcgcggaggatcggattccgggctcctggcctcttcccggtccgcgggcacctcggctacctttcggcagcggagaacccagccagaggcggagctgaaagcggctgcacttgctgggctgggctgagtcccatgagccagggaggggggtctctggcgccgcgcccggacaaaacacaaacgtcacagaggcagcggcggccaatcagtggagggcgcgcgcggccgcgtgcccctcgcgctcctcgcctcccctcgcgcgccgcgtacgtgcagcaaccgactccgcccagcgaggcggagcctagggaagccgcgggcggcccgccgctgtcctggagctgctgctgctgctgcggcggctgcaccggcggcgccgaggccgagatcgaggccggggtgcgcgcttcgcaaacgtgccctatccgtgcggcttggctgcgccagcccttgcggccacccgggcgtctaggcgggtctgtgcgccgcccgggcgaggatgcggctgttccggtggctgctgaagcagccggtgcccaag

SEQ ID NO: 43566 - DNA, 2300 bp, Homo sapien
tgcacttcttggagaagtacactttgagaaccactgctctaaggcaaaaatacatatattgagattagaataaccatgtcatttgcacgtcacccagtacacgtaggaaaagggctcctaaatgtaacacagggcttggctcttccaggtgatgagctggtagagttaaacctgctgctggaagtgttttgtgcttccaggagggcaaatagggtaggaagcatcactggaattctcacaacactggagttctgtcctgtataggtcataatactcttaagtgatgttattctgacttaaagggccagcatctaaaactgtcaaactgtaattctctgctacagaatccattttcttcttcttttaggactagccctctttgcttattgaggagtaataaaaataatgtccccttatattagcatagcacgttctaattcaaaaagtgcaatgacatgatatctcatttgatctcctttctgtgatggaggcaagcccggtatttttatcccatcctttgggctactgattctcaaagtatagttcccagacctgcagcattaacaacacccagaaactctctagaaaagcaaattctgaccccaccccagacttactgaatcaggtccggggtctggcagggggccaataattcgcatttctaacaagttccctggtgatgctgatgttggtgctgctggtcccagaccacacttgaatgaaaaccactactgtagataaaaatgaaagatgtagaagcccagggacttgtcctaagaggactcctgcctagatccttttcttactacacctgctgcatccctggtccctacgcgcccgcccccaccacctcgcccttcgcaaaaaaaaaaaaaaaaaaaaaaaaaattccttcaaatcccagctgcattattttagaattttgtgaatgtgaatacctgtaaaatgaggataacaataggatctacctctttgggttctcacaaagattaaacaagaactaggtaaagtacttagcaccgtgcttgtgcttaataaatgccagggatcatcatgattttttattaatattaaaagtgacaattcacaatgaataccttggtaagttctttggatgtgtgtcttcagaatgctcctcttaaaatgtgaatgtccctagataatgtagacattaaagcacctgatcgttaacattccatctctgattgccatgagcatttggctgagagcagggtacttcggaaatgggacccacgactggtaaagtaggaaccaagagaaaatagagcagtgcatggaacagtgtattgaaaggcacacaacagcaagacttcttgaggaaactttgaatagctggggaaggggaagagtggctgacagaggaagcaactgcgaaagggcagccaggagtaggaggcaggctgttaaagacaatctacctccttcaaagttccccctagggcagccccaggggagggctccagggctacaccaggccacgaggggatctgccagggttcacgttgcatgaagtccaggggtcgaacactcaggtgcccatagtgaatgcccggaggggccctccactggcaattagcacaatgaatttgggctcaaaagtggctttgtcttcagggtgactcctatttggcaaatatcctgactacagcacatcatgcactagctcatcccagggacatggtcctttattagtggaggtctgctatgttgtttctcaaggcgtcctaggcccctcaggaagcggttttatgttatctgggtggcgcagcccgggtcccgtgcccagagaggacggagacctttgcaactgaattaaacagaagaaacaaaagcagcaagttcgggcccgtgggtacggagggctagccaatggggcccggccgcttcccggcggagtggtactatgatgacagtagccaaccagcgcgctctatgcaaatgagatactgtatcccgcaccagccgcttcagtgtcgtctggttgttatagtgataaactgaggccttgcctcttggcttctgggagagagagagagagagaggggcggggggtaacctctttacttcccctagggaagacagaaagaaggggagaagaagcggggggatgggtggagggtagaggggagaaaaatacgtgacaaagaaaacattctctgcctgggaggagactctctgagggtgtagagctagagggagcattcactggccatgccagtagttaccactgatgctgagtcagaaacaggtatcccaaaatccctttccaatgagcctcc

SEQ ID NO: 43567 - DNA, 2300 bp, Homo sapien
gaggtgaggcaggtggataacctgaggtcagtagttctagaccagcctggccaacatggtgaagctccatctctactaaaaatacaaaaattagctgggcattgtggtgcacgcctgtaatcccagctactcaggaggctgaggcaggaaaatcacttgaacttgggaggtggaggttgcagtgagccagatcatgacattgcactccagcctgggtgacagagtgaaacttcatctccaaacaaacaaacaaacagaatgaggatgaggggaagccacaagagggaagaagaaagaagagctaactgtttggatctgaagaaaggctttgcagggtgagggctatcagcaactgtagggagagatctgatacaaatataacatctatttccttggggtcctcagatacttttcgatccaacttccatggagttttctccctgcggccctctaacctctctccatgctgaggatgctctcctaacagtgcttgtgttgtttggaaacagtaagtgttattaatctgaattcagtcacagaagcagaaccacgatgagctgtggaggaagcgatttatcataggaattagtcctggccccattgtgagagggatgggggattgaaggtccaggaggaaattggaagatgggaggagccacccaccatcagtctgagaagcccagcacatccaactgtgcaagtggaaggggaagccggttggggagacctatgggaagctgttcctacctctatgggcctgcagccaagtgtccagtggtggccctggggctcctgttggtcaacaggatcagcactcacaaagaagatctggacacagagtgagggagagtgaggacaagcgggatccgatttcacgtctacctctgtttgttaccatacctaaccacaacaaccgttgcaaaataaccgctcctacttcacttccacctcccatatcttatgcaaattcttcttttggtcaactctaacccaaagccttcagggaagggaatcctgggaaatgtgattccaacttagcaagtcagaacactacacactaccacactaggaaacagtgtggccaccggcagagctcccccagcagttggcagggtacccagatgcagaaggtataggatgaatgaatggtggggaggggtgagggagtctgaaaagcatccttcaaccaatcagagcacgttttactgtcctggagcttaaaatagaggagaaagcattctaagagttttcctgctaggatgggacaaaggatatctttacttggcaaaggtgagtttaggtggaccagctgccttccctctaaactgaggtaacagtctgcagccaaggtttccatagccctttggtgcagccagatttaaaaagaatgttgttcttagaaagcctgaagcacatgcatatttaaagagttcttttaacacagagttatctgagagaaaattaccttaacacaaattccgaagactccacatagttaagatgcacaaattcattatcaatggtgctgagaatagctccttggaagggataaaatgtttattagaatcaattaaagtatgtttgagagatttattttttccatctttattctcctatttaaagaaagtgctgagttgtatattaacacttcaaggtctcggtcactgtttgtcttgaaaaaaagagagaaaatgtttgtcattccaggagcataatcagttgagccagtgcacaatgacatagttaattcaccaacggaatttgttgccatagcttcagcgagggacggggtagattaaacaatagcctttttcacgactgcagctttcaccacaacccgcctgtccccgcacaacaggccatcatagcgctagttcagagcacagcaattgtcaatgaacaacagcccagaggggacaagaggaggcttgtggtaagtaaagcaagagtgcctagcaactcaaatctctccttattcaacaactgggacactccgagctcctccgagcttatctttgagcgctgggcacagagagcctgcttgacctttggtcaagtgagcaacaaaaatttcatcctgtgactcaaaagaactccaaagggtagaggcctctagagaagataaaaagatcaggagcaggcatggtaggccatcaggagtgcatcatggaagaggacaatcgcgctccccaattgtggcgcaaggtaatgtgaatactttcttattgatttttgccttattgaatatcaaagtcagttcaaaaagtaaagtcctatgtatctgcaagtgtaatgaatct

SEQ ID NO: 43568 - DNA, 2300 bp, Homo sapien
taccccagtgtgatgacttaccaggagttttgaactgaaagtgtagggccagaagacatatcatggtatgaaagtgtctggcctggcatggtggctcacacctgtaatcccagcactttgggaggctgagatgagtggatcacctgaggtcaggagttcaagaccagcctggacaacatggtgaaaccccatctctactaaaaatacaaaaattagccaggtgtggtggcgggcgcctgtaatcccagctactcgggaggctgaggcagtagagtcgcttgaacctgggaggtggaggttgcagtgagccgagatggtgccactgcattccagcctggatgacagagcgagactccatctcaaaaagagaaagtgtcctacaggtcttttcccacaaagtatgtgggtcattgtctcagtctgttcaggctgctataacaaaataccacaaactgggtggctaataaacaacaggaatttatttttcacagtgctgtaggctgggaattccaagatcaaggtgccggcagattcagtgtttggggtaggcccactttttggtccatagatggtgccttattgctctgttctcacatggaagaaggggcaaggcagctctctggagcctcttttccgagggcactaatcctattcatgagggagggttcctgctgatgacctaatcacctcccagaggccctacctcctaacaccaccacactggtgattaggtttcaacgcatacattttatgtggagagaaacattcagaccacagcagtagtgaaagagaaaagaggtttgaaatgcctagagttatacccgggcatgtgggaagtaatcagctgtgaaattgttaaggtaaggatttggttcttattaatgactagccaacatggttctctcctggttggaaaaagcttgataataaaactataaaacttccatcagtttttaaaagggaagtgtaggaataaatctgtcgtagtactttaaataggaagttatgtctaagtgtaaattactacatgttatgtatcacaacatatggatcacataacatgatattaaatgattatgaagctgaaagacattttctaaacaatcagaaattaagaaacaagtattgatcaaccatgctagaagacagattgaattatctttatatcctctttggagaaaatattacaaaattgttgtcacatgaagaagggatcaataagcatgtgggcaataatgtaggaaaaaatacaaatgtgtggcaggcattatttaataaaaatgttatacctttttggaaagagataacatgagatgtacacattacagccattgtatcatacacaaaaattgaataccctttttgtttttcataacattgaaattttggagttcacgtcaggtgttttgtagattgtcctacattttgaatacatctgattgtttcttcatggttagattcaggttagacattttttgcaagaagaccatataggcgaagtttttcctttttcatacgcattacatcaggaggcatatgagatcagatggccatttattggtaatgctacttctggttatttggttaagacggagcatatatctttaagttgttaatcacacagccactgtatccagactgctgagaagcaaactatcaggcaaaattcagggcgcgcagcaggaggcagtcgctttcccggctctggggaaaacgatccaaccacgcccactctcctgcccgcccgcgcctcctttccgggaaaatgggctctgagaaccagagcgccctttctcccacgcgcccaaatcttttcccatcagcatgcgtgcgcttgcgcagtctccaggcggctcctttccagcgcccgaccgcttctttctcctgctctcctccggcttcccctcagctctagcttttccctaaggggtcatcacagggcgccaaacgcgcgtccgcgggaaggccgggggcggagcgcggcgcggcgcggcacgtcagtggccttccggccggaagtccgcagcctcccgagccgctgattggctttcaggctggcgcctgtctcggcccccgcgccagttttgggctggttggcgcggaatcgggagattcgggaccatggcacctgtgcacggcgacgactgtgagataggggcgagtggtgagggacaattccgcgcgcggggctccgggttgggacagtggcatgattgccggtggtgggggttctgagggaggcgcacacccgggtttgtttgggcgcagaccttggtcgtccccggcgggggcccttctgg

SEQ ID NO: 43569 - DNA, 2300 bp, Homo sapien
tctttactcctcttggctgcgatgagacccgcgcgcctggaatgggctttcggggccgggggagggaatgtgggaggaaatcagcgcgcagaatgttagtttaaagctgaaccggacggtgtaaaaacaccgaactcttggtggggatggaaaaggaagaatgcgggaaaggcaaggagagatcccaggtgactttgaatcgcagagagggcttaaaggaaaatcaaatgtcagcgatggctcgggttctcctccgctccccaccacagcccgccctatcatccaagtgcagaaaaaaacggatgagaattaagctaaaagccagagagagagagagagagggacagaggaattctttttgtcctgtctttaatagtagtagtagtatcagtattagtattcgcattattaatgtgcctgttcccaacccttcatcccctccccccagttttgtcttgaagtttcctgcggaggcagcccgatctgtctgctacccacccaccagcatccaagagttatgcagatgtttatggctgaaaaaaaaaaatcccagttatgcatccttgtatttttaaatactgactgtaagtgattcaagtataatcctttgtaaaatgcttttctctttgacacattgaagggagttgagagaggaaaacccggcgtggattccccctccctggcccctctctcacccaccaccttcgccccaattctgccagcgttggggcccctggaaatccctgggaacctgcacccaggcagggaaggcgtccgtgctggcccaggctcgacccaacatcagttggagttgggttttagttctcggcgctggaaactgtttgggaagaaaggcgctctctctaaggttcactctctcacctttgctcaagggagccaggtcatgagaattcagaattttagacgcttagatttggctgcagccgaatttgggttccttccaccctggagaggtcagggatccctgagggttctgctccctagctgcgattggaaggtgaacagcctcagggtgaaggcctaacagatacgaatttgtgggggaaagagggaagagagtccagggagaaagaggaggcccccagactcgtccccagtcgcccctcctcgctgctgatactcgcctgtcccttcccacccagtaaatgctctagggaaggccgcgcgcctatggcagagctttgtctgtaaggaggctttttcccattccagagtttaaaacggagaggagagcggttgggggacgctacaaacaagagagacacagtcgggctcagggtgaagatagacagcgcaatgccttgggccgcaagagaaaagcgaactcccagacggcagatgtttgcttggggcggtcaccctggccccccgacgcccgtccggcctagagaggacggcaattgagcgccagggaggtcaaggcggtgtcctgggagcccaatatcggctttgaaaagtgccgagtgagtctgaacgtgagcctcgaggcctcgcctccagggagcgaggtcctcgggttggtggaaggggcgcacgccacccagatggcattcacaggcctggcatcccaataagctagaacttcggccaacactaaagggtcaaaggaggagctgcaggaagaggatagcggacttagaaaattggtaacttaaaaaaagaaagaaagaaaaggaaaattggctctggtgcgtgcccgctgcccccacccccgcctgcccctctggaatccagtccgggctttgcgccgcgcccacaggccgacgcagcccggcctctggcgagagccaatcagagggcgcctctcagcacgtggaggagagagactccagagctcagcgcccgctgctcactacacttgttaccgcttgtcctgagcgcggagagggcgagctcgggccgcgggcagggcgggagccggcagccggcaaccaagggaggcagaaaggcacaaagatcgcaataatatccgttataacccgctatctaaccccacccccaacacacacccatccatcccaccctccgggagaggcagccggcgatccgctctctgcgccctgggaaaaagccccagccatgagcaatcagtaccaggaggagggctgctccgagaggcccgagtgcaaaagtaaatctccaactttgctctcctcctactgcatcgacagcatcctgggccggaggagcccgtgcaaaatgcggttgctgggagccgcgcagagcttgcctgctccgctgaccagccgcgccgacccggaaaaggccgtgcaaggtaa

SEQ ID NO: 43570 - DNA, 2300 bp, Homo sapien
aatctagccacatgaaacaaacaactaattagaaaatgtaacaatggggtgggggttgggggaggcagggcatcaagaagatgaatgctggctaatggatgctgggcttaatacctatgtgatgggatgatctgggaagcaaaccaccatggcatatgtttacctatgtgacacgtgtttacctatgtgacacaaaccaccatggcacatgtttacatatgtgacaaacctgcacacgtaccccagaacttaaaagttgaagaaaaaaagagaaaatgtaataacaatcccattatgtgggcaaaggacatgaacaaacacttttcaaaagaagatatacatatggccacaagcatatgaaaaaaagctcaacatcattgatcattgatgagaaacgcaaatcaaaaccacagtgaaataccatctcacaacaaataactaattagaaaatgtaacaatgtaaaaaatagaatgactattaccaaaaagtcaagaaaataacagatgctggagaggttgtggagaaaaaggaatgcttacacactgttggtgggagtatgaattagtttaaccagtgtggaaagcagtgtggtgattcctcaaagagctgaaaacaaaactaccattccacccagcaatcctatgactgggtagatacccaaaggaatataaattattctatcataaaggtacattcacacatgtgttcattgtattactattcaagagagcaaaggcatagactcaaccaaaatgtccatcaatggtagactggctaacaaaaacgtgacacatatacatcatggaatactatgcagccataaaagaagatcatgcccttttcaagaacatggatggaactggaggccattattcttagcaaactaaaataaaaacagaaaaccaaataccacatgttctcacttataagtgggagctaaatgatgggaacacatggacacatatagcggaacaatggatactggggccttttagaaggtggagggtgggaggaaggagagggtcaggaaaaataactaataggtgctagacttaatacaaggctgataaaataatctgtacaacaaacccccatgacacgagtttacctatataacaaacctacacatatactcctgtacttaaaataaaggttaaagaaaaagaagcctcaaggaatcttgtaaaaacatttgtgctacctcaagactttaagtcatgaaattcactgtgaactggattaggatcttacgcgaggggcataagtaaagcttttcagaaattcaaagctgactcagccagtgtagtagaaacaaaacaaacataatatacaaagcattaaattgaaagtaatggttccaaataaggaaagatcctagctacttaagattttctctgagaagttcttttctggattacttttagtgcctgaatgaaagatcctttgatgtttctgtcatcctcatttttctcctaatgtaccatcctgaaaatctatttcaataaatttgagagggctttaaaaataaaaaaaaatggaatgaaaaatataccattcaaaagagcagcaacattcaaaatatacctaaaaagaacattcacaaaaacatacacactctatcaaagcaaatataaaaatgtgttgatagacttaggtggatgcctaagtacagcaatacaatatgtttatatatggtgaacataatattgtacagatgtcaattatctttatttacagatttagtgccttatttgatggcctcaagtcagcagagaagtggcccagcacctacaaaaagtcaagataagacactgagtgaggactgagggcattacctacccaagaagagggacccccacagagccccgcccctactgtcaatcttgggagtccccaggcgtggctgctgggctcaggttccaccttacttcctactctggactcagggaaatgatcctttttctgaggctgactgattcagcttagcaaagagagaagtcccagtgcctgcaaagtcaatgaaagaaatatatgtatttctttaagaactgcccctcccccgaacgcagaaccatttgccgttaagctgggagagcaaagtgggcgtggccggacatgtttctcttgacctatcttccacatcatcaagctgttacgggcgaaaccttggtctgaaacatgcggccagagaaataaatctcaggatccggcaggtgtcaaagtgagtatcatttgttatgaccttcaagacacactcttcccagaacagaggctgcctcacagagacccatccttctct

SEQ ID NO: 43571 - DNA, 2300 bp, Homo sapien
ccaagaaatgcaaagatgataccatattagaaaataccatcaattggaaatcactatgttaccaaaaatggtgaaaaagcatgtgatcatgtgcaggggtaaaggagaagccttaaaaaaccctcaataccagtgtatgatagtaacttttagcaaacttacattaggagagaatttccatcttgtaaaatctataattgacatactaaatgtgaaacattacaaacatcccgaatagagtccagaagaatatacacctgtatagtataaaccctactgctgacaactggatgaaaatacatctatagttcacaactataataataataccgagtaaattagaggtaacaataacaaaaggagataattgtgataatataatctcctaatttaaaaataaaacaacgtaattggtgcaaaaatatttaaatgtataaggaaataaagaaaacgtgtgtacaaaagatcaccataggtaagtcaggagtatagtcacacaaaatcaataactaattataatatgtaatgtgaaatatgcctttcacaacagcaacaatatccaaaatatatctaacagaaaaccaaatagaaatgtacatgttcattaaggagacagctataaaaatttactgaaagacttaggaaaaataaatctccaataaagcagtgtactatgtttatttactgtggaggagatattgtaaagttattgattctccttaaattttttacagattcattgccttagccatagctgtgaagatgacaaccaaacccgggtggttctttcccatgaccaaactcaaccatagaaaagttaaaggaagaatttttttttaaaaaaaaagcagtattaacaacagcaaaacaacaaaaatgcgaaccttgagagatggtcagtttgtattgaacaagaatgggtgtgtgggcaggtaggggcatgagctgaagtagagacaggtctgtggcctacaacagacgcagataacggaattggctagaggaaaagctttaaaactttggtctttgcttctttcactgtgccattggacaatgcatttttttttctgcttcactaaaggaaattcagtcagaaacttggaccctatgtgccagttccatggggtaatattgccacagcaaaaacatctgggtaggctgaagaagtatgaatccagacactgtgctaataactacctgaaacttctttagtggaagtggactggcctttaaattcgtattattttaatataatataaagaatggactaaattaggatagcaaatattgcagtgagtcacacaagataatggtagaaattcattcatgaaggtgttgaatacagacactgatgtcagccaagagagaagtcccagacatagctatcaggctaagaagtcttctcactttctccttatgaattttacaggatctagtcagaggaaggggatgaatttacatcagaaaatggagaaaactgagaccctgccagcagtcaatgtgaggaccctgagtgaggactgaggggctccacatatcagaagagacaagagtgccccccaaatctcccttcattccccgatcttgcatcacaacttaatagcagcagccaggtttaggaggccccaggcagtagtggccaggtgaggtgtaactgaattgcacatgaggagtctcaggaagttgaagtctagtctgagagggtgtcctcaagtcagtagaggggacatggcaagaatgaagcgacgacactgagtgagggctgagggcaaagtccattccaaaaagggggtctcacagagctccacccctactgtcagtcttggaaggtcccggcatggctcccgagctcaggctgcaccttacttccaactctggactctcagggaatgagagcctctatctccggttgactgattcagctcaacagatagagaagtccaagggtccgcgaagagcccctgaaagaactttacgtgagttccctggaatctgctgcacccacagaacacaagggggagtaacagagccctgcagctactgttacgcagggagcgccaggtgggcgtggccggaagtggttcctcttgacttccacctaataaaggggtctgagccggtcgcctgagcctgaaaagtgctgtcacgtcagcggaaggaggcgtcccagatcttctcagctgtcttggtgggtatcctgacctagaacggggggcattccccgacaacttcaacccccttcccccgaagaaaggcggctccacagagccctgccccaacctgccccgacctggtccctg

SEQ ID NO: 43572 - DNA, 2300 bp, Homo sapien
tgatcttttcaatgtgttgttgaatttggtctgataccattttgttgaagatttttgcatctatgttcatcagtaacattggcctataattttcttttttttgtcatgtacttgtctggttttggtgtcagggtattgctggcttcatgcaatgtgtttggaagtattttctcctcttcagtttttggaagagtttgaatagaattggtattactttttctttgaatgtttgataggattcagcagggaagccatcaggtcctgggcttttctttgttgagagactttttattatggtttgatcttgttactcattatgggtttgttgaaatattttatttcttcattattcaatcatggtaggttacatgtgtccaggaatttattcatttcttttatttttttccaatttgttgggatatagttgttccttatagtttctggtgattctttgtatttctgtgatatcagttgtaatctctcctgttcattactgagagtgggctgttgaagttccctactgttactgtattgtggtctatctctccctttaaatccattaatgtttgctttatataggtactcaagagtcaggtgcataaatattaataattattacatcttcttgctgaattgacccctttgacattatatagtgacctttgtctctttttacagtttttgatttgtagtctattttattagatataagtatagctactcctgctttttttgggggggtttccctttgcatggaatatcttttcccatcccttcacttttcagtctatgtgtctttatagattaagtggctttcttgtaggtagcatatggtttgggtcttgtttcattattcatgcagctgctttatactttttaattggagaattgagtccatttacattcactgttattattgatcagtaagtacttactactgccattttgtttcttgctttctggttgttttataactcatttctttcttactgtatgctttcatggttaaatgattttctctagtagtatgtttgaacttgttactttgtgtttttagtgaatctactataggtttttgcattctggttaccatgagacttacagaaaacatcttatggatataacaagttattttaagatatgacaacttatcttagtttaccaaaaaacaaaaagtagaaacaaagaaaaaaattttttaaatgtctacatattccaagaaaaaaattcaacatgtttttcaggggcttttggcagaaataagttcctattgctcacaatagtggtcatcattactcactctgatatcaattttttttttctctctttcttttacctcttcctactccctcacttctccttcttggctacatatcccaagtacactccctatactaaatctttaagtccctgcttttggggaaaacaaaaatgaggtagatttttttctaagtaatcattttatttcactagagaaacactgagtcatagtaagttgctgagagtcactttggaaccctgggtgtacctaagaatatttcatacttaggcagaaagttaaatgacttgctcatctttttacaccttgatagagctagtgaggaataaattaaggccaagaactcaggtcatcagattttaagtctagttcactgttttctttgtgtggtatatttctgtgcattgttttattcacctttcagattaagcatcctatagttagaaaaatggtatttgaaaaatttgacattaagttattcaagaattgataaagttataaataattttatgtcattttaaaattgatgttacactaaaattgttatacagagtctaaatactttgcatagagaagttgtaaataagtctgtctgaaccaaacctttctggatgaatgtagtatttattcagttcagttatcacttgtagttttaaaatttttgaatcactgtcagtatagggaatctgggtaatctttactaagttcactatttggctcatccagtcagtatggtggcctaattaacatgaaaatgtaatttagccctttaaaatgtctacttgactttagtgttagaagcagggaggagccaagatggccgaataggaacagctccggtctacagctcccagcgtgagcgacgcagaagacgggtgatttctgcatttccatctgaggtaccgggttcatctcactagggagtgccagacagtgggcgcaggccagtgtgtgtgcgcactgtgcgcgagccgaagcagggcgaggcattgcctcacctgggaagcgcaaggggtcaggg

SEQ ID NO: 43573 - DNA, 2300 bp, Homo sapien
tgaattcgatcagcttgaatcagtgactctaaaatatgttgaatctataatccataaaagtctcataccattccagttgtttatgtattcattaatacctctcaacaattttatatagattgctgtgtacagatcttgcacatcttttattaaacatatactttgaaatttgatgttttttgatgccattttgaaaggtatattttttagctatgtaattttaaaaattgcttgtgatatctagaattacacttgatgtttttcttgagcttatatccagtagtcatcttgctaaattaagtaattaattctaatatactatctatagatttcttttagatagtataaataaagaatcttgtaatctgtaaacaatagcagtgtctttgttgtgttctttttcttgcattattgctctggctagggcatccataaaatgttgagtaaaactggtgataatggaaacctttgtcttgttcctgatctcaaggggacaagttttcaatatttcaccacaagttgtcatatttacttcagttttctgagtttttaaaagaattataaatgtgcagtaaattttttccagtggcatttctgcatattttgggataatcatatgatataattcctctgttctgttaactttatttgctttacaaatggtatgaaacatgaatttattcttggatgaaactcagtttgttcctgtgtattacagtaaatatatctcgggttcagtttgttagacatacttttttcttcttattttgcatttggtgatgaaagacaaaccttttattttcttttcctataacatcttgtcagtttggtataaagttcgtatgaatctcattaaacatttgttcgggaatatttttactgtttctattttctagagaattttgtacaagattggtgttgtttctttctcaattgtatgaaaaggttcacaacttcctgtactaaggtataaaattcatttacaggaaggtttctcattacagacacaatttatttaatacatatattgctatccagatttcctaagttttcttgttttgttgtgttttcctttaaattttaccattttctctcatttcaaatttattggatacaattgcttgtaattttatgtctatgtttctagaatgtgtaatgatgaccgttttactccttgtaagaatactgtgtgcctcctctttttgtctatatcaatcttgctaggtgtttatcaattttactaacaattttaaaagaggcaacttttggttttgttgatattctctttgtatttttaaaaaatcattagattttgattttaatgattttttaaatttcttcattttacattaccatttttccacattcttgtgatgagtaatcagagcctacatttttccagaattttctcctttgcatttaatggagtaacttttctttagatgcgtgttgaggtgcatctcacacatttgaaaacagatttaacaaagtataattgacaaacaataaactgctcaactttaaaatgtgtaatgtgatacaatttgtcatatgcatatattcatgaaattatcaacacaatcaatacaatgaacataacagttacttgccaaaattttactatgaaattgtgtgatcacccctcctgactctttttaaattcagtttcattattaatatactttgtttcaaagttgatcatcttttcatttttttttcctgtttttcctatctcttgtttttccctttctctatttgtacctacttttgtgtttattgaatgtttcttattattccatttaaattcctcttttggatttttatctgtggcactttgaaaacacatccacatattctttgacacatcttccttcaaaggattgagtttatagcccctacctggattttggaccaagcttagtaatgcttttgtaaccaatacactgagacagttgcgatactacataaattcccaggctgaaattccaaccaactgacattactatcttccaccagcagagggagccaccctggccctgcatcccagtgctcttctggcattccagatattctcagtttccatcgcacgccacttccctcagcctgtagaacttccggcagcaactgcaattaggggtagtccagtgctaaattgtcgcaggtgggcttatgtggacacgtcttattttattcccagtttggaaaggaaaattttgctacatttagaattctattgactttttttttttttgtctttcagccttgaaaatattctgcttcgttatttcgggcactccaca

SEQ ID NO: 43574 - DNA, 2300 bp, Homo sapien
agttttcctctggcccagtccttacctacgaatgacgagtgtccttatggagtgggaaaatttggggaaatgttttccccattgtgctaaaagatagagctttaggatgagctaaacagaccagaggagttaaccaactccttcttaaaacaatcctccccaaaggatgtctaagtgaatgatacagattcatgccaagccttattgggaagattgaataccatttctctgatttttgctaatggtctataggccacttgctcctgcttcttttttggaccagccttttcttgacatagaatgtgaaataggaactttgtcaggacacaggtgattacagtctcttttatcaaagttcctaagtttccattcccaaatacctgatgagagaaaatgtttcagagaaacaaaaccctttataaaaaaatcatattctaatttctaggcttccatttgtaagctgggtggcagctccttttaacaagtatagtaatggttacataggcacaatcttttggggcagaattctggggaaatcacaagattcctgccagagcgacgcttttctagacaatggagaacagtccaagagactcgctttttttttttttttttttttttttttgagactaagtcctactcttgttgcccaggctggagtataatggtgcgatctcggctcattgcatcctctgcctcctgggttcaaagcattctcctgcctcagcctctcgagtggctgggattatgggcacctgccaccacgcccagctaatttttgtatttttagtagagacagggttttacctctttatccaggctcgtctcgacctcctgacctcatgtgatccacccgcctcggcgtcccaaagtgctgtgctgagattacaggtctgagcgcaccgcgcctggcctgagactcgctttttaagagacagtaggggatggggtgttggggggcaatggagagaagattcagtgtgcttgaggtgggggaaagtgagaggtaacagggcctccagagggaataggagggaaccctgccgccctctggcctctccagagccttggctccgcccctctagccactattgattggcagtcttctatcaggggtgccctctcggccaccatcgttttcaaaataacagcggcttccatgctgtaccggaagcagtgccgtggagaacagacctgacggggcgaggccagaggacgctatggcaggcctgaggtacagtgtaaaagtctatgtcctgaacgaagacgaggaatggaacaatctaggcaccggtcaggtctcatccacctatgacgagcagttccagggcatgtcgctgcttgttcggtcagattcagatgggtcggtcatcctgcggtcacagatacctccagacaggccctatgggaaataccaagagacactaattgtttggtatgaagctgagaaccagggtttggtgctaaaattccaggacccagccggctgccaggatatttggaaagaaatttgccaagctcaaggtaaggatccgtctatccaaaccacagtgaacatttcagatgaaccagaggaagactttaatgaaatgtcagtaattagtaatatggttgtgctgcctgactgtgaactcaatacacttgatcaaattgctgacatagttacctcagttttctcgtcacctgttacggatagggaaagactggctgagatcttgaaaaatgaggcttatattccaaaactactgcaactgttccacacttgtgaaaatctagagaatactgaaggtttacaccatttgtatgaaattattaagggaattttgttcctcaacgaggcatgtctgtttgagataatgttttctgacgagtgtatcatggatgtggtgggatgccttgagtatgaccctgctttggatcagccaaaaaggcatagggacttcttgaccaacgatgcgaagttcaaggaagttataccaataactaactctgaacttaggcaaaaaatacatcagacatacagattacagtacatttatgacattcttttgcctgtgccttccatatttgaagataattttctttctacacttacaacttttattttctccaacaaggctgagatagtaagcatgctgcagaaagatcacaaatttttgtatgaagtttttgcacagttaaaggatgagactacacatgatgatagacggtgtgaattgctattttttttcaaggagttatgttcattttctcaggcattacagcctcaaagcaaggatgcactatttgaaacgttgata

SEQ ID NO: 43575 - DNA, 2300 bp, Homo sapien
ttcctggcattgacttaaattttcccatgaaataattgtcattttgtattcaattccccaagtgccttagctgtactgtcataagtaatattcttgaactatactctactgtaggccacattgcaaaagaggtgtgtggaaatttttcttttctacttgagaattatcacatatctccagtgctatgtaaaatgaagtgattgctacaaatgggactcttcaagtccaaatgtgcttgatgtgccccaattcttgctttcccttgcaataacagggttaatgttttggaaaaatatattttaaaagaaaactgcaaaacttgctgctacatcaaaaatcaacttggctactattaaaattatatttaacagagttgccatatccaagcttctatttttcagttggctatacacagatgtggatctaaaggaggaagtgcgtgacttccatcttgtcttgataattttatgttgattacaaattatatagatggaagaaatgtgaaataaagtgtaatgacggccaagaaaagaaggggatagcatagttcaatggctgagaaaaccaattttggaagcagaaagacatgttgaacacagagttcctcaacttattagtgtgtgacctttggcaatttatttaacttctctaagtttatttcctgatcctaaaaagattactaatacttctatatcattggatcattatgtaaactaagtaagaaagtaactccaacattcttgtcagtgtcttgaacataataagcattcaagtattattagacttgatcagttatgttattacctttcttcataataataagtaatcaagtattattagttgttgtggttattattatcattattaagaaaagaaaataattgatctgtgatggccaatactttctcggctaatttcaactcacagttttcctctggcccagtccttacctacgaatgacgagtgtccttatggagtgggaaaatttggggaaatgttttccccattgtgctaaaagatagagctttaggatgagctaaacagaccagaggagttaaccaactccttcttaaaacaatcctccccaaaggatgtctaagtgaatgatacagattcatgccaagccttattgggaagattgaataccatttctctgatttttgctaatggtctataggccacttgctcctgcttcttttttggaccagccttttcttgacatagaatgtgaaataggaactttgtcaggacacaggtgattacagtctcttttatcaaagttcctaagtttccattcccaaatacctgatgagagaaaatgtttcagagaaacaaaaccctttataaaaaaatcatattctaatttctaggcttccatttgtaagctgggtggcagctccttttaacaagtatagtaatggttacataggcacaatcttttggggcagaattctggggaaatcacaagattcctgccagagcgacgcttttctagacaatggagaacagtccaagagactcgctttttttttttttttttttttttttttgagactaagtcctactcttgttgcccaggctggagtataatggtgcgatctcggctcattgcatcctctgcctcctgggttcaaagcattctcctgcctcagcctctcgagtggctgggattatgggcacctgccaccacgcccagctaatttttgtatttttagtagagacagggttttacctctttatccaggctcgtctcgacctcctgacctcatgtgatccacccgcctcggcgtcccaaagtgctgtgctgagattacaggtctgagcgcaccgcgcctggcctgagactcgctttttaagagacagtaggggatggggtgttggggggcaatggagagaagattcagtgtgcttgaggtgggggaaagtgagaggtaacagggcctccagagggaataggagggaaccctgccgccctctggcctctccagagccttggctccgcccctctagccactattgattggcagtcttctatcaggggtgccctctcggccaccatcgttttcaaaataacagcggcttccatgctgtaccggaagcagtgccgtggagaacagacctgacggggcgaggccagaggacgctatggcaggcctgaggtacagtgtaaaagtctatgtcctgaacgaagacgaggaatggaacaatctaggcaccggtcaggtctcatccacctatgacgagcagttccagggcatgtcgctgcttgttcggtcagattcagatgggtcggtcatcct

SEQ ID NO: 43576 - DNA, 2300 bp, Homo sapien
ctgcaaaggacacgatttctatcttttttgtggctgcatagtatttcatggtgtgtacgtaccactttattaaatctactgctgatggacatctaggttccctccatgtctttgttactgtgaatagtaatgcaatgaacatagggtgcaggtagaacaatttattttcttttgcgtatgtacccagtaatgagattgcttggttgaatggcagttctgttttaagctctttgaggaatctccaaactgttttccacagtggctgaactaatttacattcctataaacaatgtataaaccttcccttttatctgcagcctcaccagcatatgttgtttttttactttttaacagtagccattctgacaggtgtgagaccagtagaaaaaggcattatgagaagtactattttaaactacctgaaagagcaacttacacaccaatgcatataaactatgatttgtggaagtaagtggagatggggaagaggagttcattgaattcatccctccccaccaaccagcttctaagacaatataacctgttattcccatttacacacaccgagaatgagtttattgaaataacttatagaaatgacttaagtaatataaaacacatcacacattttatctgtatgttgaatatcaaaattgagattcctagaaaattcttattttcaaaagtatatacccagattacttgtaagcattggaaagacaatggctaatcactcacattttggaaatgaaagaaattacctcaatcaggacaagttcttagtgtcactcatttagtggtagagatccatgatagagaatgcaattctcagaccaaagattatggttggttccttaactatgccttgaatatactaaacaacttcccatttatcagctggagaacttacaatgttatagagtggtcatgggcttaagaaaatgtttacagagaggttatatattgtattagaaagctgtttatcaggccatgaatgtgctatccacagagaaactatgttttgtggatatgggaaggaaaggagtaaataaggcaaatgcattgcaagaaagaatttggagaataaatgtagcaagcacttaccatgtaggcccagccttggatatggtgaaatgaatattattttgaattaattaaatttatttgctacataccatatttaatcagcttcatagcttcataccatcttatatatttttctggaaattttatatcctgtggggaaacatgaaagatcaatttaccaaacagaaagaaattatcaagtcactatgtctagaaacattttatttgaattttatcttcccatgatttgcacataaaaaaggaaggaagaagattgattttgcaagttttccaaaaaactaaacttggctctaagtaatgttggatttgacagaaatgaaagtattttaatcaaaatgtcatatattaaaagaataaaccatgtgtgtaaattcaaaactttgattcttactcctttccccctttcaattaaattgaacctgtagagcacataaaggacaaactaagcaaagttgctcctgaactgatgatattaccatatctaccattagtaatatttctttaacatttatattctgcctcttcactttccagactgaatcactgtaaaaataggtgtgaactgcatggacatgagcagtgcttttcttgaaagcaatgattagttaaagaaatccagaaatcaatatctttctcaaaagcaactggtagaagacaaatcccaaacaattactggaatccaagaagaaaatgaattaatttaggttttttttctacaagtactagaaactgtaaggtcctattatcaaaattagattaggatggaactagagagccacaactttagccacaaactttcaaaatatcctgcctctggaccatggagcgcttgataaaatggtgcatttggatactttacttgcttacagcgtgggaaagactcacgtaaactgcaataagaaccatgagagatagttttgttctgtggagtcgcaaaagctgaacatcctccccacaaggttatttagaagacgtcttgcactgttcaaatgcagaggaaggcgaatgactcgagtctatggtatgtaatcaatattttgatttcaacaatgattttgggagtggggttaatttttaattgcagagatctttctagtatgaagacaactggattcatccctctgtgattgaaagttaccttaaataatactgagcggaaatagtcttgtttcttaattttacagaaaatttta

SEQ ID NO: 43577 - DNA, 2300 bp, Homo sapien
gggttcaagaaaaaacacacttaaatgatgtcagtgggtaaatgtgaaaataactgaacagttaattacatgaaggagttaattttataaggtggggtagtgttatcagttaatatttctgtctttaaaaacacatactgaaatatttaaagatgaaatgatgtgatgcctaggatttgtttcacattattccactggcagacatggtgttatgtgtgagtatagacgaagccaggttggccatgtgttgatgattctgagttccaggtatattctctctacagtagaatatatttgagaatttctacaataaaaagaatatatataatcattaaatttgaaaccccaaatgaaaacagaccattatttaggaaaatatgaatggcccaattaatccaaatagaaataaaaatctgtaattgcgaaacgcaaaatgaaactgatcaaagctccagccaccctcaaatgttttgggaccaggcattttgggaccagttctaccaaataagcagtgaaaagctgaccatcttatgtaaacacaaaaataaccaccatcttatgatgttcaactcactttcccaggctagctttctttgattaaaaaaacaaaaaacaaaaaaacaaaacaaaacaaaaagaacagctgaggataacctaggtgcggggaggggaacaactgagccaagttcacccacacagaggcaaagatcctcaataaacacatagcaggtccaatattgcagttaattcaatggaaaaaaagtctgtatccatgaaatgtaaagataatacaacattagaaaaaaattgcctaaaatattctcacactaacagattagattattattattattattatttgagatgggtcttgctctggcgcccagactggagcaacctcgacctgcttggactcaaaagatccttgggcctcagcctccagagtggctcagactacaggcgtgcgccaccgtgcccgtctaattttttttttaattttttatagcgaccgactcccactatgttgcggactggtgtcgatctcttgggctccagcaatcgtcatgtgtcagcctcccgagtagctgcgctcggccattacatttttttaaatgggcattcgatcatgtactgaggtacagaaaaatttttcaacaaaaaattcaacacaaatgcttgataacattccacaaactaacatcagaagataactttcatttcctaaaacctatggcaaacaaacttaaatgtgaaatgctgaacgctcgacgcattctcattaaagcaaggaaccagacataaatgtatgctgaatacatggccagaggataagactataaaaacaaatgtaacttggaaatatttaatagaaatagaaattatttggtgaaaatgtgatcatcattttagaaaatccaaaggaaaagaccacacccaatccaaatcaataaatgacttctgaaaagcggtgtataaatcactgtagcaaaatcaaaagccttgccacacaaagcagtagtaatagaacatgcatataatatatttggtggaacaaataagaccataattaaaatgaatttcactgcacaatacaatgcaatgttagataaagtcaagagatctgggtctcacaaaattgtgtacatctatggcttctctatagaaagtagatcttttagaacagaaagttcgcaatgtctacatttcgccagtgaagagaccccatagttataatgcacttactccaacatctcagaatctgtcttgggcaccctacctttgtgctgcggcctctcttctcccatcaagcctggaacgcaaacccattatccgtaacggtttatgttgcaaaactgtccagagcttattgtttggtgattatttctctaaggagcctgtaatcaatgaattaggagccaaaatatggatctacttccgagaggacttaatattactattactccataacaaagagggcgccacagaaagtcacgccacgccgcccttgctggcagcccttcgggccgtgggcaggatgcccggatgtcacgtacacttccgcttctgccgtccgtgggaggtgaggccttgcagtgaggcgattggtatctggtcagcagagaaaggcatccaggccccgccaggaggtaaggcaaagacactgaatagcatttgaggggacccactaccacaaaagaaagaacgccatgccgtccggcctcggccttaagccgcaaaagccccgggcagggatcctcttaggtatcgcactctgcattattcttctggagagtcaggga

SEQ ID NO: 43578 - DNA, 2300 bp, Homo sapien
aattaaacgagctggctcagtaataataaacatcacttcctctcacaagggagcaggtaaatctggtcacacggtcccatccaaccatataaagacctgaaagtacaggcctaccatatacatcgatgggagaaaaactagaaatatttgtcaaatagcacaagaaccagtagtacttgacaaatcgtcccacttaatgatcactgaatatttggatcacctcagttctctcatacaaagcatatctaattgatgaaggtggctacactaaacaactgattttcactgtagaacaaacagccttctattggaggtagatgccatgcaggacttccataactggagatgagaaattaatgcctggcttcacagcttcaaaggccagcctggctctcttgatgggggttaatatagctagtaactttaacttgaagccaatgctcatttaccatctggaaaatcttagggcctgtaagaaccatgctaaaactactatgtgctctaaaaaaggaacaacaggccgggcgcggtggctcacactgtaatcccagcactttgggaggccaaggtgggcgtgatcattacctgagtttgggagttcgagaccagcctgaccaacatggagaaaccctgtctctactaaaaatacaaaattagctgggtgtggtggcacatgcctgtagtcccagttactcaggaggctgaggcaggagaatcgcttgaacccaggaggcagaggtggcagtgagccgagatcatgccactgcactccagcctgggcaacaagagggaaactccatctcaaaaaaaaaaaaaaaaaagcctgggtgacagaacatctgtttacagcatagtttgctgaatatttttaatcccctgttgagttctactgttcagaaaaggagattcctttcaaaatgttactgatcattaacattggtcctggtcacccaagagctctgatgatgcacaaggagattaatgttttcacatctgctaacacatcattcatcggtagaccttgggtcaaggactcttttagactttcgagtcttattatttaagactgtcagtctctgcacttcaccattgtgccccagattattcattcaactggcatgaagaggggtatggcgactgtgggatttgaaccatcatttaacaagatataggaagtgaatagcatttgctcaccatgactttagttttagtttcaccttccaaattaggcttctatacacttcttaaagttttatttaagttgtactttcatcagcatacacagtagtaacaaagccctttctaatagtcgctgtattagctaccttgtggctgttaatgttcatgctcctgcaagatcctttcaaatccctttttgtactatctacttccctttcccttccaagcatcagtactaatgcacagctctttagtcttcaagctgctgaaggagcttttgcccacaggtgaagagattttaaagcatctgggacatctgggagttgatatgctcatccctcccagggtggcctttaatcaaggactgaacagtgtaggagtatgaaagttcactcccttgcctggtgtaaggataactcagacgtaacttactctccagagttccccaggaggatcgtgctgaagctatcctctgaggggtgttcacctgagatttcactcttccttggcgtccgctgtcttcccttagatcattttcttaaattaatcaaagatacatcctcatctcagagcctatgtctaacttaagatacacctatagtagagacctcactgtcatgccaaaatgttgccgtctggtggcaagactatcagagttctttgcattcacttcgtgacctttcaaataaaagcattttccaaagtgtggcaactttcgatcttgaaaaaaaccacagctactcacagtgtaagatgcccgtgggggtgtggctctgggcctggaaaaattagagcagtcgacactgagaggaggcgagcagataagaagtcttctgaacctcactggctcccatactgacgtcagcattggtggattagtttgtcgcccccttcagccaatcggattggtgtctctttgctgcttacctactgccttctccgaccgtccgtcctcggggcaggcgtgctctcttccctgagcttttaggggttggcttttccagttccagatcagctacagcaaacatcgttcgagatgtcccaccaagagggcagcacaggtggcttaccagacttagtgactgaaagcctgttcagcagcccagaggagcagtctggag

SEQ ID NO: 43579 - DNA, 2300 bp, Homo sapien
ttgaggtctattcacattcaactgggtcaactagaggactgtgatggaaggtatagaaaatctagatcactcacgttgaaaggaggggaatatatttcctcttcacttctaatcttcagtttaggctgaattatagcatgtggggaagaagcagagggaagaaaaacactggcacagaagatgtgaacatgggtgagttagcttcaaagaaaccttgtaagacttgcctaccgactttaaccacattttccctctgcttaggttggaaatttcagtgtactgctccttttttcgaaatacagttttacctccctgtctagtctccctgcctgctgttattctcacctgcgcgcttagtttgtattcgtttagctcacattttacctaatttttaaagtgttttctttatcttgatgcgtgttttactccccaaattaaaacagttctgaagggccaaggctactttacctatttattctatttttggtttatccggttaagcctgccattacaaaagcttgtgggatacattacaaaatgggttaaggtttttaagtacatgggctgccggtgttgaatgggaaaggttgcagggtggggagagggagagaagtaactagaaaagcggctcgctgccttttaatcatccagcctactcagctgccggaaactgacactgttgctgcagtgtaaacattaacattttttaagggtcttgctactccaaatgtggtccacagcccagcaacattattatgggccacgggcgagcttattagaaacgcagggtctcaggcctcactccagatgtaccgaatccgaatctgcattttaacaagacacccaggtgacggtgtgtacatcaaagtttgagaatcacggaatcacatgtgagtgttatactatcccaatgtaaatggtcaaggaccttaaattgagcaaataacctaatgtatttacccgtacctactttgaccctctttcttcatcacaaattcatctcagaaaccagcagcgaactcttttgcagggaactcaattacgcggtggatgggaggaggatcctcttcaataccctcccctccgctcctcctcccactccccacccccaccccgcactcccagagagccttccacaggcacccttctcccaagccccactcacttagggaagattttgctcctcccccaaactgaaagcgcggctgtgaggagggttactgcttgaaggactcacagtttgcatatcaatacagacagaggcacttttgcaaaactgccctttagaaacaattatcatcttagcacctgaggtttgtttggagcagcccccgcaccccttctctcttgtaatccatcttaaagtgatacggagaatgggggcgttggggagacagtgatgggggtgggagggtcgcgcgcaataataaatctgcttcaaagagaagagatgaaaaggaggttatcaagagtgtgtcggcttaggcatcactctctgtatctttctgcttcctagagaaatggaaccataattctaaggtggctaaggcaagactgtataagcatccaaatttgccagtctgcttttgcctggaagaacagatttccgttatttgaagcctcccagggtcctttccaaaagattcccaggctaccttccttccacttcggtcttctgagaactcaaactcgcaaagcggtggctgtctgtggattggctagtactaaaatatccattgggtggcagtaatactatcctctttatgacttgcagcaaaccagagaatgcattcaatcaaatgaaccgatcttgtagaaacactggaatcatttatgcgttgcagtttctctttcttgttttcgctccttcttccctgggatattttgagtggattgtggctattaatcaagatctcgtgctattcgtgttttgcttgtggttttcgctcaggattagcatcattcaaggcaaacgcaaagctgcttttcccacccccccccccgactcttttttgaaaaatcatttttgggggctgctgaggagagctaggacccaggagacaccttcccaaacagcaggggttgtgtgctttcacatagcagtactgtacaaggaaaaccccgtcggatctgttattgcgggatacttgtgaaatatacataggattctttcttatggctgcatcccggatctggaaattttacttggggaccaggaggatttgaaaggctgcatgtactcagaagatttgcaagcaacactccaattcttgtcatagagctcgcagacttctcactta

SEQ ID NO: 43580 - DNA, 2300 bp, Homo sapien
taagaagattgaatggtatcaaactgtgcaggctgtgccaaaacaacctattttaagtgcattggctataaagaatccaagggggaagccatgtttaattgcatatgagtagtaatttagagtaaattcacactatatactgccagtgatgtttatttttcttttaaattagatatcaccttcatcaccaggagatattaaattgggtatcaagaaaatagactacacaagggatgagcatgtaataaacaaaacatccttttattttcaaaatcaggtctaaactatttccatcttaattcactgaagcataatttgcaaaaattcaaattaaacaaaatgactaatattgaatcactgtgcccccaaaacatagcataaactttaacttctttattctctctcctcttctcctaaacttgttcttattttataaggtatcccaggctcaccacataatacgtgcagtacaaactagaggcgaaaagtaataactaacctagcaaatggatagcaacatattcctaaatgtaccctcttacatagggtagtccccctaatggagagaaagcaagcttgtagcagtcatgcttataattcagctatcttgacaatcaatactcctactgcaatggaactaactgtcagtgattcagctggaatatattttcatctttaaatttcacaaggaccatatatattgtccttaaagctatgaaatatatattctaatattttgtgtcttggatatatatctttctaaaacactatgaaaatatgaagtgatacaaaagtctagcagatctgggagttcatattgccttacataaaggatgttatccctctaatcatataattgctctaattgccctgagatctaatcactattatgtaatgccattatcctcatggatttggctcaccaaactagctgatgaggttgaatgtcattggattcatcaataaaaacagtctcctttacattcaagcaaatctatggaaggatgattgcatggatttggctattttgcctgctcaggaattcagtgacagatatttccctggcccttttcctaagacctgagaatatgatgctgactttccttcagactcacaaatgaaaatctttcctatgggaatgtctaggttaacgggagctttagagaaactagatgaacttagagagcctttgccataatatggtctgaggaaacttctaagtcaacaataagagaacaatatttctattttggaaaaggaactatttaatgtcaagatttagcaataatgaaatctgtgcaaaagccttgtgagacagggtggaagatatgatttccattttaagagtgagaaaactgaagttatgaatgttgtgaatatgaacacaatcacatagatagtgagtaggtggtgtaactggggacaaaattctggcaactagcctagtgctatttcccccaagaaagactacctcaaggcatttaataatcaaactcccaaaagtcaaggataaagaaaggatcctaaaagcagcaagagaaaagaaacaatatgcaatgaagctccaataggtctggcagtagacttttcagcggaaaccttacaggccaggagagcgtggcatgactcatttaaagtgctgaaggcaaaaaaaaaaaaatccctagaacactagatccagtgaaaatacccttcaaatattaaggagaaatacaggctttcccagacaaacaaaagctgatggatttcattaacaccagaactatcctataagaaatgctaaagggagttcttcactctgaaagacaacgacattaatgagcaataagaaatcgtctgaaggggctgggcacggtggcgcaaacctgtaatcccagtactttgggaggccaaggtgggcagattgcttgaggccaggagcttgagaccagcctggccaacatggtgaaaccacatctctactaaaaatacaaaaattagccaggtgtcatggtacacacctgtagtcccagctactcgggaggcttgaggcacgagaatcacttgaacccggcaggcagaagttgcagtcagccgagatgccaagatcacactactgcactccagcctgggcaacagaatgaaactttgtctcaaaaaaaaaaaaaaaaaatcatctgaaggtacaaaactctcactggttacagtaagtacacggaagaacagaatattaaacattgtaagtgtggtgtgtaaactactcttaagtggaaagactaaatgatgaactaatcaaaaataataaccacaacaacttttca

SEQ ID NO: 43581 - DNA, 2300 bp, Homo sapien
agaatctaagtctagcaagatggaaaaaatcagcatgtttttttctctgacagcccactacctgtcctggagcttctgccttgtgcttcagcttccctatctcacatcactcccggaacacggctccttctctgcaaggtttgcagtagaaaaactggtcatgtttgcagggatgtgacatttcccagaaagcctttaatgaaagatgatccccagttcagaggacatgggaaaccaatatctcagaatatatgaggttatgcatagactgactctcatctgctctcagacctagagagctcgagacagaactgtcaggctgagcatccactcatttaatcttcagacctctcatggacatggcctaagaaggtcaacttcatgtcagtagatgcagttcagcctctgatagatatgaacgtgaggaccctgaatgaagatgatggaaggacccagccagaactgtggggtcccaaaaagtccagctcaggctgtcagcccttcaaagtccagaacagccctggctaaatgtagctcaccacaacttccagttcagaggtcggcagagggtgagtaccttgatctgatgggaacagcctcaggtcagtggaggatggagtgccccaagactggccaggtgtcatggtgaggaccctgaagagaaataagagaactgttataggaccaacgagtttctgtgtcagctgcaaagtaacagacccactataataaaacagcaaagtttgcagcaaagagtttaatgattgcagggtgccaagtgaggagatgagaagagactctcaaattcatctccccaaggagttctgggctgggatttgcaaggagatcatggagggcgaggggctggagaactgaggttgttgattcgttggggtaaaggggatgaaatcatcagaatgtggaaactgcgtttttttttttttagtcagctcctgtggggtcttttggaccagctgatgtcagtagggtcctttagagcagctggcatcagtggggtccttcagaccagctgagtcattagaatcatcagtatgcaggaccttaaggaatatctcaaagaaaaaaagtttcattatgttaaaattgttatctatagagcaattaagggcaactataatctagtaacaggatctacatgattctgggataataggcaccaaactactatgaggaagcaggtcagagagcagctgacttcatgattaatgctgaatgttctgcaagcttggcgtatcttcatttatctcccttccctcttccctgattaattttatacagttcataggggcagtttcaaaaccacccaccccagaacagaggagcccacaaattccaccaatgctgtcacccttggggagcccagaagagaattatgaggtggagaaatcccatcaatatgcctcgtgtgtttcacagaggtgaagaccttggactagtggaaatggccctaggtcaaagagacaaaacccacgccctaacaggaatcaaggtgaggatcctaagtgttacgagggggctctcccccttgcaacaccagcagagggggccaaacagagcccctcgccattgttagcaccgagaggccccaaaataagtatctctgaatccccttcattccacctgtatagtctcggggaaggaagggcctttgtctgaagagggtgaccccagttgtgcagagagagagtcttggctttcacgggaatcaaggtgaggactctgagggcggatgagaagacctctccccaaaaaaggcacattcacagagccctgccgctgctgtcaggcctgtgaggcccaggcaggggtggcctgtttggcacgcttagatttccacagtgggggctgagggaggtgggggtattgtttggaggctggcggatttgggtcagcacgcatattcgtcccaggctgctagatactgaggtgaggacccctagtggagacgaagggaccagcaacgctagaacagtgacgtccggtagcgtccagccgtcagccctcagacgccacgggctgccggatgtgagtcatcctgacttccgctttgaaaaaaaagacccgagcggatgtggctcatcctgacttccgctttggaggcgaggacccgagcgagtgtagggggtgcggcgtctggtcagccaggggtgaattctcaggactggtcggcagtcaaggtgaggaccctgagtgtaaactgaagagaccacccccacctgtaacaaagagggccccactaagtcccgcttctgcatttggtcctgagaggctccggtaaa

SEQ ID NO: 43582 - DNA, 2300 bp, Homo sapien
aagagttacatatctggatttgcttagattattaaagaatgtaggagagattaaatcctaatttattggacttcatactcactctcttgtttattccttaatcattaattgagcatcagctctttggaagtcttcatgttagtactgggaatgttttccccaaaacaaatcaatttcttgcccatttaattttagagtctgggagcagctgtcataaaaaaaaaaaagatgatgaggtgctctctaaaacttaaagaacaagtacaaaggaggaatgagaaaaagaggaggtttgagatgagagcaatcaagtgtaaatgccctgaggcaaggcagtttggagtgttaggaaacctcaagtcccccattgggaggtaattttaagggaaactacatggtgggctggatgagactgtgggaggggccaggccctcagatggtgcctctcagaggtgtgagacaaagcctggaatgggaagtagttcttaacagttattttgtgctcacggataaaccagagagaatctgcacctggggcaggaatggaatgtgccctgtgctcttgtcccagtgcagcagaacatagtcacagtgcacaaactaggtgctttatacagttggtgcatttcagtgttgagagactaagcccggaatgggaaactatccctaacatttactttcctgttgtgggaaaaccagagagaacccctacctaggacaaaagtgaaaagtgttctatgtccctatcctagcacagtctaatacagtgcacaacctaggtgttctatgtacatcatctctagtgagtttctgagaaataagggagatgacagcttcaggggaggtaagatgcccagaagccaccgtgctggcactctttgtcctgggttggagaatcaagagcccgctctattaaaaggactttcaacaggggtgcagccaggcatggtggttcatgcctgtaatcccagcactttgggaggcgaggcaggtggatctcttgagatcaggagttcaagattagtctggccaacgtggtgaaaccccgtctctaccaaaaatacaaaaattagttgggcgtggtggtggacatctgtaatcccagctactagggaggctgaggcacgagaatcacttgagccctgaggcacaggttgcaatgagccgagatagtgcctctgcactccagcctgggtgacagagtgagactccatctcaaaaaaaaaaaataaataaataataaaaatcaaaacaggagtggttaacatagaagggtgcctaggagttagaaaaaaatattggtcattgacaaaaattttgagacttgagttgtatccaattggagaaggctcttccacaaacactttataaattatataattttccttgctaagcagcattttgtttgattataatttctttgtttggagtttggtaatatgctcaagttcacagggtgagtaagtgacagggctgggactagactcctgttgtgaattcttctagagcccacactcttcattctgttcctctctgcctggagcagactttgtgttctttaattcacttttcttctcaatacttccaaatatatctcaggggttaaaaagaaggattctgtgcccaaagaattggattggaatacatagccaaagcaataaagaatatcaaaataaatgaaagctacaaataaagaggagaaagagatattattcagtgacaatatgatcatctacatatgcacagtcagataacctcaaaatcagggaccacacaatcatcttgaacagctccttccccttaagaagtaaatcaattaaaacagaagtcacataagaggctagtgctggctattgaaaagagtaaatcagcatcatttttctctgacaacccaccagctaccttggactccctgctttgtgttataatttctttacctcacattagccctggggcacagacttgcaaggtttgcagtaggaacgctgcccaagagtttgcagggatgtggcatttcccaggaagcctttattcagagaggcaagagaaaataaggaggacacccataaataaatactggaaagacaaccacaccaaaagataacggggcaatctacccaaacctcttctcagcctagaatgccccaggcagtgcagtcagactgagcatcctctcttttacccttcagagttctcagtgaagtgagagttttgacctaaggtgacctcagttaactagagggaggatccagggtctggcagatatcagggaggaccttgaatgaagaacaggaggagcc

SEQ ID NO: 43583 - DNA, 2300 bp, Homo sapien
agtgagatttaggatcctgagttaggacctgagtaggacaatccaccataagacctcaacctgtctaccacagctgccactcttgggagaccatggtcagctgtggccagataaggccaccctcttcctcctatctgatctcagggaggtgcaggccttttaaatggagaggtcttcaggtcaaaaaagaggggagccctaggatctgctaggagccaaatcaaggaaaccgagtgagaactgaggggactgctcacctctgaatagagagagcaacagagtccacccccctgcataactcttaaattgccagggcaacatgtaaggctgaggactcaccatcactttttttttttaataattgaccttcttttttagaatagttttacgttcacagcaaaactgagcagaaaggagagtctcacaggcatcctgtcctcccacagacacagcctccttcatatcaacctcccaagccagggtgatacatttgttacaattgagaatacatggacacatcattatcacccaatgtccgtagtttaggattcattcctgttgctgcacattctgtggttttaatatttaaaaatgtataatgacatatgtttaccaccatagaatcatccagaattgttttactgccttaaaagttctctgtgcctgatctatttatctctcactctccccaacctttggaaaccactgaactttgtactgtttccatacttttgccttttccagaatgtcatatagatggaattatgcaatgtatagacttttcaaattggcttctttcactttgtaatatgtatctaagtttcatccatgtctctttgtggcttgatagttcattcccttttagtgctgaataatattttattctgttaatttatccactctccttctgaaggacatattgcttgcttcccagtttgggcaattatgaataaagctactataaacatttgtgtgcaggttttttttgtggacataccgttttcaactcatctggctaaataacaaggagcgcacttgctagatcatatgatgaaagtatgcatagctttgtaagaaacttacaaactgtcttcaaaagtggctgtatcatttttcatgtccatcagcaatgacagtgtgctcctgttgctccacatcctcatcagtatttggggttatcagggtttttgattttgaccattcttataggtatgtagtggtatcacattattgttttaatttgcaagtctctaatgatatgtgatgttgaccatcatttcatgtacgtatttgccttccatatatattatttgttgaggtgcctgtttagatcttttgtccatttttaatagggttggtcagttcttattgttcagttttaagacatttttgtatgttttggttaacagtcccttatcagatatgtcttttgaaaataattttttcccaacctgggagttatcttattctctttgtggtatctttagcagagcagaagttttaatttagcgaagtccagattatcaattattttctttcatagatgcccatcacattttataccagaactagaaaagatgaaattcttggtctgaagttgcagttatcagtcagcagaagagacagtccacaaccctgcttggagtccagatgaggatcctgagtgcaaacttgggacctaaagagcccaggacagagagagcactaaatgcttctaggcaggggtggtgggttgaggggcccctagacttccctcatctgggtcccagaaaactaaagagtcaatttcacaacaccaatagagggaggctcaggccctgccaagagctgacatgacaattctaaaggtaatcagagtggatcctctccaagccagaacacagaaagccccactgcgagccttgttgtcacccagtcagccccaggcagggttggcaagctgcagcctaaggcacattgtaacttcctcagctggcttctcaggggacagaatgactaagaacaatagcccagtgaatacttagagcagtgttctcaaggaatcctgcagaggcggcttctgaaaagccaaggtagtatctgcctgctgaaggtgttctcaggatttcatttgctcttctccaggaaccacatcacctgcccttctgcctacactcctgcctgctgtgcctaaccacagccatcatgcctcggggtcagaagagtaagctccgtgcccgtgagaaacgccagcggacccgtggtcagacccaggatctcaaggttggtcagcctactgcagcagagaaagaagagtctcc

SEQ ID NO: 43584 - DNA, 2300 bp, Homo sapien
taaagagcccaggacagagagagcactaaatgcttctaggcaggggtggtgggttgaggggcccctagacttccctcatctgggtcccagaaaactaaagagtcaatttcacaacaccaatagagggaggctcaggccctgccaagagctgacatgacaattctaaaggtaatcagagtggatcctctccaagccagaacacagaaagccccactgcgagccttgttgtcacccagtcagccccaggcagggttggcaagctgcagcctaaggcacattgtaacttcctcagctggcttctcaggggacagaatgactaagaacaatagcccagtgaatacttagagcagtgttctcaaggaatcctgcagaggcggcttctgaaaagccaaggtagtatctgcctgctgaaggtgttctcaggatttcatttgctcttctccaggaaccacatcacctgcccttctgcctacactcctgcctgctgtgcctaaccacagccatcatgcctcggggtcagaagagtaagctccgtgcccgtgagaaacgccagcggacccgtggtcagacccaggatctcaaggttggtcagcctactgcagcagagaaagaagagtctccttcctcttcctcatctgttttgagggatactgcctccagctcccttgcttttggcattccccaggagcctcagagagagccacccaccacctctgctgctgcagctatgtcatgcactggatctgataaaggcgacgagagccaagatgaggaaaatgcaagttcctcccaggcctcaacatccactgagagatcactcaaagattctctaaccaggaagacgaagatgttagtgcagttcctgctgtacaagtataaaatgaaagagcccactacaaaggcagaaatgctgaagatcatcagcaaaaagtacaaggagcacttccctgagatcttcaggaaagtctctcagcgcacggagctggtctttggccttgccttgaaggaggtcaaccccaccactcactcctacatcctcgtcagcatgctaggccccaacgatggaaaccagagcagtgcctggacccttccaaggaatgggcttctgatgcctctactgagtgtgatcttcttaaatggcaactgtgcccgtgaagaggaaatctgggaattcctgaatatgctggggatctatgatggaaagaggcaccttatctttggggaaccccgaaagctcatcacccaagatctggtacaggaaaaatatctggaataccagcaggtgcccaacagtgatcccccacgctatcaattcctgtggggtccaagagctcatgcagaaaccagcaagatgaaagtcctggagtttttggccaaggtgaatgacaccacccccaataacttcccactgctttatgaagaggctttgagagatgaagaagagagagctggagcccggcccagagttgcagccaggcgtggcactacagccatgactagtgcgtattccagggccacatccagtagctcttcccaacccatgtgagatctaaggcaaattgttcactttgtggttgaaagacctgctgctttctctgttcctgtgatgcatgaataactcattgatttatctctttgttgtattttccatgatgtttcttaaaatagaaagtttatttagattcagaatataaatttagaaatggcatgcatcacacatttattgctgtttatcaggttggtttagtgataataattttgtttttgaaatacaaatagaaaatcctgaaataatttttgtgatacagagcaaaataacacggcatgggagtaaggttatccttagaaatttaaaataactccacagtaaaataggtagaatctgaagatagaaagggaagaaaagtaaaagttgctttattcgtggtttgtcttactcagttcagtctttttttgctcataaatttaaaagttacatacctggtttgcttagattattcaagaatgtggaggcctgggccaaggtcaatgacagtgtctccattgtcttccctccattaagagaagactttaagagatgagggagagagagccagagacagtgttgcaactgggcctggcatgtttcagtgtggtgtccagcagtgtctcccactccttgtgaagtctgaggtatattctttacttttgattaagaaaacacttaaccttctaattaatggagagccaaaggggagttggtgggaacaccatgtataacatatttgtatgtaaaatgatttatcttttctttttcctgt

SEQ ID NO: 43585 - DNA, 2300 bp, Homo sapien
gtggtaaaatgaatgaaaataagactggtttggatgaaaggtcagagttggtccttgaaccaaagcctagaaggtttgagttgctttcagctgagaaagacaactccacactcaaaatatgatttaatatggaaaagttatttagagtttctttgtaagctgcgttttgggctgattttattgttccatgtcttagaatgctgtatattctttgttatctcttggacttaaagaaaatcagcagggtggatgatttcttctgtagttgaaataatcttagtaataacaagtattgtttaaagtctcaatgcacaccagggctttgcacactttcaccacattccaccagtcctacaagacaaggcttatcaagctcatttcacagatgtagagcctgaggctcatagagtttattaatgtgcccaagttcacacagctagtaagtgatagggctggaactagactgctggtctgaattcctctagagcccacactgttccactcctcccaaactgaagcttactgtgaattgcttaattcattttcttctacaaccccaaagtgtgtctcaggtaagaaagaagaggtctctgtaccccaaacactggattggaatacataaccagagcaagaagaataccaaaataattgacagatgtgaattaaagagaaaaagaaataatactcggtgacaatatgatcaccgacagaagcaaaattggatagcttcaaaagatcaaaagattacaaaaatcatctggctccacccttttctgtagaaagtaaaacttttagaactaccctttggttggtgaagtgaaggaatagatcagcatgtttttttccctgagagcacaacatctgtcctaggctctccaccttccgtttcagtttcccaacatcacatcacttctgggacagggacctcttctctgcaaggtttgcaaagaggaaactggtcaaatttttgcagggatgtgacatttccctggaagagtttgatcaagagacagaagccaacatgagaaccctcatgaatgaatggtggggagaaaaccactccaaaatgtaagggttcatccagaccctcaggagagtgacctcagttcagtagatagaggagtcccaggttctgatacatgtaaaggcgaggagcataaatgaagactgatggaaggacccagccaaaactgtggggttctatggagtcctttccttattatctgtttttgcaggttgcaaaaggactgtgatcatatgaagatcatccaggagtacaactcgaaattctcagaaaacaggaccttgatgtgagaggagcaggttcaggtaaacaaagggtaagttacaggtttgctcacttgtcaaggtgaggacctgaatgtggactaagggtagctagcacccacatggcctcacaaagtcccctctgctgtcagccctaggaagccttggcggagatggcaggctgaattctgcctggaaagtctcagggagatgactggttccgtctaattggggcagcctcagttttacagagcgaagaggccgagaccctaacaagaatcaatgtagggcttttaagtgttaagaggggactccaccagcagatgagtccccacagaattcaccccgttttgaggcatcagacagagctatctacctaaggtgcctctcatttccgcctggaaggtctcatggaggatggggagcgtggggcctgaagggagtagcttcagttctgcctggagaggaaaccagagtcacggtgaggactctgagagctgatgagaaggcctctgcccaaaacgggactttcacagagccctgccgctgctgtcaggcctgtgaggcccaggcaggggtggcctgtgtggcacgctcagatttccaccttgggggctgagagaggtggggctattgtttgaggctggcggatttgggtcagcaggcggagtcgtcccagactgctagatactaaggtgaggacccctagtggggacgtagggaccagcgacgctagaacagttacgtccagaagcgtaccacccctgccgtcagcccggaggccacgggctgccggatgtggctcatcctgacttccgctttgaaggcgaggaccccagcgagcgtaagggcgcagtgtccgcctggcggatttgggtcagcaggcggaagtcgtcccaggctgctagatactaaggtgaggaaccctagtggggacgtagggaccagcgacactagaacagtgacgtcccgtagcgtcctgcctctgccgtcagccctcagaggccctgggc

SEQ ID NO: 43586 - DNA, 2300 bp, Homo sapien
catccaccacttgacacataacaaacattattataaacactttacacaaattaactcatgtataaagattacctcacagacgctgttgtgcatgtttgacaaatgaagaaactgaggcacaaacagcttaagtaactttcctgtgataggctgaatagtgtccaaagatgtccatgtcctaacctttagaacctgtgcatttgttaacttatagaatgaaaaggcctttgcatatgtgatcaagttaagaatttttggatagagatattatcttggattatctgagtgggtccattatagtcacaaagattcttacaagaatcagagaaggagatggaagcagaggccagagttatgtgatcagatattaaggagcttaggcagcttcaagaagctagaataagcaaggaaatagattctgtcctagaacttccagaagaaatgtcaccttgactttagctcagtgaaactgatttcagacttctggcttccagaattataacataaaaaattcgtgttgtttgtgttgacttaagccactacatttgtggtaagtaaagcagcgacaaagaaactaacacattgcccaaggttatgatgctacaaagtggcagggccaggattaaaactgaggcaatctagtgctagttccagggatttaaccactgtgctatttagggcctctcacaggcagaatgaaatttaacgctgcaagcaaaatgggggtctcctaggttttcctcttatgctgagaattccaggtcctggagaagaagaaaaagagaaagaaagagagagagagaaggagtgagagagggagggagggagggagggagggaggaaggaaggaaggaaggaaggaaggaaaggaaggaaggaaggaaggaaggaaggaaaggaaggaaggaaggaaggaaggaaggaaggaaggaaggaaggaaaagaaacagcaaaaaaagaaagagggaggatgggagggagggaaaaagtaaaaatgattctgtatcagctggtatataccaacacccttccctgccccatgtcttcacagctgtgtggcaagtgaagactaatggatccaggcttcctgatgcttctatttatcattattcacttaggaagggtgggaaaagaaatactaattacacacttaccaatggaatacttttacaaggatcaaaatttctcactgcggccatgaaaaagaatgagagctggcggccatcatgcttagcaaagtaatgcaggaacagaaaaccaaatatcacatgttctcacttgcaagtgggagctaaataaagagatcacctggacactaggaggggaacaacagacactggaacctacttgaaggtggagggtgggaagagggagagaatgagaaaaaatacctattggatactattacctgggtgatgaaataatctgtacaccaaacccccacgacaagcaattcacttatataacaaacccgcacatgtactcctgaacctaaaagttaaaagaaaaaaaaatatatactaaaatgaaaacaattctcactgtaacaatattatcccctcgtaattattatattcctaagttttaggcacttttacatcctgctcgctgcccccagctctcttaacacagcatccaggacatagtgggcgcttataaatactgatggcattaaactgagcgcttatgatagcatatttagagcagtgcttttcaaacgtctaggtgcatgtgaatccctggggacaccgttaaaatgcagattcagagttagaaagtctggttggagcctgagattgggcatttccaccgagttcccatatgatgcttgtctatgttctgtatttttcaaggtctcagaaaatgagacctccctatccatatacaaatataagtcacacaaactgtgataatttaatgaaagtttacaaagagcatagaagtagatgtttcctcttttcccctgccctcccaataaagggaacaaattagatgcgagggttcaatggaaagagttgcaacagcatccaggcgctcgctctcctccggtcttcctgagacagggaaaggggtaatgagaggaaggaggaaagtgtccaggagctcccacgctgctgttcttccatttccagcttttaaagagcacccgccccttcgaaccaccgaggtcatgggcgaacacaccggagcgcagcaccgcgcccccccgcacacaccgcccgcctccgcgcccttgcccagaccgaggcggccgacgcgcctgcgtgcgcgctaggtataaataggtcccaggaggcagc

SEQ ID NO: 43587 - DNA, 2300 bp, Homo sapien
accataagatccagcaatcggactgctgggtatctacccaaaagaaaggacatcagtacattgaagagatatctgcactcctatgtttgtggcagcactgttcaccatagctaagatttggaagcaacttcagtgtccatcaacagataaatggataaagaaaatgtgatacatatacacaatagagtactattcggccacaaaaaagaataagatcctgtcatttgcaacgacatggatggaaccagaggtcattatgttaagtgaaataagccagaaacagaaagtcaaacatcacatgttctcacttatttgtgatatctaaaaatcaaaacaattgaactcatgcacatagagagtagaagcatggttaccagaggctgggaagggtagtggagggctggtggggcaggtagggatggttaatgggtgcaaaaactagttagaaagaatgaataagacaaagtatttaatagcacaacagggatactgtagtgaataataacttaattttacattttagtataactaaaatagtataattagattttttgtaacacaaaagataaatgtttgaggggatggataccccatttttcatgatgtaattattatgcatcatatgcatgtatcgaaacatcttatgtaccccataaatatatacacctactgtatacctacaaaaattaaaatacaaaattttaaaaagaaatattctattacataagcatgtatatacatatattccttaaaaatacaaactggaaaatgagttcttgctaaacaatatatgttagagatctttttttttctttttttttttttttgagatggagtctcgctctgtcaccctggctggagtgcagtggcacaatctcagctcactgtgacctccacctctcgggttcaagggattctcatgcctcagcctccgagtagctgggattacaggtgcccaccaccacgcgtggctaagttttgtatttttagtagagacaaggtttcaccatgttggccaggctggtctcaaacttctgacctcaagtgatccacctgcctcggcctcccaaagtgctaggattacaggcgtgagccaccgcacacaacctacataggattttaagtatgcatacgttctcatttacttggccaatatcttatttatggatataattttttctagtcatttattttctcaagcaatgctgcaacaaatatcttttcacataagtctttgtgtacaagtgtaaacatatagcttggacaaatttataaaaaatacaattgttgggtcaaagggtatgaatatttgtatttgagagatactgggaaattgccctctaaatatgtttacaatctcatcagtagtgtttgagagtgcttgtttcttcacaactttgcccacaccatgtattattgttttgaccttcggtatttggagagggaaaacttttttcttttttttttcttttgagacggagtctcgccctgtcgcccaggctggagtgcagtggcgcgatctcggctcactgcaagctccacttcccgggttcacgccattctcctgcctcagcctcccgagtagctgggaccacaggcgcccgccaccgcgcccggctaattttttgtatttttaggagagacgaggtttcgccgtgtttgccaggatggtctcgatttcctgacctcctgatccacctgcctcggcctcccaaagtgctgggattacaggcgtgagccactgcgcccggccgagaaaatttttttcatttacatttttaaaaattataagtaccattgagaaataatacttcttaaaaattatagattagtaacgaaacagaatttcctaaagtcatatgtgactttggctttcttttgggtgaaggatcccagataatgtacttttctagaaaggaaatttaattctgttgctagggttcttacaaaatgtgtaaccataaactattttaataagagacagtttcgtagataggtttcatttttcgaaaaaggggaagaaacaccattctgtggcttgatgtggctttgtcagttactgcctccccacctcccgggacttcccactgcctctttagcacaaatcggacttgaacaaaaacaactctttttccatgggaccaattataaaaagaatggctttgcactgagcagctcagtctactggtctcatcagtgaaaggcttgtgaaaatttctggaaagagcattggctggcttgttcatctctctgtttggtcagttgctgtgtttctgccggatcagatgagcagattggtt

SEQ ID NO: 43588 - DNA, 2300 bp, Homo sapien
gggaggctgacgcaggggaattgcttgaaccaggcaggtggaggttgcagtgagccaagattgcaccactgcactccagcctgggcgaaagagcaagactccaactcaaaaaaaaaaaaaaaaaaaaaaaaaaagttcacagtaaatatttaagataggctgagctcaactcttccatctaacacctttccccttatctttacctcatctctaacagggtgctgagatgtgacgcctgaaaggccaatattttggcttttcagttttgttttggtgaaaggaatgaggatgtggaatacacattgttgtaggaaccataggatcaacaaatttaagaatcccccatgtacatctagcccaacttattctgaaatgtctgaattctgatcccattgtgctgccaaacaaataatttgctgtcctgttggaatctgagagtcaaaagtatgtgaaagttcaaacgtggtcagggattttttttttttaatggatcgatgtggtaggtttggtggctttgtttttactgccttctagaaccaagaaaatccttttctatatcattcactcaactaatgcctttcactgtttttagaggcaagttggcctggttccttgcttatatgcctgtctccctcttttcctcttccaggaaattcagagatactgactcatcttcactcttatattaaagcaagccagtttatcgatagttattaaatctagtatgtccataagcaggcttcatctggaacattagaatgtgaggtctagacggtgtttaggaaaatttgctttcagatcatgtgtggtaaaactatacaaacagagatggacaagtgacgtggtgtagagcaaggtaagaaaggaaaaaaaaaaaaaaggaaaagaaatgatgttccagaacacagagatttgggaaagggatggaaagaaatgacagtgggtatagcggagtgcttttaaaattgatagagagcatggtgggttacaaaagcaatttagtgattttcaatcagcattaaaaaaaaatgatatgccatagaataaaaatacagaatgcatactgtggaaggacaaatattgttttggaaagtttttctatacatacataaatgtatattagatgtatataacatgtatttacatgtgtaacaattgtaactacaaatgtgctccccgcccacacacactggagcctgggtttgttttgtaaactgtttcacagtgtgggtcttggttccaagtttgaaagcccttagaacacaggatccagaaggatccgggcaaggtaaattcaaggtcaagggagagtcccttttctgtcccctgccatccaaagcagttaatggagggagaggaaatggcgtgtgggggaggggaccgcagagtgaggccaaacgaggagcaagggcgcgtcaggacggagtggtgccgggcgccttctgcctgaatggtcgatagaggaacttggggaggttgattttgggtgctttccttaaatgctaaaccgaaagaacttccgcgtttcttgtccctgaaaagcttgcaacggtgaaggattcgcgttgctccttgaggtgaccctatatggggtcaatcccagccaaaggaatgattacgattaccaggggccagatgcagggaggtgggcggggcgtgggaaacgcgggaaggccgggccgggtaggtccacacagcgactcacgtcgctgcacgactctgcacagcccactggagggaacaagcagttctacacactttgagacccctatggaggcgagccccaggacactagtggaagtgcgctcttttcgccggccaggagcgctgcctgccaaagggcagtactcgtctccgccccatgccatgcagctggatggctctgctgtccgctcgccgggcccccacgtgacctactgcgcgggccgccgcctccaccgcgcccaggccccgcccccgtgacgtctcatcgccctctgcctgtccgagcgttcggctcttttgcgtttgctgattggccagcccaggtgacagcgcccacccccaccccccctgacacgcccctggagccttgggggtacgcggtggggggcggggcctgggccggaggggcggggtgagaaggctgcgcgcgggtaaaggggccgcctcgagcgcggtccgagcgttcagcggacgcgcgcggcctcgatctctggactcgtcacctgcccctccccctcccgccgccgtcacccaggaaaccggccgcaatcgccggccgacctgaagctggtttcatggcagcctcaaagaaggca

SEQ ID NO: 43589 - DNA, 2300 bp, Homo sapien
cataatgagacccctgtctctaaaaaaacaaaaggaaaaaaaaagcatcaaagtggattttgaggtattgggaataagctttcaaatgcatttttgtttggttttctgggagaatataccagtgtttctcaattttattcattcttttaacatataagaaaatgaattataatactagtaattttatagtcagattataccatgtaccttgatttagaaatgtatttcaccatctgatattctgtcatttttaacttttgcaatactggataaaatatgaagttcaaaaaatttttctacttttcaaaaaaaatcaactttataatatgcaaataatgtccagagcgggtatatggcctctaaatgccaatctcactcttaaagcaaggaagttctgtgccaagagagccatctccattcttaggggagccatctttgctggtgttgaaggccttagcctggggttgatcagtcatgccctattgtcctccctctcaccagccctcactcctccccataaacgaatgggcacctaggcatagatagtacattttgccagcaaacagttgtttatagccaaccacaggccagagactgtactgatgtggggatatagagatgaataaggccttatcttcttatcttcttttgcccttcagaagattagagtatattgggagcagaagacaaaaccataaaaatttggtagctgacatcctggggtgtgtgtgaagagagagggggggatagaaatggggcactggaaagctttctgaagtgagtgattcttgagccttctctcctgggtgttgcaggcctcaggtgctatggaaagtctgggaggcttgagagaaaggtagccccacatggggttcagcacccttagaagtgtacaacatcaagctcatttttgtttagactttctattgtggatttccacctttaaaaaatcttgctttaagatgctggggttggggggcatggggctgtctcagaggaatgcaattcaaatcttatgagaaatcagtatttgttaaatcctgtgactgaaataaaaacgtctcctgcggggcgtggtggctcacgcctgtaatcccagcactttgggaagccgaggcgggcggatcacgaggtcaggagatcaagaccatcctggctagcacggtgaaaccccatctctactagaaatacaaaaaattagctgggcgtggtggtgggcgcctgtagtcccagctaccggggaggctgaggcaggagaatggcgtgaacccgggaggcagagcttgcagtgagccgagatggcaccactgcactccagcctgggcgacagagcgagactcagtctcaaaaaaaaaaaagaaataaaaatgtctccttctagtcttcccacattacagcatacccttttcctcgtaccctttccccccaaaaagaagagaaaacagatcaaatgggattcccctttctaattcattaccacttgtttgtgagtggcccagtctgcatagcaggcagtctgtctgccaatctccctttaccctgctgaatttcccctatcctgtttttgtttgtttgtttgtttgtttgtttttgggaccgagtcttgctctgtcacccaggctagagtgcagtggtgtgatcttggctcactgcaacctccacctcccaggctcaaatgatcctcctgcttcagcctcccaggtagctggtactacaggcagggttttaccacattgctcaagctggtctcaaactcctgaggtcaagccatcctccctcctcaccctcccaaaatgctgggattacaggcatgagccactacacccagcctccctgtgtcctgtttcactccaacttccaagcaagcatgtcttccagtcactggcagtcatcagcaaccatgtgctttcaaatctgagtcctgctaaagccctactgcagtttaatgtgtgcaataatttgtcaagaatgttgagtgatcataagtatggtactaagaacatctcagcaaactacctttcgttatgtgttttttctaccttctaattctagaaagtgaaattcgttattctacatggaagaaagctgtgatgaagtcaatgggttgggttacaactcaatctccagaaagtggtaaaaatgtttttgtttattattgtcacattttcttagtatattaaatagttatttaagtatctaggcatttacacatagccaggctgctctgaagaaaagcattatcatatgtccagagattctgacattttgaaaacactttaaagttctaaacacaaaatgta

SEQ ID NO: 43590 - DNA, 2300 bp, Homo sapien
agatctcctgaggtcaggagtttaagaccagcctggccaaaatggtgaaaccccatctctacaaaaatacaaaaattagccaggcatgatggagggtgcctgtaatcccagccactcaggaggctgaggcaggagaatcgcttgaacccaggaggcggaggttgcagtaagctgagatcgtgccattgcactccagcctgggtgacagagcaaaactccatctcaaaaaaaaaaaaaatgtggggtggatttcgcattgttgtatcagaaagtagaaaaaagtattacacatggtagaaacagcatttatgtcagtgcacagtgcttcttgctcatacttgaagttagtttttttttttttggataatcaaagtaactgagaaattaaaaaataagaaagtttggtaaactgcaaaattaaatgtatgatataaacacagggtatgttattttagctctactgtggttgtaaaatgaagttgactcaggagatcaattagaaacttgtatgtatgatagctctgataaaagccaatatatgccctaaaatgataatattaacattgaattactaggtttactgagaatgcggataatctctaaatggggagagagagtgctcatctgtcaaaataagtgaataaggttacaattctctctctctctgtctctcccccccacgcgctctctctctctctctctctctctctctctctatatatatatatatatataagctatatatatatatatatatatatataagctatatatatatatatataagctatatatatatatataagctatatatatatataagctatatatataagctatatatatatataagctatatatataagctatatatatatataagctatatatatataagctatatatatatatataagctatatatatataagctatatatatatatataagctatatatataaaagcttatatatatatatatataagctatatatatatatagcttttcactaaacagaactaaacagaaaacagggtttataatagaggtagcatttttcaaaaagttatacacactttgtgctatgcaattaaaaatcatataggccaggtgtggtggctcacacctgtaatcccaacactttgggaggcccaggtgggtggatcacttgagcccaggagtttgagaccagcttgggcaatatggtgaaaccccgtctctatgaaaaataaaaaaattagccaggtatggtggtgcacacctatagtcccagctacttgggcagctgagatgggaggatcacttgagcctgggaggttgaggctgcagtgagccgtgagtttgccactatactctagcctgtctcaaaaaaaaaaaaaaaaattatatgcatgcttcataggcctgggcttaatcctctcttttctaaatagaatggaggctcaggatgctaagtcagaaccaggtgttgacttaagaaaataagcagtggacttgtttttctttttgaacttctgctctcttctgtgggataatgtagaatttagttgctgtagaagatatttctgacctaaaagaaaagaagattcagtttgtaaggatacttgggaaagagccaacctgccctgaaagtgtggtctagcatcctgtctgctgttactttgaggcaccagaagtctactagttttttgttattttccatattgagttgggaagttagcaaaaagataaccatcttttcgttttctcagatttctagactactgaaaagaagttgctttcagagctggagatgtgaataaaatttctgtgccagggttgataaaccatcttgaggtatttttttttctaattttaaataactctattttttaaaacagttttagttttacagaaaaattgagaagatggtacagggagtccccatataccctgcactcagtttcccctattattaacagcttacattagcatggtacgtttgttacaattagtgaaccaatattgaaacatgattattaactgaagtctatattcagatttccttaacttttactgaacatgttttttttcctctttcaggattccatccaggaaaccccatcacagttggttgttatgtctccttagactcctcttggctgtgacagtttctcagacttttgttcttgaggagtactgatcaggtattttgtagactatcactcaattgggatgtgtcagatggttttctcatgggtagaatggggttatgggttttaaggaggaagaccacaaaggtaaagtgccattctcaca

SEQ ID NO: 43591 - DNA, 2300 bp, Homo sapien
ctttaacattttcttttaaaataattctaaacctacagaaaagttgaaagggtagaactaaaagctcccataaatccttcattcagtttatcaattgctaacaatgctgtttgcgacattggctatatcattctcattttctctctctctctctctctctctctctctctctctctctcacacctcttgcaatacagatcttgaatccactagttttattattcattgatggttcttaccttaatcagttatcaccatgatgtttgcaaaaaatatggttttctaaatggattgagagtctgtttcagatttctgatcataaatcgaaagtagcaattcagtagaacttgccacaccccgtaaggagcactagataattcagaacaatgcactagcaaaggagctggacaatttttccaaatcttcttaaaagtatcaagaaggtaacaaaatagtgaggaacaactactgtcacaggaaattcagaaaagtggcacagtatctaggcggcttttgccctgggagccattgttaatcctgactgggaagctgagagacccagttgtgctttgacagtttctcaagattaggaggacaaaagtcagaatctaaggcctttcaagggtggggcccctggtaaatcaccctaggagtcaggaagagctagaaacaaacctaccatgaacttgcagcacgacctcaagtcatccaagagacccaaaaaacttcatgccctaaaatttgattgagtgatcctgaattactagtgaccccagacctcacagtagcaaagaaaattctttatgggggaaatgatgttttcaaattcaatatgcagcatacattcaggtcctctgttacctttaccccagtctacctttccaacaatctctctacaaccttcttctttccacactctagccctactgcccattcaattttcatgggatccttgcaatttctgctctgcttagcacattttccagttttctgcctttgctcatgcctgcctgtttgtctagaatttcccttctcgcccactttttaaaaaacagtggcttaaacaagatgtaagtgtattctctctcacataatagtccaaggataggaaattctcaagatacggcttccatgtctcaatccagggcagctgccccagttatcacagtctctcaggcagccatcatccctaccacttctgcctatggaagtgaagtttcttctcaaagctcacctcctctattaaattgttctggccccaaagttggaattaattcatcccttccctgtttcttcatttgtttgtcctctgcttctatcacctattaccttctgttggatagggttgctcactgcctgatattttgtgagcctagagtgggcagaaaccttgtcctgtgcatctctgtattctctgcatcatctaccttgcttcctgcacagagtagtacccacaaatgtttgcagacttgaactgtgatagctggacaaatgttgacactgaggttcaaagctccagatcctctcttccagtttccagttctaatcaaaccatgttccctggttttatccaactttgaaaaagttactttcaaggtcaggaaacagggaatattctgcccatgttattttatgagcagacacaaagattaggtttgctttttcctttttagttctcctaacattgagctgattgatggaaggtagaggaaagtaataaacctttattcacagaactacaaaaccctttctggctgctgcctccttccctctctggagatagatggggtcgttactattatgaaatatacagcagaggagtgtttttctagtaatccctctagtactcatctacatcttgactacttcttgataaagatatcaccctctagatagaacctgtcatcaagacaagcaggccacatatatatttaactgtttcacttcttaaagagaatagcaacttatcatgaaaaattgactgctcttctcagggcaatgattttacagccttagagaagctgcattctaggtagaaattccaaaaagaaataagtcataatgttccatgtcacagtactttcctgttctttatttcagcacatgaccattggctggagcccagttgaccaagaaggaagccagagaaagccacacattcgggcgagcaaggtagttctctgtgtgatctgatgctacggtcagaacctcagagtccaagtacaacattcctactggttaggtatggggcatttttcttgtctggactgtttccctgatgtctgctaagcttgctctgt

SEQ ID NO: 43592 - DNA, 2300 bp, Homo sapien
tggacccaaataaattaaaagacatcccatgtttatggactagaagagttaatattaagataccaatattcccacaaatgacttacaggtttaatgcaatccctaacaaaatcccagtaggctggtttttaaaaaaaaaaaaaaaaaaaaaaacgaaattgacaagcatatcctaaaattcataggaaattcaagggacccagaatagccaaagcaatctctgcagaagagcagagttggatgactatacttcccaatttcaaaacttactacaaagctatagtaatcaagccagtgttgtgccagcatcagtttagacacatagattgacagaacagaattgggagtcccgaaataaacccatacatctatggtcaattgatttttgacaagtgtgccaagaccatctagtggagaaagaatggtcttctcaacaaatggtgctaggacaactggatatccacacacaaaggaatgaaattggacaatgacctcatatcatatacaaaaattaactcaaaatgagttagaaacttaaatgtaaaagctaaaactgtaaaattattcaaagaaaacctggacataaatgtttatgaccttgaattaggcaatggtttcttagataggacactaaaagcacaagtgacaagagaaaaacagaaaaattgaacataattaagaactttgtgcttcaaaggacaccattaagaaagtgaaaaaaaaaacagaatgagagaaaatatttgcaaatcatatatctgaaaaaggactggcacacataatatatatagaactcttaaaactcagcaataaaagtacaaataacccaattttaaaatggacaaaagacttgaatagagttttctccaaagaagatacaaatgactatgaaaagatgctcaacatcaatagccattatggaaatgcaaatcaaaaccacagtgagataccactttacatccactagaaaaacaacaaagacaatgacagtgttggaaccttcatacattgttagtgggcatgtaaaatgatgaggggactttggaaaacagtctagcagttcctcaaaatgttaaacagagtcttaacatatgacccagcaattctagtcccaggtatatacccaagggagttgaaaacatatgtctattataaaaatcctcatagctgcattagtcataatagtcacaaaatggaaacaactcaaatgcccatcgactgatgaatgagtaaataaaatgtggtatatccatacaatgaaatataattcagccataaaaaagacaaaagttaaagacattatgctaaatgaaagaggccatataaaggccgcatatagtatgatttatttgaaatgtccagagtaagcaaatctctagaaacagagatttcatttgtggttgtcgggccagtgaggaaggcgagatgggcagtaactactcatgggtaggggatttcattttggaataaggaaaacgttctgaaattagatttttggtgatggggtgatagttacacaacttcatgaatatactaaaaaccatggaaatgtttcagagggtgaattttatggcagaggaattgtatctcaatagtgcagtttgttgttgttgtttgacacaagtcttgctctgttgcccaggctggcgtgtaacggcacaatcccagctcactgcaacctccgcctcttgggttcaagcaattctcctgcctcagcctcccgagtagctgggactacaggtgcgcgcgccagcatgcctggctaattttttttgtatttttagtagagacggggtttcaccatgttggtcaggttggtctccatgtcctgacctcgtgatccgcccgccccggcctcccaaagtgctgggattacacgcgtgagctaccgtgcccggcctagagcagttatttttaaaagatggtcttgaaacattcagcgccaagtggccgggatttccgacggaagtcagcgcttgtgcccccacccccttgccccgcaactctgtcccccgccgcccctccccccaccgacagagcgcgctcctccctaacggtcgccactgcccacttccactgcccacttccggtttcatcgcacacccgcctttcactatccgccattcttgtcacctcagctgctgccctcgctaccgcaccgacttcgcccgtgtgctcgcctgcacttgcgctgcccgccatggccaccgcccagccgtcgcaggtgcgccagaagtacgacaccaactgcgacgccgccatcaacagccacatcacgctggagctctacacctcctacc

SEQ ID NO: 43593 - DNA, 2300 bp, Homo sapien
tatttttgaggattgccatctgtcaatttttttaaaaagtctgaatagtgatttcttattccattcttttttcttgtcaacagattattcttagtagttttctaattggacactgagaaaagagacttaagcatttatagagaagcgtgtcagaactcctgaattttgagcaggtaatttaaaagtgtaaaacaaacaaacaaaaaacaggaaaggaagagagtgacaaatgtcttactatccaggtgttacaaatccttagtttatcgatttgtaatatttacaaatgtccatgctctgaggcttctgtcttttcgttgaaataaacataaacagtagttaagtgatttgccacactgacacagagattggtgtctctgatttactgcaaagggcactacttcctcattacaggacactaatccctcttccccaaggatcggagcagacctagaatatactattagaccaagggacaacttcagccaaagcaaatcttagtgtgcccccctcagaccgtaatagcagctgcctccacaactcactagcttaaaattgctaaagggcaacactaagtaatctcagtgtatgagccagaatgccagaagaagtgccatatttgcttaaaaatagcaataccgatcatacttacatgcacatatctttagtgataacatttacctttatatttggtttgttaaaggtaataaagaatcctggcattcccttttgcttttgtccagatactttatttttgcctcttttgccatgctatagcattagataaagcaaaacgggtgtgcttccacctaaaacattctagggggaaaaatgttgagcagaaaaggattatttcaaaagaagccggatatggtggcatgcacctgtcatcgcaggcacttggaggctgaagtgggaggattgcttgagcccaggagttgggagaccagcctgggcaacacagtgagacccccatcccttaagaaataaattttaaaaaggggaccacatttaaactgtagaccgaagtggaatgaatcaatcggaaaggagagtggaaagcaaatgtttgaaagaaaataaaaagaaaagcaagccaacaaaataaatggacaaagaagggcagtgaaaatatcactaacagtttatcgtaagatgctctttggatgctaatctaaggtgttatgtgaagtttgcagaaaattcttgtgctaatgaaggctttcttcttcttttgagtatttccaagcttgaaataattgtgtgtagttaacttctatcatcatactgcaaactctaaaattagaattatttgaactgttcaggccctgtaacttttccaataaaatattctattagaaacaagttccttctagatcttcctaaaagaatactaaaggaccaaaccgtgcaacagcactggtggtattgtcttaatttagagagtccataccagtgattctcaaacattagtatgctcagagtttctggttcaataggtctgggccgggcccagggaattttcatttctaagaagttcgcaggtgatactgataactgctgttcccagggtctacattttgagatccgctgctatgtcacaaatccaaatccaaagtctttttaacaatcccttttagcccaggatgagcctaacggcaatttcacgtccttatcgccggccactttaatcttcaactgaggaggaagggagagtgagaattatgtatataatttttttcttttattttttaaaaagaaaactccaagcccacactcttaattatctgggatgaggtcatttgcacctgggtcatttatttagacaacaagtagtcttgctagaggctttaaggaggtgttagcagagcggtgtgtggcttccaggttcctgggtctaccttaaatccccatcctctttctttctttctttctttctttctttctcttttctttttcctttccgttttgaaagccccaactgcccagtctctgggtgtccgggttcccaggtccctaggtgggggcggagcccgacacggccccgccccgtctgcccgcagcgccccctccccggcccgcccgcgccggctcctccgcagtgctttcagctgtgagcttgggcggcggcggcggcggcgctccactttcggggagcccggcggctctgggaagctcactcctccactcgtacccacactcgaccgcggagcccttgcagccatgagggaacagctcaaagggtaagtggatcgcggccccggccccgtctgatggccgcaatccgtgcacttgtggcg

SEQ ID NO: 43594 - DNA, 2300 bp, Homo sapien
cttatttcctcttgcaagtagtatcttcgttcaggttcagtgactactgtgtattatatccaatgcttctggcaagtgggttggtggaggcagcccaagatcttctagaatcaagagaattggatccatttcccagttctaacacttatcagctatatggcttttaggcaagtcagttaaacatccgagtctcagtgctctcatctgcaaaacagaaaatgtgatgtacttcacagagccagggggaggaataactaaggtggtacatttgtacgtgctttgtaacctgtaaagccctttactgtacacgtgtcatttacagctctgtatcaccatcatgacctagaaaagcagtactgacagaagacttatcttcttgccaatgctaagataactttagccatttctgcatttctaaaggaaggagtctttatcccagtatctatgaagacttggcaggaattgccgtcaatatttagttggtaatataaacgaattaaacaaaaatgcacactaggttttaggaaaattaaagacagaactatcatttgtactcctcttacatttcccaaagtgctaaaactagacaataaatcagtcctcaataaatgcttgtttatcaattttatattcatttatttgttgataatacaacaaagatgtttatatgcagtataatatatatggcaaagatgaaaagtagcaaattcatgaatcaacatcctatttatgcttgagaagacaaagaaagtgttggtgacttcatggtatacataaccttaaggagctcgtgattgagcctgggtctctgctatcaatgtaggatataaatttcaaatgtactatcctttatatgtatgttaatgtagtaaacatagaaaactgatgctactagtgagaatacttttacttgaacaactaaaagtttgtctttaatcccctaagtgcatacacaaaaggaaagtactgtacaaatcaagtacaacagaagaagtaaagtaaaagacaagtgaaggaattatctggaacttagatctggttggctttttctcctgaagtacttagataaattaactcacttttctcttttgctgaagaagtgcaaattaggcaggcatgttattccacgtaggcaaaaggaaaaaagaaagaaaaacataaaatggctatatatttgaccaaacttcgttctgcaagaatcccaatactaaccttctaccatataaactactttcaaaatcaggctatatccttccagtacaaacctggtttgtactactcagagatactactcagaaatactttcagtatttcccttctttcaacttctgatgtgattctatccatattcccctgcctgtctcccagtcaaagagaatgggacacaactctctttagagtccatcagtgatgctttagctgccaaaaatagtgacaatagacattcattgtctgtctaccttacttgttcaacattcagaattctgcatcttaagaggctgtggctgaaaacttgagccagttcttcagaatttctaacatgttatttctgccactttttctcccttactttagcagagtaatttaattcaatttgagagagagagagaaaaaaaaaacttttctagttacacagatcaatccaattgtttggagcttcagaatgaatttttaaacttgttgaacagaagcatacaaatctctaagagcaagtcagataatatacaaagcctccattcattgtgtaggcagaaaggaatgctggtacccggcagctctctgaggaatgttcccttggctttgactattctgctgggaacaaggaaggaaacacatatataaaatgaatttataatgtctctggcttgtaatggcagaatgataagaaaagttggctgtttaatataaactgtcagttgcatattccaggcctcctctctttgaggttcctcccacatccacacgcctggctactgtttagtgcggagtacaaagtggccgtttattattattgactggtgaggcctgtgctccaaaattcattctgtcaacagaatgtaagcaaagttggcattttaaagcagggctctttcagtttctgggttttctcaggattgctatgcaacaggatcagtgctgtagtgcccggttcaagctgaaaatgttacacaggaagacataccatgtaaaggtcagattcttctactataataattttcttgatctgtgtgtatacaagtgaagttgaatgcataacctcttatcataactcttaccaaggtcctatgtactttccacct

SEQ ID NO: 43595 - DNA, 2300 bp, Homo sapien
tggtgctgaaatagcacctcaagtaccaggctctatcaaatttaatctatccataaggcaactgccaattatattttagagaaaaaatgtagactgaaaagatagacaatccaagtagcaactcctgtaaaattatatgcccataggagcaatcttgaagatataaatattggtatgtttctccttcatttatcatttatctgatcatttgacaagtatttattgaatgcctgttaagggtgtagatatatgtggtgaggctgcaggtgtaagtaggtctttctgaggatatgcatgaagttgatgttcataacttggagatgtgtgtatacagactgaggattccttcagtggatattaagaagtggagtaataggcagtaaagaatacactagtcagttgtggtacataaacacgtcagcaccacttaggtattaacttcctgttttgttttgtgtgtgcttaattacgctgtttattaaacaagcacatcataatctgcagatattgtcataaacagcacaataaagcctgccacatcagaatgtcatctatcaaattaggtgtgttcctcagctgtcccgataggcacacacctgtgcctgtaaataggcgcttggcggagattgcttccaggtgtggatctgttgggcgaccttgggatgtagggcactttggaaccttttcctctagcttcaggaattaacctctgggcttggttccatgccagcttgcattttgctttgggacagtaacatgtaaagaatatgcctgtgaatttagggttactgagaagtcctcatagaagaagtaaaatttccttgaggaatgggagtcttttattcaatccaggtttaatgcaaggcttggtgaacagctccagaaggttaataattgcgtgcgtgtgtgtgtgtgtgtgtgtgtgtgtgtgtgtgtgtatccttttgtcattcaaaagtatacgtatacacacacacctgtacagctgatgataaatatacattgtatcaatgagttcaaatgaagtgtgctattcattcactgaggaatgggctattataatgaactattatgatattagaaattgtcagggcaataagcaaataatacatacggttttcaacaaactttctaagtattgttatcagtgggtttgcttaaatctttttttacaaatttatttatttttttgagacgaagtctcgctctgtcgccaggctggagtgcagtggtgcaatctcggctcactgcaaccactgcctcccgggttcaaaagattctcctacctcagcctcccgagtagctgagattacaggtgtgcgtcaccatgcccatctaatttttgtatttttagtagagacgggttttcaccatgttggccaggacagtctcgatctcttgaccttgtgatccatctgcctcagcctcccaaagtgctgggtttacaggcgtgagccaccgtgcccaggcaatagccccattgctcagtgaatgaatagcacactttattttaactcattgatataatgtatatttatcatcagctatacaggtgtgtgtgtgtgtgtgtgtgtgtgtgtgtgtgtgtgtgtgtgttgaatgacaaaaggatacacacacacactcttattaaccctctggagctgttcagcaaaccttgcattttttactttcattacagtgtgtaaataatttagcaaattctaatttgaacctgatatcaattgagcatttaatatttagccaaatatttatcaagtgctgactgtgttctagatgctggggctgcaatttcgaaacagaccattgaggccctcatggagctcacaataaatgatcttccttaaagtatcaggtctctggtttgttaccgtattttttaaattgttaaggaaagaaaaaggccctatctttttgtagacaaacatgccctaagtgcttccagaaataatctccatcaggtaatgcagactgtgtgtggagtgaaattgagtccaatccatgatccagcagagtttcagcccaggatttctttagagcctttgctacacacaaagttggctgatgtgccattcagcatcccagcagctctttctcttcacactagcaatggcaaagctttgtgcggaggcattgctggctgctctgaactaaaagcatccgtggggaccgaaagaggtttttgcacaccttattaaggtaggcaagtgtgtctgagtgtgtgtgtgcctaaaagctggaagacatctgttgagaggaaagtgctcttctgtgggtctggcagcttttctgtaagtctt

SEQ ID NO: 43596 - DNA, 2300 bp, Homo sapien
aatttttacttgtcaaatcaaaaaaatacaaaattcaaagaacatgcaagaattacctccctgaacttagaaggtgccagaggtagccacttggaagagatgtccactacattaagaagataaatgtaaattagccaataaaaggaagtcagaattgagattatgccagtaaaagggaacaacatgtttaaggccaagaatcaagagggccacagtgtaggttgggaaataaaaaataaaatttctgtatagctagagcagggagtaaaagacaccagcaggacttatattatgaagggacttttaagccacattaaggataaagcttttggctgcgcgcaatgtctcacgcctataatcccagcacttagggaggccgaggtgggtggatcatcttaggtcaggagtttgagaccagcctgggcaaattggtgaaaccctgtctctactaaaaatacaaaaattcgccaggcatggtggcaggtacctgtaatcccagctacttgagaggctgaggcaggagaatcacttgaaccagggaggcagaggttgcagtgagcagagattgtgccactgcactccagtctgggtgacagagagagactccgcctccatctcaaaaaaaaaaaaaaaaaaaaaagaatagagcttttatttgaaggacagtaaagaatcactagagaattttagacaggaagccccaattcgttattgagagaacacattgcagctgctttacaggtgggatgtggcagagtaaaatgccagtgaagaaactgatagcatatttgaggtaagatatagtaatgattttaactagagtaaagacaatggagagagagagaaaagattggaatcaagaactatttagaaggtataataaataattagtgattgactgattagatgcaacatgatgaaggacatgatagaggaagtagaaatatctagaattacatctaataaagggaatcattatttgtttttcgctgaaaccggaaaaaatacagagaaggaggaaaagcaagttggggagttgagaagtaggtgagaagagtatatgcaaggagttcatgtgtgggagtgttagcttttggtggttgcagaatattcatgaggagatgtccaatagggtgagataacatgcaagtatggagatcaaggggagatctggacttgagagatgtagagttgagagttgtcagaatgtgaggaggaattgaagttaaggtatgggtagaatgagaagaaaggaaagcccaggataaaatcttaatggagtcaaaatttatggtacagggagaagtactgggaaagccttccctcttcctgcagcatcactaaacttcctgttcttttgccttagtctagatgcctttaactgtagttttacttgggcaaagctgtgttataggctggcttcactgaagaataatgacatcactaatatttttaaagcttaaaaagtatagtatttatgtaatatctaatattctatatataatataaaaaccaagatcatcttaaaacctcagtcatgctctgtgggaaagaaagttatattgtacctgataatcatgcctttacattgtatattaaggaaatgtattttaaatgacacataatgaattcccaataagttgcctgccctatttcttacttttacaactactctgttaaaagtgaacagatccttgaagggagactttccaatctgtgcagcatggtatttatacttgaacattattgaattatcctaatcatacttatagttacaatcaagattaattgcagctatattaggattacttattattttttctacttcagcagtaacataaacccaattgtacaaacaatttctgtaatccaaattgtgaaagaaagtagggagaaaaaagatcatgcaaagctggttgaaatagtattcaaaataaatctttaaccagactgttatctaaaattctgtttttgacaaggagctgattctgaacagattgtacatgtatctcactggtggaagcagattatctgtcttgaattggattgtgatgacgatgaccctattctaagcaaaccaaatctcttgaactatataatgagatcaggaggaacattcgacctgagaaagacagattgcaatgactgagatgattttgctaattttttttccagcctatttccttaatgtacgtgatattgtgattgattttcatgcagagatccctgatcctatagttttgtttgctatttatttttctccttcacattttttttctatcaacagagctgaatgagtg

SEQ ID NO: 43597 - DNA, 2300 bp, Homo sapien
taaaaattttattctactacgtatttttcacttaaaagcctctagattaaatcacttcaaaagacctcatattgagcttttggcagagggttttgggtatgtttcaaagacatctgaatgtatgctttcaactgactcatttactctctgctttctgacagaaagtacgcatgcacatgtaggaaatataagtggaattgcaaataaggtcatttacttttaggaatatatgtatatactactgataaatgatgcgttgaccaatcttcctccataaagtctatgaagatggtttaattttgaccatttgaaatgttccatttctttttaaaattattttggaagggctagtattaattttatgaaagtaaagatttgaaggaggctagaataggtttgaaaactattactatctgtttttatttattcacccttgtcaacaaaggaaatacttccatattgtagctaagatttatcatataccatatgaataatgttgatattgaacatacatatagaagcttgtgtgaataacataattaaataagaaaaatgtattttgtaatgctaaataaaatttctcacctaagatgacagtttgaaatttatttattcactgttatttctcatattgactaaaggaatctacttatagattagtattgtgatttaaagataaacagatatttttggtgcatgcatatatttgttatgcgaaagtgattccttatgtttttaagagaagcaacggagatttactactgaaaaatatatgagagcaaatatgattactttgtaaagggcattttaataacggttcttttaatccaagtagataaaatataaaatttatcaattttaaatatctctcagatgcattcatttactgaacattaactaatatgattatatttacaataattaaaaaaatagtcttttgcttggagaaaaacattttaatatatcaagattgatgatttttctgtccatttgacttaatactaatttccagtttaggggcaaaaagatcatttgtagaagcatgaattcagtgaagctgttttttaataatttttctccctaatcccttagtataaatctttggggacttttttctttgagtatttatatgtaaggcatgaagagtatcatttgcatttttatttgaaatgttctgacttttagatgaaaagaggtcctagaaattttagagttgtagaatctccccttccttaaagcatgcacgtatttgtcagatgtattttctgagctcttaatttgttcagacagtgtgctaagttctgggaagcaaagataactaaaccatgctcctgctcatcaggaaacctcttccatagtgagatcaggcccatgttagagtatgtagatgctgcaaaggaaggaataatcatttctccatggttgggtggatggcatggggaaaggctccgaaatagtttttcggagtaaatgacagctgagagtttcttttaattatactggagtatctattcataactggcgaataaatactgttattcagaggagactatttttttataatcatacagtatttgaacgactatgggtttggtcatattaattgtttttcagatattacaaatctgaggcgggatcttgctctgtcgcccacgctggagtgcagtgccatgatctcggctcactgcaacctccacctcctggattcaaatgattctcctgcctcagcctcccaagtagctgggattacaggtgcatgccaccatgcctggctaatttttgtattttcagtagagatggggtttcgccatgttggcctggctggtctcaaactactggcctcaagtgatccgtcctcactggcctcccaaactgttgggatcacaggcgtgagccaccgcgcctggccatttttcagaagtaattttaatttggatgccccaaaccagcatcactcatgtttaattccatttatcaatgaatgtaatactaaatgtaaaaaaacactaacacatcataatggaaagttactttggttgtaaaatatgaattatatttaaagttgcttcctaacttttatttttttattttgcattttagatgaaagagaagatgttcaaaagaaaacattcacaaaatgggtaaatgcacaattttctaaggtaagaatggtttgttactttacttttaagatctaagttgtgaaattttcaaaatggactatgtacctgtgtatcttaaaaatccgttttatttctctcatagtgtcattttattttagctgtgcaaatctggaaata

SEQ ID NO: 43598 - DNA, 2300 bp, Homo sapien
agtccctgtgaacctttttttacactagtggccccagagctaatgaggccaagccccaccaatgatcgtcgtcacagacattcctgtttttctgatatttataaaggttccttttaggtatgaggtgatttttattcaaaagaacaaatgttcccagatgccaagtgtcttccgctaaaaggataaatgatcagaaagcaatccttagctacagtgtccttgaaggtgcattgtggaatcttgcactgttgtgcaattgtgaacaacttcatcagacagtactgcgtatttgtactgtgttatccttaatttttccctttagatcttaatttgttatttatttcttccctggccaagagctaatttctttacagaaactcatatatagggttccttttttcctcctcaagtcagtaacttctgcaattaactacttttttcttaatttctctaactttggcccaactaaatattttcccatcattcctgttttgccgccctcgagctaggacatggaacttacttgttcggaaaagcttctatctgattgaaagggcatgctaattctttctttatagtgtaattgtttcacatttaagagggaaggagaaacgcctaaagtaataccacagaagaaataccctcaactaatctttctaagcagtacgacaatgagtaatgattacagttaattaagttaggcaacctccatttccattcacttagtagcactgctaattatactcatgctacaaggtttctttagttcttctgtaatttggatgcagtactctttgtagacaagggaatacggtacgattaatgagatttttcccaccaacacctcctgttctctccaaatgaaatttccgcatctgaaaattgagagtagggaacggagaaaaaaaaaatcagtcacattttaacttactgccagcacggtccatgcttataattgccaaatattttatattaaagaaaacaaggtgtgggtttttttttttgtttgaaaccttgtaaaattgtggcttacgtaaaaatgaaataagtatagaacatggctttttaaaaatatcagtggcaatgataatgacactttatattgtatgcttttggtcgcattaaataaacatatgttgagcacatactgtttgccgggcactggatctactaaaaaaaaaaaaaaaaaaaaaaaaaaaaaaagcaaaccttaactgtaactctggatttcttttacatgaacttcaatcattttaacaacttactctaaagaaaaccaagaactgcagctctacttggttatattgttaatgaagtccttggaaaaatttagtttatatgctttgatcagatggggattgacatacttaagagttttatttttaatctgaaaatccacttcaatcttatgctctgggtaaacagtcattacagaagcctgacacaattctgttttttcaagaagcaggattcaaggtttaacttcaaatacaaatttgagtaagttatacggattattccttttaattctttttttaaaacacagggtttatgtggatgaagtttcgttcttaatctccatttgccttaagaattaacttctgcattgtggtttagattgagtttaagattgtttcagattttaaaatgtatttttaaaggtgtgtctggaggaagatatttgtatgtcaagcactgttggttttcataggaagttcaaatgtgttttcagcagcactggacgtttttagagttattttcttctcctagcatcacacaggtgcgcaactttataggtccagtctcttctttttgcttccttctctgcttctttttctttttcactaacaccagtttgcataaatgagtgcactgtcgagttcacgtgaataccagacaaaaatacaggtgtcttcataataatcagctcctctaagtctactttccagtttctgcttcagactcagataaatcctatataaagcagacgacacagttatttctagaggaactgaggttactgattagaagggaacgtaatcaggtagattgagccggtgagggaagaaaccattgctgtgagaggggagtgtttgcaaaatgctgtctgtgaagctgaatctgtgagaacacctcactattcacggcaaccggagtggaagaaacaggtgcaaaaagattgtgtgtttgtctgcttttgtgaggctggtcagagattctgtgcctgctttatctgtgcttggctatgactctacctccaggtttaccataccccatagaatgtgtaagagaaaagtacc

SEQ ID NO: 43599 - DNA, 2300 bp, Homo sapien
aaaataacaagttaaaataaatttttaaaaattctgtgacagttattaaaaatggaaatttgagcaagttcctttattatggggctaataagacctacaagatgtagttattctgaggactaaaggagaaagataagtgattaagggacacaagaaagtactgtggtgacacagtctgaactggagttcaatttgttcggtctaaattttattttacgtgcctttcacttttccagttattgtaagcatatatttgcacctggattataaaatcttaagggaagtatatgcattccacacaatgcagaaatcattataggtgccaaataaattctgattatcaactaaggctgaatggcaattaaatgtatctcagggcattcagatctatcaggatttggtgctttagacattacccaggacacatctttgttacatttagaaccacggttgtttttagaaacatacactttagggtttctcaaagttgaccatgcattagaatcaccggtaaaacacagagtgctgtgtcccaaccccagaatttctgacttttgaggtctcgtgtcaacttgcatttctcagaagttcccacgtgatattgatgttggtttgggaccgacaagttgtattcacgccttggcctaaacaagggtttatgtttgtagaaaactcacagtgcaagatacaaagggcacttatactctgggcaatattgtacctcacagcatagagggacactgatgctaacatgcagacttagagccaaatcagccccaaaacaattttttcattttttctatgttgttttatgaaaattttgcttatatgcatatttagacaaccacactgagaggaaaggaggtgacctagggaaaagaatgttttaaattaaaattaggccttatgttttatctcatacaccttttgctggggaaaatagcaatgttatgacaataatattctaaaacacaaaatgtacaattaactattaaggtaaacatcacagtctgactcaatatttttttaatttttatctattactcattgcagtcgcaagcagttgaatgtttgacatagaaaaatgagtctgtcactttaacaaatggtacaataaaaacactcaaacaaaaattttagtagggattattataactataaaaagaatatctttctttaaaaaatgtttccaatgttttctatcaattttgggctcgcctgttgcataaaagtaataaggaacaagatgaagaagctttctattggcaaagaatgatttacatgctgaatgacataatacaactgtattcacttaatacagaaaacaagcctctattcagaaccattaaatgatcattaactcaatgtctaaaaaaatggtgttttaagaattggcaccagagaaatggaagaaagaataatttgttagtaaagaagttttagcataattcacaactgaaatttaggatttgagaaaaatttctttcctgcattataagagtattctttattttagcaggaaaacatgtcccatgagacctatacacacacacattctgccttcagaattcagctgctgcattctgctgctgcttctcttattcagactgttggcatcatcaatacataacttttgattgaatcccaaggggaaaaaataactttggtagacagtggatacataacaaatgcatggattattctgggcattcctttttatttggtagagtgaaatttttggtgttgttgagaggataaaaaaggcatttaaaagtcaattttgaatccggattttctgctctgttaataaattcacatgaaagttacagaaagtattgttatgcttttgtactgaatagtttttgtgtttagaaggctttaaaagcaagtactatgtccactgtgctattctggtttggatattaatcagaacacagttgagcattgtttgaattcacagagcttgccatgctggaagcacaaccttatatgtagtgaccatggacagtcctattatgggaaaccaacttgagagagaaggcgggtcacttgcttgtgcgcaggtcctggaatttgaaatatccgggggcctctacagaatcctggcatcagttactgtgttgactcactcagtgttgggatcactcactttccccctacaggactcagatctgggaggcaattaccttcggagaaaaacgaataggaaaaactgaagtgttactttttttaaagctgctgaagtttgttggtttctcattgtttttaagcctactggagcaataaagtttgaagaactt

SEQ ID NO: 43600 - DNA, 2300 bp, Homo sapien
taggatcaaattaccactcttttgggtatatataaaaaggaaatgaaatcagtatctagatgagatatctgcactcccatgttcagtgcagagttattcacaatagccaaggcatgaaaacaacctgagtgtacatcaacagataaattaataaagaaattgtgatatatgtaaatataatgaaataatatttagcctacaaaggaaggaaatcctgctatttgtgataatgtgggtgaacctgaagaacattacgctaagtgaaataagccaggcataggaagaataatactgcatgatctcacttacatgtaaaatctgaacagtcagctataaagaagcagagggtagattgattgttaccaagggcagagggagggggagaatgggaagatattggtcaaaggacacagagttttcattatcaggatgaataagttctagagatctaatgtgcaggataggggctatagttaataacactacagtatgcactaagagagtaatcttgagtgttatcaccaaatacacaaaaaaagggtaaccatgtaagaggatggatatgttaattacttttactgtagtaatcatttcactatatgtatattgaaacatgttgtacaacttgtatacatttttacaaaaaattaattttcacaagcctcaagacagacttatgaatagatgaaacagaatacggaaaatatctgaaacaggaaggagtccagcattttagaagaaaaaatagaagtccattgtggctggaataaagtataaagaggaagagaggcaagagtttaagctggagaggctagtagaagccaagaatacaacaaaaaaaacacatggcatttatgctattctcaatctctaaaatagatatgctaatcaccgaagactttttatgtaaaatagcagtaattgatataccagtattttcagagttgtgtggaatgatatgtatattattttagagaaatcttggtggattcatatggactcaacttatctttcaggtttatttcttgcatttataaattatatctaataaactataagttactgattgttgtgtatatcttgatatatagggattatttgtgtttgttatacaaaaatcaaatggaagtagaatagctaaaatgtatgagtacttgcacacaaagcacacacacacacacacacacacacacacaccataaccccttaggaaaacactatttcagaatagcgatattggcatatttcacatatgctaaatgagttattccttatagtttcataatgtaactatgaaaccagctgtctgtttactttttgtggtaggggggatagctttcctaacaaactaaatacctaatacaaatctgagaggaaacatatgattttattaatttttctcatgaaaacacttaaactttcttgtgttataatttcaaaccataagtgcccccaagacaggcaaacttggaagttttagagaaaattatacggtataattgataacaattacagtttcttttaacaaatactgattcacgattagtatttttaaaatacaaaatgcattttcctgaatagcatttatttacttgttaaagaagttgtgtaagagattcagctaatctaatttcttactttgtgaagaaatcactcatctaaagtcaaaatatcaagtataaagtctacccttgggagaagcatacagggtgccagactttaaatatctccagtgtgcaaaataaataatattttcttgaaatatcctcttatttgaaaatttgctatagagtcacaagaggcaaattccatttgagaaagtgcatgctatattttacaacgcagaaatgtggagctgagcacacaacatcttattgcaaaagtacaattcagaagagagtttttacccttaaaaggctgtgaagataagtaaaaatcagccaaaatttcagtgtgaataatatgatgtttggcgaggaactctactattgttacacttaggaaaataatctaatccaaaggctttgcatctgtacagaagagcgagtagatactgaaagagatttgcagatccactgttttttaggcaggaagaatgctcgttaaatgcaaacgctgctctggctcatgtgtttgctccgaggtataggttttgttcgactgacgtatcagatagtcagagtggttaccacaccgacgttgtagcagctgcataataaatgactgaaagaatcatgttaggcatgcccacctaacctaacttgaatcatgcgaaaggggagctgttggaattcaaatag

SEQ ID NO: 43601 - DNA, 2300 bp, Homo sapien
aacatggcacatgtatacatatgtaagaaacctgcacgttgtgcacatgtaccctagaacttaaagtataataaaaataaaaaaggaaaaaaaaaaagaaagttaaaaataaatccatatcaaatttggtcttaccaacatcacattatgaaatctactaaataccttgagactttaacatagattcttataatcaataaatgaaaatatttgtgatatgtaaatgtacgatgttgcttttcctttatatagacatcaaatgtagaatatttttattttcaaactgtagtaataccatataaattaacaagattttagaggatgcttattctgttccagacactatacaaagtcatgttatatagattattttgatttacacataatctagttctttgatttaatgagaaacctaagaggaatatatattgtgtctattttacagaggaggagccaaaaccaagagaggcattgatcgtacctcatttacaaggaggaactagggtatacctgcttgtaatggtagaaaacattgttcagctgcacctaacaagggaagtaagaaaccttcttttaaaaatgagtaagaatgtacagaaaaaattattatgtgatgagaaaatggtatgcttaaggaataatgcaggctgaatttgtctataattaaaattttttataaaaatgcttttcatagcgttgttttaagcactataagagagataaaaatttaactgatattatttaaaggaaaatgaagggttgcaactggactggtggaggtataacgatattcagattggaaaggaagaagggaaactgtctttattcacagatgacactatcatatatatagaaaattcaatgaaatatacaaaaatgcttctgaacataatgagtgaattttccaaggttgtatgataccaatggatatacaaacatcaatatttatatatgctaacaacaaaaaattggaaattgcaactaaaaatactacatataatagtatgaaaaacaatatttaggaaaaatctggagagaaaaagatgtgaaaggcacatacactaaaaaacacacaatattcctgagaaaatgaaaaatcacgtaaacaaatagaaagctgtacatttctcagtggtcagatttcctattgttaacatgccaattatcctcaaattgatctatagattcaacaaaatcctaatcaaattcccaacaggacttttttttttttttgacgttgacaaactgactttaaaatttctatagaaattcaaaggacctaggaaaaactaactttgtaaaagaacattgttaaaggactaatacagcctaatttctagatttattataaagctaaagtaaccaacagaatgggaaatttgtgtgagagaaaaatcaatggaagagaaaagagtgtccagaaattgaccttcaaaaaacatacacaactgatattctaccaatttccaaatgtaattcagcggagaaaaatttagtctttacaaaaatagttctaaaattatcagatatatgtaagcaataggtacatttttaaataaaaactttgatctatatcttgtgctgtttacaaaaattaaaaccttgacctttggataggccaagttttcatagatacatcaaaagaagcacaatccataaaagaacaaactgataaattggacttcatcaaattaaaaaaacttctctttgacactgttaagacaatgaaagggaaaagccaaggatgaagtgaaaaatttgcaaatcatatatccgataacctatttacatctagaacacagcaagtattctcaaaactaaatatgatatccagaaacacaatttaaaaatggggaaaaaatccacagaaacttcaaccaaggagagataaggatggcaaataagcaaatatagagatgttcaatatcagtagtcattaggaaacgcaaatgaaacccggaatgagattccactacacacctgttagaatctgggctgcgcaggtggcgtcagcgctgctccgcctccaggaaggaacctgggctgcgcgtggctggcggtctcctagcgactagagcggcagggatctgggacctcagaagctggagacgtggcaccacagcgagggccaccatgggggaccagaggctgcaggactggctgaggtccccgggcatggactccaagccctggtactgtaacaaacggccttccaagtgcttcgcgaagtgcaagcacaggcgcctgaggttcccacccatggacacccagaactgggtatttgtgaaggagggcatgga

SEQ ID NO: 43602 - DNA, 2300 bp, Homo sapien
ttagggatggttgatgggcctatgttgtgcaaaattctataaattattaatagaggaatagagttttttaaggaaaatttggctttttgttaaaaattgtttacttttctagttttggagacagtatagagacaatttttttagatagtataaagaaggatggagtaactcaagcaagcagttgagaacaagccagaaaaaaattaagcaaaaatgtgggtggaggtgggggttggggtaggggtagaggggaaagaaagcctgcattgaagagaataaagaaaactattggctaattggaaaataaacttattaaagagaagatgatagaagttggaggcaaaataaagatttctttatatctttgagagcacactcaagacattttcttattacttttgaatacacattataaatctagataaaagaacagtcacacaatcctggtcacctcttaattgtcccggtttgtaaatttttcagtgttccctaattttttaaggagaatatgcacttaggcttctttctagttgagaagccaagaagccctttgggatttggaggttagtgagctctggatgctctaggcattctttgttaagggtcctgcaataattagcacggtaatgattgagaggtgggagaaaagttcccgaaattgtaaatataagaaaagcccgggcgtttattttacattaggtttgttctcatttgacactaactcgattgtttcttagcccaaaatgttgctgcagtcaacatgtgttcaacctatggaaagatgtggttggggaaaaataatttttatcaaccaaaagtatgaaatcttgcaacattgaggattgtgtttcatagaagagagaacatgtttcttgcattcttcagctcttaaccactgttttgggagtctcaccaagtttttgggatgactaaagatctagaaacatcgcccctcctcattaatgtattcaataaattatttattttatagaaaagatggagatgagtcaaagagctacaagagacagataacccaccaatcacatgctgaaccaggcaattacaaaatttcaatttcaatttcaagaggtgtttagtcctcacataagggagaaaatatggtgcatctacttaagaacaggacgatgtcctattgtgttgaatccttagcccttagatgctcaacaaatatttgtagactgcttagtttaccattcaggaaatatacacatcacttttcctattgcaggtcctgggctagatcttgctaaggacaaggacatcctaatacccaggaggggaattagatccagcttggcataatgcaaagcggaattaataaaggttttagccaacacccaaagggcagagcagtggagatggaaataagacttacttcatatttcgcaggagctctcatttcctttttagcgcctgcgttttcagagcaaatgcccttcataggggggcgcaaaagcaggtgagcccagagaacagaagcggcagcaggctagcggagaagtgagaaaacagggaaaaccgggggactcctgggcccgtctggttttgaaaagagggcaaaatgcatttagtcacttttctcctccgtcccgcaaatctctcaggatgtgaaattgtccggggaggggcgtgttacatcactgagagacagaggacctgtccttgctccaagaggcacagcttaggaaacctaggaatccacctctggcgccttctagaaaaccgcccactcctgctccctaagaaaaggaaacccacgtgactgggcgaaaggggagagcccggcgacctggagccagcgaggctgggggcccggcgagggccgggctgggcgcggggctgcttcaaggaactgccgcgcgctgcgaatcgggggcgcgggctggcactgggctccgcccgcgggccagaggcggggtaggggcgggacaggcgcgagcctccggcactgggaactggagccgaagccaccaagtgctggccctccgcccctccccgtacggcaccgcctcccgcagcccggggaggggccggggcggagcgagcccggccgagccgggaggagcgggcgcgggcgctggcagagcgcggcgcggggccggcggcgaaggtccggggtggaatcgacgtcgctgcggctgccgacgacccacacccggccggccgcctccgcagacccaccttggccgcgcggcagggggcgcgcagagccccgagggagcgagtccccgcgcgtggcagctcggcggcttctcccttcgggaggtccggctcccggc

SEQ ID NO: 43603 - DNA, 2300 bp, Homo sapien
ataattaaaattttttataaaaatgctttttcataggtattgttttaagcaccataagagagataaaaatttaactgatattattcaaaggaaaatcaaaaattacgactggactggggggtataaagatactgagattggaaaggaagacaggaaattgtcttgtgtgtgtgtgtgtgtgtatgtgtgtgtttgtttttgacggagtctcgctctgtcgccaggctggagtgcagtggcgcgatctcggctcactgcaatctccgcctcccgggttcaagtgattctcctgcttcagcctccctagtagctgcgactacaggcacgcgccaccatgaccagctaatttttgtatttttagtagaaacggagtttcaccatgtaggtcaggctggtctcaagctcctcaccttgagatccgccttcctcggcctccaaaagtgctgggattacaggcgtgagccactgcacctggcctcaaactgtctttattcacagatgacattatcataaatatagaaaattcagtgaaatctacaaaatgctcctgaacataataagtgagtttaccaaggttgtatgatacaagatggatatacaaaactcaatatttatatatgctaacaacaaaaaattggaaattgcaattaaaaaacaatactacaggccgggcgcggtggctcatgcctgtaatcccagcactttgggaggccgaggtgggtggatcacgaggtcaggagatcgagaccatcttggctaacacggtgaaaccccgtctctactaaaaatacaaaaagtcagcagggcgcggtggcgggtgcctgtaatcccagctactggggaggctgaggcaggagaatggcatgaacccgggaggcggagcttgcagtgggccaagatagcgccactgcagtctggcctgggcgaaagagcgagactccgtctcttaaaaaaaaacaaaaaaaaacaaaacaaaacaaaaaaaaactacatataatagtatgaaaaacaatatttagggaaaatctggagagaaaaagatttgaaagacacatacactaaaaaataaaaaatattcccgagaaaatgaaaaatcacataaacaaatggaaagatgaccttcctcagtggtcagaacatttcatattggtaatatgccaattatcctcaaattgatctatagattcaacagaatcctaatcaaaatccaaacaggactttttctaagacatagacaagcagattttaaaatttctatagaaattcaaaggacctagaagaaccaactttgtaaaagaacattgttaaagaattagtacagcctaatttctagatttattataaagctagagtaaccaagatagtgtgaaatttgtgtgagagaaaaatcaatggaagagaaaacagtgcccagaaattgaccttcaaatagacaactgatactctaccaatttccgaatgtaattcagtggagaaaagattgtctttataaaaatagttctgaaattatcagatatgcgtaagcaataggtacatttttaaaataaaaactttgatctatatcttgtgctgtttacaaaaattatagcatttaaatgaaaaaaatctttgtgacctttggataggcaaagtttttcatagatacatcaaaagaagcacaatccgtaaaagaacaaattgataaattggacttcatcaaattaaaaaacttctctttgacacagacaatgaaagagcaaagccaaggatgaagtgaaaaatttgcaaatcatgcatctgataacctatttacatctagaacacagcaaggattctcaaaactaaatatgatatccagcaacacaatttaaaaatggggggaaaatccacagaaacttcaaccaaggggagataaggatggcaaataagcaaatatagagatgttcaatatcagtagtcattaggaaacgcaaatgaaacccagaatgagattctactacacacctgttagaatccgggctgcgcaggtggcgtcagcgctgccccacctccaggaaggaacctgggctgcgtgtggctggcggtctcctagcgactagagcggcagggatctggaacctcagaagctggagaggtggcacaacagagagggccaccatgggggaccggaggccacaggaccggccaaggtcccaaggcatggactccaagccctggtactgtgacaaaccgccttccaagtacttcgcgaagcgcaagcacaggcgcctgaggttcccgcctgtggacacccagaactgggtatttgtgacggagggcat

SEQ ID NO: 43604 - DNA, 2300 bp, Homo sapien
gcttgaggtgatggataccccattctccatgatgtacttatttcacattacatgcctgtatcaaaccatcttatgtaacccatacatatatacacctactatatacccacaaaaattaaaaattgaaaaaattaaaaagtctttatatggccattctttgaaaatagaaactgaacaagagagtttagagctaaacatgtgatgcaaatattagactatttcatctaaaattaatagtttgagtggataaaagaatatataagaagccaagaaggtttatgtatagttactaaggacaatggattgagctttaggcttgttgaacttgtagagctatgtgacattcctcctttgttgatgagaataccaacagaacagataaacaaaattgttcttcatttgatttttattgccatatctttggattatacacagaagtccagacttggcttttatccttgagagtaaaaaattagggagttttgaggcttcttcgcagtttccaattttttcagaaattgattgaggggctttgtatgagctgtggtcttgattcagtcaagttatatgaactattgttatttcaatgctgtaaaattgtcctgcttaggggctcaggaacatggacaggatttgtattgtgatatggtagtagcgactagtataaaaattccagccatgattcacatctcccacttgttaaaccaagatctatagaattttgaaagataatgtcgatggtttgcatctatcaattcctaagaatttacaaataataatcaccacttctgctgtttttcaactattgacagcagttccaagaaatgtgactacttgtctttgtatttagaactacttattaatctctgcatccttgtggaaaatgaagcaagaaattctttatcatcttggtactgtgagaaccttgtaaaagtgttgtgggaaaggttttactgttcaagaatgactaactgtttggctggcagatggagaggccattctcctcagagtgaacataatgtgcagtagcaaggagtaaatgaaagcgtgtggtatattttgaaactctgagataacagaagaaggacgaggagagagtagggactgggcaatgtgaatatgagtttgttggaaaagtcctcatctagcagcgaagacgtgtgatctctatctcctgagcaacaccatttcacaaatgaggaccctggaacagttaacaaggttcctaaagcctctatattcaatgtgtggccccggaaccagaagcattgtaatcacctggaagcttgcttgtcataaatacagatacttagaccttgcttcagacatactgaaacagaatctgcattttaacaaaagacccagaggattgcttttacattgtgtgtgtgtgtgtgtgtgtgcatttaaaaagatacaggtgtcacaatttcttattgtttggtcaattttaaaatttaatactgtataatggatatctcttatgtcaacacagatctacgttattattcatcataaataaacagtaagttattgtatccatcgctactgattggtattcatattaatccaatattttgctattgtaagaaacattctgattcagaaacgctgacgtaaagacctctgagcaggacatctaggagacactgactttgttatatctccctttctgttatatcttgctgccttaatagaccacgtgggcacatcactttcactgatcttttttttctttgtaaatgtaaattttaattgaattataaggccagtttacagtgcatctgtgggcagatttctttaaaatgcatggtactttaaactttgtcttacgagaggtccaggaaaatgcccactaagcctctgtgattttaataccgtgccaggccatggcaaagtgaggtgcctctgacgtttgggctgccacagcgtgtttttcagttactctggtaacacctgtgacctgagggttattctattcgcgttagcaactcgcgcgggttgggaggcgccaatgagagcagggcttgaaactagcgcttggcgtctgatggttgcctagcgacggtcgtcgacgctaatccttggccggacggatccacatctgttttctggctaccgagagggcagccatgaacacccaaaagggttccctcaccataaacgtccacagaggttccctcgccatgagcatccaaaggggttccctcgtcccccgggatatggatagctcgggtagagacatgcagctgcgggtgatcccggctgaggtgaagttcctggacacgatggccgggagg

SEQ ID NO: 43605 - DNA, 2300 bp, Homo sapien
ccactaccttagtaccaattctattattttttatttctttttcagattgttatctgttggcatgtagaaatgctactgattttttatgtttattttgtaccctgcaactttactgaattgatcagttctaatagttttcttgcagagtctttttcaaatataagctcatataatctacaaacaaggatattgtacttcttcctttccaacttggatgccctttatatctttctcttgtctgattgctctatctagaaattccattactatgttgaatgacagtagtgaaagtgagcatccttgttgtgttctaaatcttagaagacatttttcagtttttctctattctatgtgatattagctgttggtctgtcatacatcacttttatcatgctgaggtatgtttctcctgtccccagtgttttgagggtttttgtcctgaaggggtaatgaaatttatcaacttggtgttctactccgctgtggctgtgctggtacctcaggtgcaagacaaagtctcctttactttttcttctgcttttcacaagcagaacaagttttgccccatagccaccacagctagtaatgtgctgaatctcacctgaagccagcaagtctcagagggtcacccaaggccctcaatgtagtacctgggtattgctgctggttattcagggtccaagggggctcttcagttaacaggtgatgaatgctgccaggactgagtacttacagactccatggggctcgctcaaaatgtcatttactttgttaggtaatgttcaacatcatcaaaactttgggatttgcagttcctttaagaccttatcttataaatagacactaacctttgttgtttaaacgggaaatagtagtggcttcaattaaattgtgctagaaagcagttttaaatcaataatcattttctaatatatgaattaatctcttaatttttcaactttggaattaatgtataaaggtatcaatttaaaagctacttcaactcaaaagttgagtcttgctaaatatggtataatgaaatgaatatgagaggtactgaagaaataatgtaatgcagtgtccaagttatacatatgtaataaaatcaacagcattaatcacttatgcaaagataagttaattagctaagtaataactgaattattttcaaactggatttataaattactttccatgtttttattcaaggtagcgtataggtttaactaatacaattttagatctttattttttcttattagctaaatagttctcatactgattaaaatagcaaggatatataatttccatttgatgatacctcttatctgccatagatatgtaagtttttacatatataagtaaacaaagtaatatgattaaatatttattggtcactaaaaataataagtagtaattcaattttaaagtgaatactattaatacatatttttatattaaaaataaacagtttggaatggctataaaaagtataaatgtataattaagtatgtcaacattaagtggaatttttgaatggtaatgattgaaaaacattcataatatatgtatatatgcgcttaatagtatccaaattttcaaatatctacctacatgtatatgcatctgttattattattcagtctatatgcattaagtttgtacctattaaagtgataacttttggtaaattttcatcagaatacatttaaaaacagtaatttctatcatgatggtgattaagaaatattgtgtttaatcaggtgtcacatgtctttttaatccttatagaacaaaaggaatatttgatcatctcaagtggttcttagttatcatccatcttatattgtgatcagaaaataagagatgatacaaagatatctttaataattaggcacatgattacaaatatttcttattttaattttcttgaggattcaaaaaaatgaaatatacatttaaagccaatgactggcaggtattttgagctaatgaaacattttttttattttaaacagaaattcaactctatgtgtccagattcccacagtaaggcttcttgatggtgaagagattcaccctctttctgtgaaatttccaaaaggcagagtcatcccaggctctcacagtggaattaataataagctcacttgccacctcagtttcaagtcatctaaacctgtgtcattttttaccaatcttcttttctgtgatgacagaaaaaactggtaagatatctaaatgtacattattttgtatctgacattaaagaataacatatttatattttacaccatggt

SEQ ID NO: 43606 - DNA, 2300 bp, Homo sapien
gagatggagtctcggtctgtcgcccaggctagagtgcagtggtgcgatctctgctcactgcaagctccgcctcccaggttcctgccattctcctgcctcagcctcccaagtagctgggactacaggcgcccgccaccacgcttggctaattgtttgtatttttagtagagatggggtttcatcgtgttagccagtatgatctcgatctcctgacctcgtgatccacccaccttggcctcccaaagtgctgggattacaggcatgagccaccacgcccagcctggttccacttatattttgacttcatgatggtgaaaagtgatacacattcagtactttgaaattgaattttgatgttttcttagattaacaatatgtggtatgacacctgctcatagggttgagcagcagcagcaagctgtggctcccagccagccacacaatcaaaaactgatacgctacagtgtactgtgttgccagatgattttgtccaactataggctaatgtaagtgagcacatttaggtcaggctaggctaagctacgataactgtgatgtatggtaggttaggtatattcaattttcaacttaccatattttccacttgggatgagtttattgggaggtaaccacatggtaagtaaaggagcatctgtatattaatagtaaaatgacgggttataatgttgggaggctatgatggtatgcagtagtcacagctcactgtaacagtgggagaaaatagatcattttatctccacattctcccattccctccccacctcttacctccaaaatcaccaccacaacaataggaaccaaaaaaagcaaaaacaaaatcataaaacctgagcagccacaactcgaccaggagaggtattactgtattacagaaatgatatgtggctattgaaaccactgtttttctgttttattttgttttttgttttttgtttgtttgtttgtttgttctgagacggagtctcgctctgttgcccaggcaggagtgcagtggcgcgatctcggctcactgcaagctctgcctcctgggttcacgccattctcctgcctcaacctcctgagtagctggaactacaggcgcctgccacctcgcccggctaactttttgtatttttattagagatgggttttcaccgtgttagccaggatggtcttgatctcctaacctcctgatctgcctgcctcggcctcccaaagtgctgggattacaggcatgagccaacgcgcccggccaaaaccactttgtttttaacagtgacaccataaggttgcaatagcattagtcaaaactggtgggttctgcttacctgaatgaccttggcagggcaatgaagatttgggaattgtctccctagattgctaggcacagacattggtctctggcttcacagcgagtggtggttgcagaatcactcaccttctagtggtgtttcagctctagactgaagtaatttccacagcatacaatattccagtaaatattctccatccaaataccaggagtgggatgatcctggtgatgtgcctatgaggggagggctggatagtcttgcagtactgataggggaattcatagaaatgctgaattgattattgaaactactgttaccatatttacacccctagcatgtgaagtaggctttttttctgttacagttagaatgaggaaacttatgttgctgcctgttatggagagaacaaaatgtattatcaaaaagcatacccatattgtagtgccagggtgatgtagatgtgcacttctacagtttgcatgtctgcttggcaggattgggatttcaccataacttatgagtcctctgaagcagcacatggacatctgcagggactcactttccttcactcagaaagaaattgaccttgaacactaccatcagctggcaaagtaatgatcccatttcctgtcaaaacaagctatctatttgctccaaaaataactgttgtgtaagagaaaaaaatgcaaaaaaaaataccctgaatcaagaatgcttgagtttacaaattgcattgtttgtaccctgtgtgttggaggtattatttcaggtcagtcattcttcttttgattgtttcacaaggctgccaggacaaaacagtagcacagtgatgagccaatggtctcctggggaaaatatagtcaaatgacttttcatttgtttatcctgctttcccttgtccctgatttttcttcttgtgtttttttttccacagcatcataggatattctatctgttcttagtgtgcctaaggaataacctgactta

SEQ ID NO: 43607 - DNA, 2300 bp, Homo sapien
catcctctaataattcaaaataactaaaatgctttcttatagccctgaagcccttaggagctctagacccacttataatagacaaatattggaagcagaatcctcaaacattaaaactgtcacttcccactcccaagactgctacaatacttcttaaattcaggggccacatttggatttcagtccatcaactaggaactcacagtcagtggactactcataccaacttctacattccaaaacactcctatgctccctgtaaaaaacagaaaaggatataagttattccaagatttatagaaattctacaggtttattaaacctcaattccctttgattcccagccctatcactatcttagcaaacaaacccctggacaaaactcattgtttggtaatagacctacgctctccatttgtcattatctgcctccattctgactctcagtatatgtttacttttactgagaaaaatcaatagtacacttggaggggcggttccaagatggccaaataggaacagctccagtctacagctctcagcgtgagcgacgcagaagacgggtgatttctgcatttccaactgaggtaccaggttcatctcactggggcttgttggacagtgggtgcaggacagtgggtgcagtgcaccgagcgtgagccaaagcagggcaaggcatcacctcccctgggaagcacaaggggtcagggaatcccctttcatagccaagcaaagctgtgacagatggcacctggaaaatcgggtcactcccaccctaatactgtgcttttccaatggtcttggcaaacggcacaccaagagattatatcccgtgcctggctcagagggtcccatgcccacggagcctagctcattgctagcacagcagtctgagattgaactgcaaggtggcagcgaggctgggggaggggcacccaccattgcccaggcttgagtaggtaaacaaagcggccgggaagctcaaactgggtggagcccaccgcagctcaaggaggcctgcctggctctgtagactccaccactgggggcagggcatagccaaacaaaaggcagcggaaacctctgcagacttaaatgtccttgtctgacagctttgaagagagtagtggttctcccagcacagtgtttgagatctgagaacggacagactgcctcctcaagtgggtccctgaccctcaagtagcctaactgggaggcaccccccagtaggggcagactgacacctcacaaagccgggtacccctctgagacgaaacctccagaggaacgatcagacagcaacatttgctgttcagcaatatttgctgttctgcagtcttcgctgctgatacccaggcaaacagggtctggagtgcacctccagcaaactccaacagacctgcagctgagggtcctgactgttagaaggaaaactaacaaacagaaaggacatccacaccaaaaccccatctgtacgtcaccatcatcaaagaccaaaggtagataaaaccacaaagatggggaaaaaacagagcagaaaaactgaaaattctaaaaatcagagtgtctctcctccttcaaaggaacacagctcctcaccagcaacagaacaaagctggacggagaatgactttgatgggttgagagaagaaggcttcagatgatcaaaattctccgaactaaaggaggaagtttgaatacatggcaaagaagttaaaaatgctgaaaaaagattagacgaatggctaactagaataaccaatgcagagaaatccttaaagcatctgatggagctgaaaaccatggcaagagaactacgtgacaaatgcacaagcttcagtagccgattcgattaactggaagaaagggtatcagtgattgaagattaaatgcatgaagtgaagcaagaagagaagtttagagaaaaaaagaatgaaaagaaacaaacaaaacctccaagaaatatgggactatgtggaaagtctgattggtgtacctgaaagtgacggggagaatggaaccaagttggaaaatatgctgcaggatattatccaggagaacttccccaacctagcaaggcaggccaacattcacattcaggaaatacagagaacaccacaaagatactcctcgagaagagcaactccaagacacataagtatcagattcaccaaagttgaaatgaaggaaaaaatgttaagggcagacaaagagaaaggtcaggttacccacaaagggaagcctatcagactaacagcggatctctcagcagaaactctacaagccagaagagagtgggg

SEQ ID NO: 43608 - DNA, 2300 bp, Homo sapien
ttgttgaaatattggctcttgaatttaacatacattccatggaatttttccaagtgagaaagttaaaaacaaatccatatcaaaatggtcttaccaacttcacattatgaaatctactaaatgtgttgacagtttaacagattcttataattgataaatgaaaatatttgtgacatataaatagatctgtatgatttctgcttcccctttatttagacactgaaagtagaatatttttattttcaaatagtagtaatcctatataaaataacaatactttactggatgcttattctgtgccaggcactatacaaaatcatgttatatagattatcttgatttacacataaaccatttattagcgttaatgggaaacctaagaggaatatatattgtgtctattttacagaggaggagccacagggaagagaggcattgatcatgccttatttacaaggaggaactagggtatacctgctagtaatggtagaaaacattgttcagctgcacttaacaagggaaataagaaatatttcttttaaaaatggacaagaatgtacagaaaaaattattatgtgattagaaaataatatggttaaggaataatgcaagctgaatttgtctataattacattttttataaaaaaatctttttcatagatatagttttaaacaccataagagagagaaaaatttcactgatgttattcaaaggaaaatcaaggatcgcaactggactgagcagaggggatgaagatattcaatttggaaagaaagaagggaaactgtctttattcacagatgacattatcatatatatagaaaattcagtgaaatctacaaaaatgctcctgaaagtaataagtgagtttgtaaggttgtatgatacaagatggatatacaaaactcaatatttatatatactaacaacaaaaaattggaaattgcaatttaaaaatactacatataatagtatcaaaagcaatatttagaaaaaatctggggagaaattatgtgaaagacatatgcactaaaaaatacaaaatattcctgagaagattaaaaatcacgtaaacaaatgggaaaatgtacctttttcagtggtcagaagacttcctatttttaatatgtcaattacccacaaatttatctacagattcaaaagaatcctaattgaaatcccaacggaattttttttagacattgataaactgattttaaagtttctgtagaaattcaaaggacctagaagaaccaactttgtaaatgaacattgttaaagaactaatacagcctaatttctaggtttattttaaagttaaagtaatcaacagagggtgaaatttgtgtgagagaaaaatctggaagacaaaagagtgccaagaaattgacccacaaaaaaatatacacagctgatattctacaaatttccaaaggtaattcagtggagaaaatatagtctttactgaaattaccagatatacacaggcaatagacacatttttttaaaaagtactttgatctatatcgtgtgctgtttacaaatctttaaacaaatttaaatttaaaaaaatctttgtgacctttggataggcaaagttttcacagatacatcaaaagaagcacaatctgtaaaagagcaaattaataaattggacttcatcaaataaaaaaaaacttctctttgatagacactgttaagacaatgaaagggaaaagccaacgatgaagagaaaaatttgcaaatcatatagatgataacggacttagatgtagaacagaacaagaattttcaaaactaaatatgatatccagcaacacaatttaaaaatgggggaaaaatccacagaaacttcaaccaaggagagataaggatggcaaataagcaaatatagagatgttcaatatcagtagtcattaggaaacgcaaatgaaacccagaatgagattctactacacacctgttagaatctgggctgcgcaggtggcatcagcgctgctccgcctccaggaaggaacctgggctgcgcgtggctggcggtctcctagcgactagagcgtcagggatcaggaaccgcggaaactggagaggtggcaccccagcgagggccaccatgggggaccagaggccgcaggaccggcccagttccccgggcatggactccacgccctggtactgtgacaaaccgccttccaagtacttcgcgaagcgcaagcacaggcgcctgaggttcccgcctgtggacacccagaactgggtatttgtgacggagggcatggacgacttccgctacggctgt

SEQ ID NO: 43609 - DNA, 2300 bp, Homo sapien
aaggtaattccaaggctgtattccttaaatacagtttcgatggtggacatctttttttttttgtctgtccattgcctgtctcttctgaaaacggcatctcccccttactgtttgttttcatttagaaatttttctctttatttttttttctttaaccatgtggttctaattgggtcccattcttatgtcacatacgcattttctcttcaggagtggttacggtactcaattctacccaatcagatgttttaactgttgctttaaaaactggaagtgagagaagagagatactttctctctggtaggaacttggtaggtgtgagcaacttgtaacaggctacggtgccaaaccagcagaacatgactttgagatgttctgttagaatgaccctgtctgtattgagagcctgagctggaattcaaagcattcctgttgctggttccatttaatcctatggccaatcatagacctaccctttcacaacttgggttacacaataacttcctgtttttgcctgatctacttcaatctagtttttgtcatttcaaccaaaatatcctgaaaaatttagacaaaaaagaaaaaaataatcaagtgaaaagttttaaaaaaacacatatgcacatttattaaggatgcaaatcttacttttattagcctagcaatttttttaagaacatgtatgtgaaatattttactagtgaaatgaataggacaaagtcctgcttccaggcacttacagacttactaatcctgcaaaatttgtgcctacattaccaatataccttttggcaatatatctctctacatcctccctaggcttatttgacaagtgcaagatagaaatgagttctagaaaatctgatttgtaaaatatatgaatggaagacaagaaaggttaaatggaagaattttgggatattcagatctttaagggcaatcaccaaactctcccataaaatgctcccatcacagttaaaatgcttgctaggaaagactattggtgtggtcctgtggcaattcttttattcttaataagccaaatgtttcttaattccatcacaattaaagtaaaaagaaggggaacttagtttggaataaatcacttcaggtccacagcccaattcactttggattcactcaggcgtgtgtttattttaatagctgatctgaaagcatgtgagatgccacagctgaccagactgtaaacagaaaagcatacaagttaaaaccaagcacgcatgcagcatggaataataatcaagctagactccttatgatgcaaaatgccagaaaacctccaagcattaggtcaaagtttacacaatagcaaaagccttttattctgtttcttagaggggcttgtagaagtttaagattcaagttctaagatagctctacctaaaaagcgaggtcaaagatgggttttcttctcaagatatttgggtaagtttgtacaagacggtttttttttttttttttttttttagaaaaagcagatagttgtcaccaagagttgtccggaaacagtggcaagggaattattcctcaaggaaagtgcaattctctgagctgtaacagtggacaatggtcgaatagtcaccaaccacgatctgggctcacacatagcaaagaggtatattaactaggatgccctacacaggcggtctgtggatgagaaatccctatgcccctcacttcaccagggctgaagagtacgcgatgaggagaaatgactaggaaaaggaataatgtgtggtgaggtatgtatgcgaaagagaaaaaggctggcggggacccgcggtggctaggagagacgtggcggcccaacggctgactacttgggcccgcgccgagccaggctttctccacggtgcgtgtgggagtgcacagaggggcctcgacggcttttctgtatgtgttataaataaaccccaatagtggaaagctccagcaggatgccctgagccctgggtcttcccagcagaagcggtggaggatccgcccctcgtttcccacccccgcgccccaccctgttcccgccccttctctcttaaccccgccccagcccagcccccgcctctttccacctcccttccagtccgctcccggttcctggctccagctaggctcggcagaaataggagcgcgcaggcgcgacgtgcggctcgcagaacggcgagtagcggagcgggacccgctgtgagtgtggcggccgcgctgggttcctagctggggaaacgtgatccaggcgaagcgccccaggaaggattggggtgtgtgggggtgacttcggttc

SEQ ID NO: 43610 - DNA, 2300 bp, Homo sapien
gtcatgcaaatttgaagttcaacaaaaacaccttatatttcctcatgtgatttgccaatagactaaggcagaaaagagtgtgtgctcctgagactagaccctcagaagtcttgcatgtctctgcttttgctttagcccctctgccattgccgtgcaagcatgctggggttggccagctaaaagagaagagacatatgggccagaggccagtcacctcagtctccccaagcaagacccaacccacctccagacacctgaatgagcccagccaagatcctagatgcataaacattaaatttactgccatatgctattagattttgtgattgcttttcatacagcattttggggcaatagacagatgacacaactgggaaaaagtggaagagctcgttttcttggagacgtgtttacacacagttctattttgaagccagttagcagatccctgttgttgttgctggcgctacctctaggctggagtgtttcgaagaataatcagagtcagaattaatagagttgcctctagattcatgacaagggtgagtgaggtgtggaggaatgaagtggaataaggcttcatttctgctggtaaaggctttattttatgtttccttgtctgaggggacaaaaatcacctctaatgtctgttatggttgagggatgaggaaggaagtctcaaggagaaactcaacattcctgttgcttctttgatgccttttcctcctttaacatatcaagctccctgcctaaaagtggacttttatcattattattattattaaaaataaacctgttttggcagcatcaaagggggacgatggccatactgtccttgaactatgtggatgtgtcagtcctggcaatcatgttggcaaactaaggttctttcccagactacatcaagtaagggtggaggggcagggtatttaatatctgcttcccaatcatggtgacatttaacacttctgaggaaaaaaaaatgcctccaaactggcctttcaagtaagtggagtagttactctccccacaaagtatcagaaactgttctatgagccacttactcctttatgtcttgcacagtccctatcaaaagtcaaatactcctgggagacgtgacctctttagtcttcaagagtcaacactttgggaaaggcagaattatttcaaacagctgagcacaagaaaggcaactagcttgtgtaattgttcattttctgttttttcctactgaattgtaagctacaaggggtctaggaccatgtctatcttattcatccctctatttccaggtttcaggacacataggagaccctccacaacgcccttgggaaaaaagcagaagaggacaaacatgggaaaagaagggagggaagggggagataaaaagcctaattaaattctcacagagcgtttatcctaatattaactagttaatgacctcaagatatgtattgagcttttactatgcacgcatggcaggaggggcgtgccccttccttgccttaacctggtgtggttctttgactttttactcctgtatactcgaagaaaacaatacaaaaatcaaagctgggaaaaaagttcctgtatggggtatttcaccgttttaatgcattaaacatgatgtgctcaaatgccccagcctttgggattgaaacattcataatgagaactccgaagcgaccaagatgaaatacaaacttcaaagaaggcgcccagttttgtcttgctactctagcctagttcagtggcgcctcaaactttaatgtgcatgcgaatcacctggcaatcttgctgaatattcagatttggagtcaataggtctggagtgaagcctgagatgctgcgtttttaacatgcccccgggtgatgctgatgcttctaacccaaggaccacactttgagtatacaagggactggagaccatcacctctaccgccaggtgtgtgtatgctgagtcccagcgttccagatcagtgtcccgcacgtcctcggccttctgccagtaggggaggagtcgggggcggagcgggaggagtggcgcgggccccgcgtgggtcctgccagagatcacctcggccccttgaagaggcagccaagctgcggcggcgcaggagggggcgggttcagcgagggcgcggcctctgagggggggcgcaggacacgcatcccccgcgatcgcccgggccactcgggagcctcgcggcagcccggcgccccacttggccatccgctccttgcccgcctcctcttgtcacctcccgtctcatccttctcgctccttccccgccgcatac

SEQ ID NO: 43611 - DNA, 2300 bp, Homo sapien
gttcaactttccatgacttctagtaatctcagcccaatattccaggaggatagagctgctgttagcagggagcaagtgcgtttcagtgggaaagcttttgagtaagccaccaacagcctatagccaggaagactagagtagatggaatcaggagtaagggcatttccccaaagagggaaaggcatgaatgaaggcatggaggtgaagtgtgcatgaagaatgattactagatgagtttggctaaagcatatgagtcttacaaaggaatttttagccattaaaaaaaatctgtggaaccttttgttcaattggaatcatgtgcagaaacccaattcacagaggaaagcatacctgcttcagtcagaagtagggtgggatgcctggagccagcctgctctgtctctgacctacttcagctgaaagggcttcttgaaagccaaactgaagaacaatgtcccagaaactgctactttgaccctgccacacccaagattctctgggcccctctccctgcaggaggccacaaggcattcatcaaggtccctcatttggccccaaactggagcttcacaggtatgtatggaaatataataatccaggctaggggtacctgtgtatgcgtttttgtggtgttgctttttgcagataccacatgtgaccctgtgtctcttaattccattcctgacactgaattgctaaaacagtagttgaggagagcattgtggtaaaacaactagaggaaggggaacactattagtggtgattagtggcttgcctcttcacttcctgcccttacaaccctgtgttagtttcctagtgtggtcataacaaagtaccatggattaggtggtttaaacatcagaaatgtattatctcacagttctgaaggccagatgtcagatcaaagtgttggcagggttggtccctcctgagggctgtaaggggaatctgttttatgccccttccataacttctgatggtttgctagcagtctttgatattccttggcttgtagatctctgccttcatcttcatatgacgtattccctgtatgccttcacattgtcttccctgtgtgcatgactgtctttgtgttcagatgtccccattttataagacacagtcatattggattaaaacccaccctgatgacttcatcttaacttgatcatctgttttcgaataaagttatattcacaagtactagaggttaggacttcatctctgtttggagagacacaattcaaccagggaattgtggaagatggcaatgaagatttatcccatcttcattcaacccctaacacatcctatatttcaaacctttgcttccctttttctaaggccttctcctctcactcttaatcctagtggctatgctccagttgtttaactcttgttatggtggaattgagtgggaaagatgggttatttcaaggaatgtttcatcctcactattctgtttgaagacataattgtgtagaataatgtttgaaaataaacactggcactcaattatattaattcaagattgaattataattcaatcttgtgcatgggatcctaagtttgaataaaaaagtgcagaatcaaaagaccaaataaaaattatcacaattattaccaacattaccttgtatagcactttcgcacagattatcatttgaaagcatattcttttctaccagcaatcaagatccccttttcacatctacttttgcttgacaataaattctccttgaggatgtttcctgacaggattgtctgcggaaaatcctttacttagagttgtaaccagaatcttcctaaatttagcagagttcatacaacactgagctgaaacccaagtaagggagatggacagagacaataaatgagacactgaagaaatataaaatggaatttaaaaactgtaaattttaggggggtaagggcacttacaaaagtggggttaaagaaccaagttatttttagattatgtggtcctaatttggcagcatactttattattaaattttgaaacttgctaatgaaatactagttcttagtgacaaaatctgcccttgatcaaggaagcaaaaaggagaagttactccgcaggtatcagtctctccactttcttacattcaattctgttgtcaaatgttaagactgtttcctctcattcagtggaaatttccttcagcttatttttcctggaaatggaaaacagctgcgcagagccttcattcaaccctctactcaaaggctcttatttgcatcatcaactatttgcttttctctatcccaatctatcaata

SEQ ID NO: 43612 - DNA, 2300 bp, Homo sapien
ctttcaaagacatctgcagcaattaggtctaaatttagagtagaatattttgccagatattttactatatcacaaaatgtcatactactgtattttataataaaaccaaattctcaagtattctggtatgttacatattaatataccaaaacatcactttctataagtctattattatgtacataatatttttaaaaataatgggtattttggtcctagtgaaaaagtataatgcaatacatgacattaatctttagtcaaaacccattgaggtgtctgacagggaaattagcaatcataagctataagatatatattattttcaaggacaaaatggcaaatgataatacagaaagacgtgatcactggagcaagttagctggtgtgcagactaagaaggatcaacttgcaaatgctcatcagaatttagcttttgttattggttgttctgcaggggatagtactagtcagttgatattgcttccctttcatgtgggagtttgctcacagcccactgcatggtataatgaaatctctataagcaagatagagtcagaagcttagagatgcactttatggtttttacaactgctgttacaatgttctaaacactgtgatctttccaaatgtgttttctgtattcgttttgtactgtagaaaataattcgctataaactggactttatagtgtttaaagcgatgttatttattggcttattgcccctccttataatacatttatgtacagtacacttaatgtaaaacctgtgataatcctttgccttaaaataaaatctaatgctaaatattcagtgtcctgattaataattctaagctaccaatttttcctttaaagctaaccatgatgtcaagtaaaacattacacaaatactctgtggagtgttgctgctgattctgtatttgtggcagtgtatgtatcttggcccaggacatggtggccttctgggttctataaatagacattagtaatccttttagggaaagggcctgctacctctcagctgctggctgaatctgccccttaactcataaatggattttctcatgccacataaaaaacagaaaaacagcccaccacattctctccctgtacctcttttttggtttgattccttttgaatctttatattctatttgtgtttacattattttcctaaatagaaaaatgccagagatgcctgaagattgaaatcacccaatttcaacaggggaagagatcttataattatttaagtctaatccctttatggaacctgagtttcagaaagatttagtgacttgatcgaggtctgagggacgggggtggactgagtacatcctgatatcaagaagatggtggaaagttcaatgggctaaaaggagttgtgttagtcttggtattggcacaccaataagcagaggtctgtcttggaataaaaaaaactacttccttattaggccctgatctttgccctgaattacttacagttacagaggaatatattttgtaggcagtttttctgggaggtaaggacaggttcctagagacgatctttgacgccttttcaccactggaagcaatgcttcagaccactgtatttggaagacaaagggacatgctcacatggcacagtgaaaagtgaaatcttttcccacttggtggtgggtgcatgacaatatacttgcactttgaaaagcctctgtgtggtctggttatttttaaaaggccagaaatgctggccctttgaagaatcacgcgtttcctcggcccagaaaatagactgggctagaaaggcgcccggactccaattctgggcccgggtggttgcagtttttcaaagggatgtgaacggtttcccaagataggacccaagggactctaggacccagaggctgcgcgcgacgcccgcagggcgaactgcatccttttgagctcccgctccatggcctgagccgtcgtagggcgcgggttcgcggcccgccaggggacggtcaccacagagacgcagccggcactggcgagcgagcgagcaggcggcgcacggagcgcgtgggcgtgtcccggcggggctgcgcagctcgccccaccccaccccaccccagccaggtcggccgcccccaccaggtccagttccagagcccaggccggtcggccgggcccgcgtgccctcggcgggctgcgcagagcgcgggagcggtttggggctgggcatgctgggagcccctcgggcaacggccgccgccgccacagccacacagccgccgccactgcgtccgtccccggtgagcgccgctgacgc

SEQ ID NO: 43613 - DNA, 2300 bp, Homo sapien
gatttgttctgagaaatgtatccttaggtgattttgttgttgtgtgaaaatcatagagtgtatttacataaacctgatggtatagtctactacacgcctaggctacatggtatagcctatggctgctaggctacaaaccttatcgttttttattgtactgaatactgtcagagattctaacacaatggtatctaaccatagttaaccatagaaaatagacaataaaaataaagtataaaagattaaaaatggtacacctgtataaggcacttaccatgagtagagcttggagaactagaagttactctatgtgtcagtgagtgagtggtgaatggataggaaggcctagaacatttttgtacactcctatagattttatgaacactgtacacttaggctatactaaatatgcaaaacattttgttttttcaataatgaaataaatttagcttactgtaactttttatttataaacttttgcttttttaatttcttgactcttttgtaataaccctaagcttaaaacaaaaaaaattttacagctgtacaaaaatgttttaatatccatatctagaagctttattctgtttttaaattttttatttttatattttacctttaaaacatttttgttaaaagctaagacacaaacatacacattagcctaggcccacacaaagtcaggatcattaatatcactgtcttccacctccacattttgccccactggacagtcttcaagggcactaacatgcatgaagctgtcatctatgacagcaatgcattcttctggaataccttctgaaggacctgcctgagattcttttacagttaacttttttataagtaggagtatactctaaaataatgattaaaagtatagtctagtaaataaatgaaccagtaacatagtcatctatttttactatcaagtactatgtaatgtacataattgtatgtgctatacttttacaactggcagctcagtaggtttgtttacaccagcattgccacaaacacatgagtaatgtgttatgctacaatgtcactagatggtaggaatttttcagcacacacacacaagtatatatattatatattatattatatattatatatatatgtatatatatatatatatatatatatagagagagagagagagagagagagagagatggagtcttgctctgtcgcccaggctggggtgcaatgacacaatctcggctcactgcaacctgactcccaggttcaagtgattctcctgcctcagcctcctgagtagctgggactacaggtgcccaccaccatgcccagctaatttttgtatttttagtagagacggggtttcaccatgttggccagattggtcccaaactcctgacctcaagtgatccaccccactcagcctctcaaagtgctgggattacaggcgtgagccaccgtgcctggccaacaccattataatcttatgggaccactgtcatacatgtggttcatcattggccaaagcatctgtatttatatatgtatgtttcaaattatatatatatatatatatatatatatatatatatatatatatgatagctatacatgaacatacacacacacatatatagacatatatagcacataaaattggcacatattaagcattttgtaaatatcaaccattacaattgttactacttttctcagcaaggctatgaatgctgttccagcctgtcaaaatcacacctgtttaatgtgttttacccagcacgaagtcatgtctagttgagtggcttaaaaattgtgatcaaatagctggttagttaaaaagttatttcactgtgtaaaatacatcccttaaaatgcactgttatttatctcttagttgtagaaattggtttcattttccactatgtttaattgtgactggatcattatagaccctttttttgtagttgttgaggtttaaagatttaagtttgttatggatgcaagcttttcagttgaccaatgattattagccaatttctgataaaagaaaaggaaaccgattgccccagggctgctgttttcatttcctcattggaagaagaagcatagtatagaagaaaggcaaacacaacacattcaacctctgccaccatggggaactgggctgtgaatgaggggctctccatttttgtcattgtaagtaccaacaagagataagttataaattctctgacttctcggggttatcttggaactaaaatagaccaaagcttttttgttcatttgaggaattgtgttgaaactgatttaccatg

SEQ ID NO: 43614 - DNA, 2300 bp, Homo sapien
cctcacacttcctttgaagcagaagcgagagaggagaaaagatactactggctttgaatttggaggaaggggtcatgagccaaggaatgcaggcaatctctagaagctggaaaaggcaaagaaacagagtctgtcttggagcctccagaaggcatgcagctctatgggcccattttagacttctgacctccagaactgaggcaggagaatagggtcaggaggcagggaacttaaaactgtttcacgcttacttcatagaactaaattgaaaggaaaaccctggccaggcacagtggctcacgcctgtaatcccagcactttgggaggctgaggcaggcagatcacttgaggtcgatgaagtcgggagttcgaaaccaacctgaccaacatggagaaaccccgtctctactaaaaatacaaaattagctgggcgtggtggtgcatgcctgtaatctcagctactcagaaggctgaggcaggagaatcgcttgaacccgagaggcggaggttgccgtgggtgagccgagatcgcgccattgcactccggcctgggcagcaagagtgaaactccgtctcaaaaaaaaaaaaaaaaggaaaaccctaaccttccataccttccatgcctaagtaacaaaaggaccagaggctattccctttgcaaatccccaccttttctgcagggcagatgggaaatttaaagtacctctgattggttgctttttgcaaccaaagagcaaaaagcaaccaatcagacatttgcacaggagtggaactttgtaacttcacttcagcctctgattggttgctgtctgcaaccaatcaaactgattatgggccaaatctttgtttgaatagaagtgcaactttgtaacttcactttagcctctgatggttgctttcttgcaaccaatcagacgtttgcataggagtgtggcctttgtaacttcagcctctgattgtgggccactacttcatttacatggggtgcacaccaagtggccaatgggaaatctctagggggtatttggaccagagaagattctggatcccggcccttgagcggcttctctgcccgctcccaccctgtagagtgtactttcgttttcaataaatctctgcttttgttgcttcattctttccttgctttgtttgtgcgttttgtccaattctttgttcaaagagccaagaacctggacaccctacactggtaacagaactgtaagagaacaggactgtgtttctttaaggcactacatttacggtaatttgttacagtagcaataggaaagtaatacagtggttaagagcttgggctctgctatcagactacttgagctcaagtcccttttctacaccctactggctgtatgaccttgggcaaattaaattctctatacctcagtttcatcttgataaaagcagtgatggaagaactaactcctctgacttattgtgaggttttgaggaagtgtctaggatcatctggaaattagtaatttattttaaaattactaatttaaaattactacatttattttaaaattactaatttaaaattactacatttattttaaaatgtagtcattgttctcttgttgagaagcatctactttaggagccgtgtatacagcttctcatcagatccttacaaccagtagtgaaataggtatgatggtaagtttccatatgagaaaactgaagctgtgggaggtgaatttttccaagtaacatagctagtaagtggacaaatcaaagtggctggtttaccacgaaattaactacatttatgtgccacatgatggtgaatgaacaaatacgtgcaagtaatcacagcagtgggcactcaaccactagtgcggagtctagactaactgccactaggtcaccccatctgatccacactggcgccattcccagttctttacattcatcccttgtttccagaaagggcagaggaagcgaggaaaaagtgcgtggcctgaagtgacgcctggcgttgcccgaagcccgcccagcgctgccaggtgacgccactgcgacacaaaggcggggattgcgtagggaaaggccctaggccataaacgggggtggggcctccccggaggccagtgcgcggccgcggtgctctaccggcgtgtcgctccgccccagggagagccggcgctaccatggaggagtaccatcgccactgcgacgaggtaccgccccttggctacctgggagcgccccccactcccgccttcctctgcgcggggctcttgccgggtggtctcccagcgagggcggtcccaagagttggg

SEQ ID NO: 43615 - DNA, 2300 bp, Homo sapien
actgcagcactatttacaatagacaaaatttggaagcaatataaatgtccatcaacagatgaatggataaagaaactgtggtacatatacacaatagagtgctaccatctataaagaagaatgagattctgtcgtttgcaacaacatggatggaactgaaggtcattatgttaagtcaaataagccagacacagaaaaaaaattttgcatattctcacttacttgtgggagctgaaaatgaaaataattgaactcatggagatagagagtagaaatatggttaccagaggctgggaagggtagtgaggtgctggggggaagtagggaggattaatgggtacaaaaatagaaagaatgaataagacatagtatttcttagtacaacagggtgactatagtaaaaataataatttaattgtgcattttaaaataatgaagacagtatgattgtattgtttgtaacacaaaggataattgcttgaggctatggataccccatttaccctgatgtgatctttatatattgcaagcctgtatcaaaatatctctgtaactcataaatatatacacctactatttttccataaaaattacaaataaaaaatcctaaaactcagcccttacaagatctgcaggggagacagaatttgtaggttgatctcccaaattcatcaggcttggaaaggaccttagactttctgcataactacattagcaaaaccaaaccaattctatggaaatgccaatattaatagaacaaatattaatactcctcagagggagatagcagagtctttacactatatgatccccattgtccaatatgcaataaaaaaattcaacatgcaaagaaacaagaaaatatcacctattgtcataaaatcagtagaaacagacccaaaaatgtccagttgttaaacttcatagaaaaagactaaatcaattattatgtattcaaagaacaaacagaaaataggttcaaagaatgaaaggaaaatatgatctttataaatgtacagatagtgaatttcagcagagaaatggaaactataaaaataaccacatggaaattttagagcttaaaaaattatagtaactgaaattaataacacactagatgggctcacattagtttggagatggctagcatcaaatgagcttgaagacagatcaaaagtaatcatccaatctgaaaaaaatggaacaaaacatgtatctctaaactttttaaaggtgttgtattgacttcttttgtatgagttttttaacataagaaagtaataactctcttggtacttcaagctagactcacgttttcgattctccaggacaccacctttggggttccccactgtagctaaaagggacctggctatggtaacataaatgggtaatcaccttggcagaagtgatcttaacaaaaatttcacttacttcaactaaagattcagtaccatacaagcactgagaaaacctcactcattctctaatgttcagctgagcaatcacatactgttacacatttgtcttctaaaagtcatacatacatagcacagtgctatgattagatacctggactatggttatggagtgcctggatttaacttttgactccagtacttactaactgggtgactgtgggcagactacttagtttgttcatttgtaatatggggataataatattatacacctaacacatttggagaattattggagaggatatatgtaaagcacttacaacagtgcctggcacatatgtgttcattgttatcacgtttctcccaggttttttaagaatagagattttcaggggtagaagaatattaaaagagtgaatcacctttaaaacactggtgtaaaaaatacctcatgtcaaaaaatgtttaaaatgtgctttagatgaaacctgttacctttcccctgctgatcaacagagacattcctttttgaaagctcagctttagagatactgccttcttcttgaaatagctgtctgcaacagataaacattactctgtgctactgggtgtgttcaatgtgtaaatagattgtgggaatatgagaggctggtttttcaagttcctgctccaagtagttcacaagggtcaagtagtccagcattctacagtttgtgtgtttgagagaaaaataagcccataaaaacattctaaccttcagattaaggtaagactaatgcgtttagggatctccagtgtgatatctgatttcttaatttctgtattttgtgtgtggtaggggagtagtgggatttgctggtcaggaagaaaacagctcct

SEQ ID NO: 43616 - DNA, 2300 bp, Homo sapien
gaaaagccctgtttatcctaaccttattgtttcctgttcttttcaaacttggagcactctgggccttgttgcctctagagctttcaagatggagggaagacctggagtaaatccagagaatatgcactaacctgaacagcttcctaagagggggctggctctttgtctgtaggaagcagttcatttctgagtcatttcagcaaagttctggtttggtgtacactgtatagaacaaacacataggggtttgtggaagtcgaggaagctctggacaagatcctctcctttcagatctcctgagattttggggtcagcctgacctcatggttactgggaggccccaaagcagcctttaagtatgtatgtagttattcctgggagccttcctagaggcaagcataccaagtgtaacttgcaggtaaattgtagttcatagatcttggggaaagctaagggacagtatcatgggatgatgcccaatcacaaaaatcaggtagattacccaagaagtcatcattcttaagcagctttagagagagaatccaggtaacaaaccaatgaaagaatgtgctcaagagttaggatgagagtcagggcctggtgagcttcttatgttgacaaaggggtagttttaaaacatccattttacaatatacaatacatacctaaaataattcacaaacaaccatgtacatcatgagatataaacactcattttgagagcaaaacattacccaatgcattgaagccgctgtgttctcttctgtaattgaatacctgtgtccaccagaggtaatcatgatcttgaatttcctaatttgcctatatttatactatgaatgtaggcatttctaaattatatatatatttgcaagttatatacttcacatatatatgtatatatgtatatgctatcatttttcatgaattcttccgtaacgtaattttttttttaagagacagggtctcactcttttgcccaggctatagggcagtggtgaaatctcaaagctcactacagtcctaggctcaagtgattacctcctgccttagccttccaagtacctgggactacaggtatctgccaccatgcccagctaatttttaaattttttgtagagacatgggtctcactatgttgcccaggctagtctgaaactcctggcctcaagagatcctcccaccctggcctcccaaaatgttgggattacagatgtgagccaccacacccagcctgtaacttaattttttttattcagcagtgtttgtgagatctatttaggttgatgcatgtagcagaggttcgtatttgtctcaacagcagggctttttatgctgtgggcctagttttggaaaggaaggaagaaagaaggagggagccacttaaaggccctgatctgttatgggcagtccagattgtgcacttagtgtcccaaagtggtgacccaattcacccatcagtcagctgcaagagtggcgacgtgatgcagctggcggaggaagctaattataatggagaaaactgaatttgcatagagaaccaggaatcaactaaatccaaataacatttcctggttaaaaaaacactaaataaagatttaataaatgcatgtttactgttttaaaaaatagttttttgagttagatacaacaaaatttcaaaaattaggcagttttacaagtgctatgggaaaaatagcctaattaaatttttctctcctcttttttttctccaccgtcttagtgttttctgcattctctcccagcggatctgattcctgttctgaagaattgaagttgagcatcgttagttaaattcagctgctgcctgactgtataccacagcaaaggctttggaaacatttttcagttaaaacaataatgactttcttggagtgtaatcccagtggaggctgttctacgtatagcctgaaagaatacttaactaccatacgcaattctgcagagaccttgtaaaaatcacactttacaccaaacaactgagtgattctgaattggttgggggaatcttagttgtagatatcaattcaccttcttgaagattcaaccactgctactcagagctgctgctgaaataccatgtctaagaactcagagttcatcaatctgtcatttttattagatcatgagaaggaaatgatcctgggcgtcctaaagagagatgaatatttgaaaaaagtggaggacaagagaataaggtagtattctttttattttttcagtcctccttgactgctttctgtttgtttgaagcaatttagatcagaaatgggccaagt

SEQ ID NO: 43617 - DNA, 2300 bp, Homo sapien
aaggccagagagcaagtcaacagtaagtgtggtgtttcttgtaatccagccagaatcagtggatagaagtgagctagaagttccttctcagcccagtaatagaatgtatactggttgtggtgaagacacattgcttcagaggtgacataggaaaggaaggctgctggccaggctatcctggacctggaatttggggtgcacattaacccttgtttacagacctaaagaagtagttctctattgggggcatttttcccctgggggacatttggcaatgtctggagacatttttttggctgccataactggggaaagggggattgctagtggtatctgttgcatagaggccatcgatgcatctctcaacgtgcaaggcagtccccctccccaagaaagaatcatctagccccaaatatcaatagtgcccaagttgagaaactcctggtctagaatttttatcctatactaaaacttataccgtggagcttagcggattggggagagacaaaaatatgcatctggtcaaactccaggtcacattcctaaagattctgattttattagtgtgaggtagagcctggatatggtattttcatgaagctccccaggtgacccacataaacaaggttgagaatgactccctggaaagtctggtctgatggaggccacagaatagactgacctcccccatttccttgcgactagggggttatttaagggttgttggttccctgaagaggtagcagcagtggagaaacccacaggagatggagcgaagtccccccaagtgctagagagggtaagatggacgttcaagtctggggcttttgtgagaattgggaaatggcactccttctggataaacaaattcagaacttctaggtgagtgcccccagggctcttagcctagctatcagaccagactactgtggcagagagaaagatgcccttctagtggatgtggcccctgccaagacgcaaagctccctgaacccaaaggcatttggattttggctcccacttgccccttcctctggatgcctttgtacagtgcccaaactgcacaacctaatgcagcaactccaactaaaatttgccttagctaagatctttctgagacagcaaaggggcaacgtattgccttactgatttaacaagaactaaacaaccaaaacaacaaacaaacaaacaaaactatgagaggcttactcaaatgcctcaaagaaaccagatccgtcctgcgggcagcctagaaaccctgtcctgatgccaggatccagcgatgccaagccacagggaagaggctccagtctggtcgtggtatctttggggtggttgagaacaacccaggaaatgaggaaatctggctgcaggaacctacagctggatccccatggctgtgggtgagacagagaactttctgtgccttgtgctctcccatcagctgatcctggaaggagaacctcaagccccatcctaaaccgcagcagagcaggcacgcacccggtccagtccttgatttattcctttgcaaaagagaaacaaactaacaaaaaatctgtagtatggactttgacgtcggcagaactacacacctaagttccagtccctgctctgccagtaacgggggtgaatctgggcaagtttctaagcgtcggtgtcttattggagaaagtggacatggtaatagcgaacttggggcatggtcgtgaggatcaaaacagagaacatggccatagtatccggccgcagtgggccactctgaatcccctcggttgccccttctgtttccgtgtgactcacgcagctttctgcacagatggtatccttctagacgtctgggatgttcgaggcggttgtattgaataccgtgtgtgtattccgggtgagggggcgcgcaaattggggcaaagaaagctacttcaggatatttcgctctgctggggcttgtctccagcgctctctggccagaaaaagcgctggcacaaaaggaggaggtgggtgggtcagagccccgaaccgcgcagtgttccagggggggcggagaaaggagggcaggccccaggcaggaaggagggagggaaagaggcgagaggaggagttttccagcccggccttcgcccgcccgctagcacgcagtcccttggtctcttcggtctcctgccgcccccgggaagcgcgctgcgctgccgaggcgagctaagcgcccgctcgccatggggagccccgcacatcggcccgcgctgctgctgctgctgccgcctctgctgctgctgctgctgctgcgcgtcccgcccagc

SEQ ID NO: 43618 - DNA, 2300 bp, Homo sapien
aagcaactaatcagagatactttcaattttccgtctgccacgcagaaaaagggggtgggggttgcaaagggagtagcctctggttcttttgttacttaggtatggaaagttggggtttccttttgatttagttctaggaagtcagcatgaattggccttagctttcctgcctcccgaccctattctactgcctcaattctacagtcactttccagtgttgcaagtatctcaagcctgctttcactatatagacccagtcattcctcaaatacgtgcctccttctggggcttctgctcaccaattacctgctcagcacctccaatttgatgtcttagtgtgctcaaggatgaactcattatgctcttcttgccccatttacctaactccaatgtcgccagctctttcctcagtgttccccatctcagtaaatggtgcccccctcctgctatttgcttatgttggaaaccttggagtagggctgcatcaatatcttctgggatgcttagcaccaaaatgtgccttactgtattttgaaataaaaacaaatgactgcatattaaaaagtaaatctttaaaaattctcatttgcccgtagtaacaattatgatactctaaaaatgaatatcaaatccttttcaaaataatttagggccctatctttgctgttgctctaagaactatttggtagtccagcactgtctaggagtcaatagtcagaaaccatttcctgttgattctaagacctaaaatattttcaaatctgcctgctcctctctggcaccaatgaactgtactccaagccatcctgaccacatgtctgaaattctgcaatagcctctgaacccttctcactgctccagtttattctctacaaagcatctagaccaggcagaatgatttcagggacacacataactgatcctgtcctgttgttctactgcctaaaacttctcagtggtttcacattgtctttaggataaaatctcagatccttaataggcccaagaccttgccacctcgctaggaaccagcctcgcctcttggtgttcctggaaagagtcaagctccttacaaacctttatacacaatttactctctgccaagagctctctccccctcctggcttatctttctccagttcttagatttaatgttctttcttcagataagcctttcttaacctcctacaccaggtcaacgcttcttgttaaccacttccttagtaacctccactttgctttgtaagtaaatgattatttgtgtaactaatagtttaatgtcccctcttcatgttaatgcaaacttcctgagaaagtgttggtaacacacaagagtaattcagggatccctgaatccaattgtgtctgattctagggcccatgtccacaactaccaaacgtacgtaaatctgctcattctggaagatggctttttgcttctttatttcatgatagccaaatgttgatgcatgggaaaccctgcatcatataacatcgctgagcaaattctagagcaatgatgttgggctacccctttgtgtatgttctgtgagtagtggaccatatacacctcagcttttacttttgttgactacaggctggactagctggactagctgcccacatgcttaaacagaggtaacattaaccactttacagggttgtaatagtactcatttgtccaataaatacgtaatgagcattcagtataggccagatgttggtttagatgctggggatatctttagcagagtgcttacctcctttaatgttccagctggtcactattactagtagtgtcataattgtgtgtcgatgcttgcttatgtcacggagtatgggatttgtgacgtttgccactcatgggcagggtccctgcggcgcctggacctccaacggcacaagggcgcggactccacagcatcactgcgcggcgtggccgcctctctgctccaggccgccagagggcgcgtggtctctactgcccctccgctgtgcctgagcctgccccttaccagccacccggcctccgttcccctccccaacggcgcctgtcccgccttgcattcccaagctccgcccccgttgcccgtagcggctgtttgttgacttccgggagcgcggttgtagttgatctccggagtttcgccatgcggaacttgggggctttcgcggcccgcgtcggtgcggagtagctgctttagccccgaccaaaccgtcctctacagcctcctggccccggcgcaggctgcccgtactgcccgtggcatgagggagccggaagagctgatgcccggtga

SEQ ID NO: 43619 - DNA, 2300 bp, Homo sapien
atcctttgtagctccctccagttttgactattttctgattcttgcaattcatcaaaaatcagtgccacctttttcaggaaccccatctaatccccaccccctgatgatagaagttaggagagggtcacgtcaagctggaggtctcctgtggcttgaagcaagggagcaggtaacaagcccctccacctggttaagatgtttggggtcagagagcagagacagaaattgtattctggagtcattccaaatggtgaatattggaaggaactcatcattcctgttttatcactctgtctctcagaacccacacagcacagaggattggcttatgatggctgcacaattgttgatggtggcagagaaaaatggatgaatgaaaggctaggtgaacaaagagaactagataggtagtgaaacaagaaagttaaaattgaattagaggaatcatggggtcaacaagagcccctggatgaattctgaggatgaacatcaaagcctgtaaagtaaaacagactccacatgtgacataatcagcagaagctgggtagttgaaatctacccctcaacaagttcattgagatgccctgccttttgagattcagtgaaattgcttttaacttcatcccacttgtgatgcagctccccttttccaatccctctgggagttattggtatcttaacttttttttagttccctctggctttgagctcctgcatctgtagcattaggagggtttgtgagttgctttggcatctcagaaatgctgcctgtactctctagcatggaactgcagacacttcttgatttctccccaagcattaccaatatgagttgtgtgtatggctagcacagttcagtgaagatatggggtcaagctatgggctttatattagcctgtggtttggcctcatctccctcaggctccatgcaaacgttcaatttcactcctgtattatgtggagcgcttttgctctctgaaacctattcaataactggccttgtttgcctcttcaaagatgctttattatgttttttaaattcactctctcccttctcacctctgtacctttgcaagcagttgcttctgcctggaatatcctttccagaatggaagatttggtagaggttgggaaatgtcagtctttcccctcactttatctcacatcattctctgtaagtagaaggaaatggtgacaatatttatttctctactagtattaattatgacatcacaaacatctcggctcctgaggtggccatagttggtctttaaataacactttttggtattccacaaacttctggaaaatatttacttgggtttgctaaagtcatataaattgaccagaagaggcagccctacccctgcccctcctctccttcctcctacccttcctaccttagagggctcccgcttcttcgaagccagacaactttgtctggacctctcctatgggcttgtattatggatatttgtttataaatcataccacctttactgaactgtgaactctgcaaagatgatgtcatcttccctctctgaaacttcagtgcagctcggtatctgatacagaattgactttgaatcacctgatttctaactgaggataaatgaataaatgtgaagttgcagatggccccttagtgatctgaataggctgctaggggaagagcatatggtatccccacttcccacttgtactgactgtcaggtgctgttagaatcaataggcaactatttcttttctttttctttctttctttcttttttttgagacagtgtctctctctgtcacccaggctggagtacagtggtgcaatctgggctcactgcaacctctgtctcccgggttcaagcgactctcatgcctcagcctcccaaatagctgggattacaggtgtgcaccaccacgtctagctaatttttgtatttttagtggagacggggattcaccatgttggccaggctggtctcgaactcctgggctcaagtgatccgcccgcctcagcctcccaaagtgctgggattacaggcgtgagccaccgtgcccggccagcaattatttctttattgaagacttatgtgcaaggcacaaagggagctccaggactgagatatttttactataccttctctatcatcttgcacccccaaaatagcttccagggcacttctttctatttgtttttgtggaaagactggcaattagaggtagaaaagtgaaataaatggaaatagtactactcaggactgtcacatctacatctgtgtttttgcagtgccaatttgcattttctg

SEQ ID NO: 43620 - DNA, 2300 bp, Homo sapien
tacccctcaacaagttcattgagatgccctgccttttgagattcagtgaaattgcttttaacttcatcccacttgtgatgcagctccccttttccaatccctctgggagttattggtatcttaacttttttttagttccctctggctttgagctcctgcatctgtagcattaggagggtttgtgagttgctttggcatctcagaaatgctgcctgtactctctagcatggaactgcagacacttcttgatttctccccaagcattaccaatatgagttgtgtgtatggctagcacagttcagtgaagatatggggtcaagctatgggctttatattagcctgtggtttggcctcatctccctcaggctccatgcaaacgttcaatttcactcctgtattatgtggagcgcttttgctctctgaaacctattcaataactggccttgtttgcctcttcaaagatgctttattatgttttttaaattcactctctcccttctcacctctgtacctttgcaagcagttgcttctgcctggaatatcctttccagaatggaagatttggtagaggttgggaaatgtcagtctttcccctcactttatctcacatcattctctgtaagtagaaggaaatggtgacaatatttatttctctactagtattaattatgacatcacaaacatctcggctcctgaggtggccatagttggtctttaaataacactttttggtattccacaaacttctggaaaatatttacttgggtttgctaaagtcatataaattgaccagaagaggcagccctacccctgcccctcctctccttcctcctacccttcctaccttagagggctcccgcttcttcgaagccagacaactttgtctggacctctcctatgggcttgtattatggatatttgtttataaatcataccacctttactgaactgtgaactctgcaaagatgatgtcatcttccctctctgaaacttcagtgcagctcggtatctgatacagaattgactttgaatcacctgatttctaactgaggataaatgaataaatgtgaagttgcagatggccccttagtgatctgaataggctgctaggggaagagcatatggtatccccacttcccacttgtactgactgtcaggtgctgttagaatcaataggcaactatttcttttctttttctttctttctttcttttttttgagacagtgtctctctctgtcacccaggctggagtacagtggtgcaatctgggctcactgcaacctctgtctcccgggttcaagcgactctcatgcctcagcctcccaaatagctgggattacaggtgtgcaccaccacgtctagctaatttttgtatttttagtggagacggggattcaccatgttggccaggctggtctcgaactcctgggctcaagtgatccgcccgcctcagcctcccaaagtgctgggattacaggcgtgagccaccgtgcccggccagcaattatttctttattgaagacttatgtgcaaggcacaaagggagctccaggactgagatatttttactataccttctctatcatcttgcacccccaaaatagcttccagggcacttctttctatttgtttttgtggaaagactggcaattagaggtagaaaagtgaaataaatggaaatagtactactcaggactgtcacatctacatctgtgtttttgcagtgccaatttgcattttctgagtgagttacttctactcaccttcacagcagccggtaccgcagtgccttgcatatattatatcctcaatgagtacttgtcaattgattttgtacatgcgtgtgacagtataaatatattatgaaaaatgaggaggccaggcaataaaagagtcaggatttcttccaaaaaaaatacacagcggtggagcttggcataaagttcaaatgctcctacaccctgccctgcagtatctctaaccaggggactttgataaggaagctgaagggtgatattacctttgctccctcactgcaactgaacacatttcttagtttttaggtggcccccgctggctaacttgctgtggagttttcaagggcatagaatcgtcctttacacaattaaaagaagatgctgtttaatctgaggatcctgttaaacaatgcagcttttagaaatggtcacaacttcatggttcgaaattttcggtaagtgatggtcagagacttgggtttgatttaggaatcatggtgatgcataaaactatattctgcagtaaggcctctttctgcaga

SEQ ID NO: 43621 - DNA, 2300 bp, Homo sapien
tccctgctgctgcagcagttggaatcagcctggagtctgtaagaatgaaagagaaagctcctctctgaagttgggtttaagttcattgcagtatggggcaatgcccctcaactcttgcttaatattcagaccacctgaagagcttctaaaacgcggagctttcaccccacaccaaatgactccaaatagctgggattgggcacaggcattcataattgttttaaaacaccaggtgatgcaaatgagcacccagcatcgagaatcagtgtgccaagacccctttataacagacaccttgctcaacctgtcccttctttcacctgcacctatattccacccttgtatgcccacatacctttttgttatagttgacaatttccttaaacaggttctcctcttcctcatatttttgtcctgttcatacagttaccttattgacctgagaccacatataactggatagaggtaataattactcctgtaacaactgaccttagcaggcttttcccaagccttattgactctgtttttcactctttcacaaatatgtatccttaacatcatcatccacgattgagttaacctgtgatagtgttgctgtttttgactagtctcttagcaatcaagctaaatctcccactgaatctgtgtgttcctctacaaaccatatctgggtggaatgtacgtttttattgtgatataattaatatatcataaaagtcatcctcttaaagtatacaactcagtggtttttagtaattcacagtattgtgcaaccatcatcactatgtaattctagaacattctcattactctaaaaagaagccgcttacccattaaaagtcacctcattcctgcctcccactcgctgcaaccactaatctcttttgtctctatggatttgtctattttggatatttcctatacatgaatcattcaatatgtggtcttttgtgtctggcgtctttcgcttagcatattttcaaggttcatccacgttgcagcatttaccagtagtacttcattcttttttgtggccgaataattttccgttgtatggaggcaccgaattttggtcatccactcatcagctgacggatatttgagttgtttccaatttttggctattgtgaataatgccgctataaacattcatgtatatggttttgtgtgggcatatattttcatttctcttgggtaaatacccaggaatggagttgctagatcatatgcaaactctgttcaactttttgaggaactccaaattggttgtgaacattattttttgacctcaatgcagctttcctttacaggagggaggtggactgtacttgttagcgcgctgcaaatgattctcaggcatattaaacatttttctgtattctgttaaacattgtatgcgcagcaagaatgacgcctcatacagacctttcttgtcatttcgttttattatttcaaaatgtaagacaaatctgaaaaatggaggagcctgcagatacctgtggtggcgaggatttggggtctgtctgagctccggcgttcctgcccatccctccagctgtatctctggccacctgtctgttcctggcacaaacaaggcctgctggttgccaaggacatgactacggggccatttccatgtgagaaggccctggggggtgtcaaaatgcagaaacgtgactgatgggcagcggggcacccataaacttcccatagccaggtgcaggcatacctgcaaatgtaacgcccaactgtgtacaaagcagaaatctaaatgccagggcggactgggagaggttcccgtgacctctgacccggcctctaaattctcccattccctccccactgtcctgccgcgccccgtgtcgcctcgcctggcctcgcctggcctcgcctccctcctccgctgggggtctaagcctgcgcagtattgcgaacgcgggcggcgtttcccgcatgcgcagtcactgcccggcccggctttttcagtaggagccccgcgcggtgcgcgctcacgcacgcgcacggcctcgcctgcgcgctcacgaggcctctcgcggcacgcgcccccgccccgcgccgccccgccccgccccgcctcttccccctcccgcgcgcccgcccgccgcctgccgccgccgccgccgccgccggagctctgtagtatggcatcgaggagaatggagaccaaacctgtgataacctgtctcaaaaccctcctcatcatctactccttcgtcttctgggtaagtgcccacgccgggccggtggccgagtcgctgtccatcggtccgtatgat

SEQ ID NO: 43622 - DNA, 2300 bp, Homo sapien
atcaaatatatgggtaagatccaagtgcattacagcacagaatcaggacccaaaataataaaacaggctgaactaatgggccaaatccaatgagataaagtttaagtaggataatataaagttctgtactttggtccaaaaaatccccactactcaagtatagggtacacaaaattttgttatatagatggcagcatatagatgtagctgttaaaataagtccattaaatgttaggcagcattataagcagtagctatctattgagtagtagaaagaacattggatttggcattagaaaactgggtcaaatcccagttctgacagtttggcccttaaactctttgatccttgctttcttctcagggtggttgtgaagttaaaatgagttaacatgtcttttgagttaacaagtctaatttccaagcacttgtgctcaataaatatgacctagaaaaattaccattcacaataatataagtggctgtgccactccattttgtcctagaaaagatggtacttggaatgagaggggccacactcaaaagcaaaccagagctacttctaaagttagtgactaggatggatgagcgactcaaaagagaacatgaagaatggctacaggaactggggataactgacttgaagaacagtagacttaaggagaccatatctaccttcaaacatctgatggtgtgcttcatggccttctgtagagctccaaaagatagaagaacactggagaacggaaaatagaagaatgtaggcaagggcgaccacttggtggggatgttgtgagcgatttcagcacaagtggatggttggactacatggcctttaacacgagagtctgactgtcatatttctaggacatttttcatgaaatggatccttctaagtctgtctcaaaataatccaggatctctgctatcttgggttgggctggcttcttgccttaaaatatcatctttcttccagttctaggccagatctcttctttatccagtctgactttcttgcaccagtttactcttgctgactactttgttcaggaatttctggtcacttttaaaatgtcattccccccccccaaaaaaaaactatccaagggacacagtacaaggataatttgtggacatttttggggagatgagccagcaaagcatgctttccaggttgcttaattaaaagagtgggaattaagaaccagaatttaagagttccggcagggcgctggtggcttacgcctgtaatcccagcactttgggaggccgaggcgggcggatcaagaggtcaagagatcgagaccatcctggccaacatggtgaaaccccgtctctactaaaaatataaaaattagctgggcgtggtggtgcgcgcctgtagtccaagctactggagaggctgaggcaggagaatcacttgaacccgggaggcagaggttgaagtgagccgagattgctccactgcactccagcctggcgacagtgcgagactccgtctcaaaaaaaaacaaaacaaaaaaaaagagatccagaattccagaattgcaactgtgaaccaagaagtggggatgggtacctcagacaaggcttttaccggaaatttagcatataggatagaaagcagagaccaaagacctcttgctttgaggctgttggcgtgctacaaggactcgaaagttatttgttcaacggatgacttctgttttctggaggcaaactgaattccgggcaggtggctcagcacctccagcctgttccagatcgggacagggaaggtgcctggggcaatcagtgaggtttccaaccttccttaggcctgggccagcccgctcccctcccatgtgaccccaggcaaccattttaatttttttacagccaagcgtagtggagaactggctgcgcgccggttgccagggacgcggcagccagcttggcggggctggggtgaaagaggacgctgcgtgggggagggctccgcggcttctgactggctggagcatcaggattcatttgcataatattttctgacggcttctgattggctgaagccagaggggcggtggtggggtgattccaagggcccagagctctggccggcggaccttttccttctggagtttccccggcgggtgtgagttgttgcggggtctgggggagctgggaggcccggtttgggaagttttgcaggcaggtgcatgagccatctttctctgaaagtgtttaagaaatgttcaagaacagcggccagagtcaagaaactgggggatgaagggttatctcgagactagacggaagga

SEQ ID NO: 43623 - DNA, 2300 bp, Homo sapien
gtttttgctgggtggaatccttttgctagatcccttggatttccgttttccgtgtgttatcacactgttggaactgggaagaagagaaaaagaggcaagattttggcatttagtaagttaagtctgaataccgagttttcatccgggtgcatacgtacttaaaataccaaatgggtccaggaagggggacaaagtacgctttaatttatgagaagatcagctactagaaactgtatatctgtttttctcgagttttcttcttgcagtgctctttcaatctcattggacatattttatattattttcctgcttaagcactgggggttgggtggaaggatctgtggctcatcataggcaatttccacacttttaaggtttctgactcttcacataaacacctctcactatgatgaggtcctgtatcaagtacaattaatctttgtactttacaatttacatagtgatttttatttacattatcatatttaaacttaatcaaagtccttggcacggcccatggaacaagctccatttttttgataaagaaactgaggctagaaaagtttctatgtgtgcagagaaggaaggtgaaattattttaatgcttcaaagttatataatgcttcctgcctccctgtatttttctttccattgatcttccttcaaaaccctgataggtctatcccagttttgcaagtaagaaaacatgggctgtgatgtagagctaatacgttttggggtagtgggtcctcagacttaggtctgtctccaagggtcactgactttgttttgttttgtttgttttttgtcaacagattagtccttgtggcaccaagtcagaatttcattcaaaagacaattaggaagatggttttctatggaaaatatttaagtgtaggtcttaatgtgaaagaaagagggagagaaagaaacccctttattatgttctcccttccttaggcattttttgtcccgtgggaaaaaactgtactagggacagagacctctgttaagttttagagaaaagggatcttttttttttttatttgagacagagtcttgctctgtcgcccaggctggagtgcagtggcacgatctcggctcactgcaactccgcctcctgggttcaagcaattctcctgcttcatcctcccgagtagctgggattacaggcgctggccaccacgcccggctaatttttgtatttttagtagagaccgggtttcaccatgttggccaggctagtctggaacccctgactttgtgatccgcccgcctcggcctcccaaagtgctgggattacaggcgtgagccaccgtttcaggccgagaaaagggatttaaaatgagaagcttgaatcttattgaacataattgtaggactgccagagaggactggtggatgaggaatatggcaagggacatgagatgggaaaaattaaataggctgtggtttggaagtctcaaagtgaaattcaaggtgcaaggctcttaaaagttaaatccagcgattcggtacatagcttaggccctattaaatgacccagtgctttaagaactatcttttgaaaggaacacttcacacaagcaccctcaaaaataattagacacctccccatttctctgttaaatggtgaaagacacccaagactagacctaactactgtcaccctctcctggcctcttggcagccaaaaggccacatggcccaggctctccagcatcactgtgtagccgacttggacaaaaatggacttctccccattgccacttgcagatctcttcaaagaatcagcagatctgatagtgtgcccctcttcatccccggcaaccactgttaaaggaaagattgggaaagatcccaccccgccaggagggaggcaaaagcctctgacgctcccctccccccatagctgaccaaggccagggccactgcgggagcaccgcgcgtccacgtgcacccagcatgcccggtcaccctttattacgtaagagtcccaggatggagttgtacctgctgccggcccctcttccccgacggctaataataaacccgggttcctgtttcccggccgcggccactccagattcggggctgaggggctcactctgcaaccaaggcacgtgcattctggtcatcccacgcggggagcgcgcgcaaggcccgcccagcccccacatgccagccccaccctccagtcggtccggacgccgacgcctttttgaccctcgctgtgcccggccctcctcatctggcctgcccagggcttggtgctggcggggtccagctgctccaatccc

SEQ ID NO: 43624 - DNA, 2300 bp, Homo sapien
cgcctgtgtacttccttgtgctcaccaagactgaggcacaccttgctcctatctgttcttcagacactggtccaccctccccagtgcctttctgttctcttcccctatcttcacacctctcccttctactcagtctttaaagatcatgtcgcctttgctttctcagatagcctttctctgaccacctttttaaaagcagacccttacccccacccaagttatacattagcaaaaaacagtgattatttccttcatagcctgtatcactttctgcaattaccttgtctattcattttgtttacatatttctctgtctctctttatgcaaatgtaaactctatgagagcagggaccttgcctgtcttgtttaatgctatttccccaatgcttggcacagagctgaagataatagaagagacatattgactgtttgttgactactaagcgagtgactctctctttaacaagggctcaaaactgtccttcaggtgctattggtagctgtttcaggtagaaataggttttattgcatataacagtggcttagtcaaattgtgatttgcttctatttttcacagaccgcgaaattcaggggtagtcagtcagtctaggactgtaccatggttctacaatgccaccaagacagggggattcttcatgctttcatttggctgtcctgaatgggtggctttcaactttatgcttgttgtttcacggtcacaagatggctctctgccctctttataatgttttgtacaaggtaggaaaaagaaggtcaaagatcaaaaaatatcaattggctgagtctccctttttaaggagctgtcatgggctgggctgcccagaattcagactcttagatggacattagcatgtgggagatttatcacggagaccttttcggatcaacaagagagatctgggtcgtgcacaaaagattctaccatgcaagctttcttgaaagcccatatactaacttctacttatatttcagtggccagagctgtagcatgtagctacctttagctgaaggtagctgcaaaatatagacttctagttgggccaccatgaacaaaatgaaggttccattaataagaaagaaggggaaaatatttagggtatttaagcaggtgaccagtggcctctgccatggtgccccttctctactctcttatctctcttctctctcttctcctactgttttagcattaaaaatgaacaaacaagcaaacaaaccaaacacataaacaaagcaaacaaacatgaataaatctccttcttccttcattagctaataaacaaaaacttattaaaagtctcacaaaaactgtgtaaaaacttatgtgtatagaccttgcaaggaagatggttgccactatgctaaagatattttgatcttcactggggccgactgagccaagatgaagagatgtagattcatccccaggaaatacaatataatgtggaaacaaactaatatatgacaacctgatataagacaataccctaagtgggaggggaggaatgttctaaaggcaaaggaaactgaaaagaggagcaccctggtctatgtcaaagagacagggaaggctccagaaatgcagagatactgaagacatcatcataaggaaagaggagcatatattttgcaggggccagaggggcagggagctggatgacaggcaatatacaacccaagctggaggaactgagcactgggaagccagaatctaagcatggtggagacagagtgtgggacaagctcaggcacctgcagcaaaaatagtgctggccaaggagccatagtcctttccctggcttttcactcctcccgcctaggtccagagatgctcctctgggcagatctccaagctagggaaagtgtggcctcttgacaatattgctggagaaggagggaggaatgaggtttgtagcccgtggcaggtgggtaatgcctatgagtgaattaaattcacacaagcagccctttcacaatcgtctagacaggaaatagagaagggagctcagtggaaaacatcagttgtgcccacgcacccaactgttccagtaacataaaagcaacagcagttggagatacttaaggcagccatggtattgacagaaaaagactctggatttggattgcagctgtagcatttattaaatgcacgtcacaacctctctgagcttcgttttccccacgtttcaaatgggatgcagtggaccctgttgcctacccggtaactttttaccttctttatccttttttacaaaacctcaatgtcattcaggaatcctcc

SEQ ID NO: 43625 - DNA, 2300 bp, Homo sapien
tcatttattttcttacctttttttcactcaatgcattatcatgaagaactattgccattgttgtatgtccattttgtatgttgctttttgctgctgcatggtatttcataaggtgcatccaccttagtttccttatccattcctttaaaaatggacactcagtttgtatctaactttcctccaggttgtcaccaacaagctcagtgaacatctgaataaagatgtccttataaacctgtacatgagtcagttcctctaagctgtatgcctgggatgtgggaggtcaccagatcatagcgcatgtaccaactaaatttcactgagacaagccagattgttttttaaaaagcctgcactcattacacaccccacagccatgcacgaatactcccctccccacatcttcatcaacgcttggtatgttcacctttttagttttggccattttgatggttataaagggtcaggtactttacacatgatagcagatgctttggggccccaagttgcatcttggagcaactttgatatctaccccagtggagatggacccatctgtatgagttcagagtcatatcaagcccccattgcctatatcaaagacttcagtaatccatttgtgtcatgacttctcttctgtcccccgtttctctctcttagctccttgagcttaccccccaagtaaactacccataaccaagtcctctgctttttagagtacccaatctgagacatatatattgttcctatacccacaacaactctgtgaagtaagtgttcttctcactttaaagaagaggaaataggctcagaaagagtaagtgactcgcccaaggtgacacagctgataactgactgagctgggattgaagcctgtgaccatcagtcattctttcattcaggtatgttttgccattgtgatgtgtgctttgaaggatgccaaagaagcctgggtctcagcacctgatgaatgctctcactggggaactaaacaatgtaaattaagcagtcaaagatgagtgccattctttgttcatttattcattaattcagcaagaatttattgaatgtctacagtgcccaatattagtgaatagtagtaaacaaacacaatgattaccttcatgaagcttatattctggcagggggtatagagaaataatataaataataattgcaattaataagctgttcattcttccaattactttccatcagcctggattacatttggctgcatagaacaaaaccagactccaggggcttaagcacaaaaggctttatttttcttccataaataagaagttttgagataggcagcctagtcctgatgcatttgctcaggaaattcaggaatatagactgtttttcacttctggttctgccaacctcagatggccagatagtggctgctccacctctcaacattgtgaccgtgtcccaggcaaaataataggataagagttaaagaaaagaatcaaagggttcacttctgccaggtctttccctttagcaaaacaaaaccaaaaacctttcctgggagtactactcagcaacttttacctacgtctctttgagcaaaactgggtcacgtgcttgtgcataaatgcaagagagtttgggaagaagtagtttaactaagtacatcatcacaccagacataatgggggttctattagtgtaaggagcaaatcgatagtgggtagtgggtaggcagtgttgggcacaattctattctgtctctcaatttacatgttgaatgaggttggaaaaagtcattgagtgtgaggaaaggagatacctgtgagaaccaaagacctcagctgcttctcttctctcatgctgtctcctcctgctgtcctggagtatacttgccaacaggtctgtgagatcttaagaactaagagagtgagtacagagtaacacatcttcagttgaatgatgcagaggggtccttgtctctttaattattatctaacgtcacaaagatcatctttctctggattatgacaaagtagctgatgctgtgagtaccccacccacattccccttagcatttaccagtcctgtgcatgccagcctgatttctgactgcaggaagctgtgtcttgcagcctgtgggctttttctggctgctgtggcccactacgcctgcagcaggactggaggcttgcaggactgatacccattccccagagcaaccctcaaccaatgaccttcaggattgggtggataaatatcccagctctcttactcttcaggtagaatggctctaagatgtattttctacattgtcttcc

SEQ ID NO: 43626 - DNA, 2300 bp, Homo sapien
tagcacagctgatctttaaaaagggagattatctgagtgggcctaatctaatcacacgaacccttaaaagcagagaactttctctggctggtggcagaagagaaaagagaagaaaaaatcataaaaaaataaaagcacaagaataactccaagtgcccttgttgactttaagatggaggggaccacgtggaaaatgtgaggagaaactgcattctctcaacaacctgagtgagtttggaagtgcattctttcccagattttccagaaaggaacacagccctgttgacacctggattttagcctaatgtgctaagtgctctaagcagagaatccggctgagccacttctgacccatgaaactgtgagctggccactgtttctgaaaatttgttacatagcaagagaagatgaatacagatgttaaggctgactccacgcaaaccacgaatagttgagaatggtagaaaaatggtttcctaggtagggttaccagataaagaaaaatacaagactcttagttaaatttgaatttcagatacattatagaatttttaagtataaatatgtccccagttccccagtttgaattgcagataaacaatgattttttttttaagtatgagtatgtcctgtgtaatatttgggacaaacttttttttctttttttctttttttttttttctttttgagagagggtctcattttgtcacccaggatggagtgcggtgatgcggccccggctcactgcagcttcaaccttgtgggctcaagcaatcctcccaccgcagcctccccagtgactgggactccaggcatgtgtcaccacacccagctaatttttgtattttttgtagaaatgaggtttccttgtgttgcccaggctggtctcaaactcctgagctcaagaaatccgcccatctcagcctcctacagtgctgtgattgcaggtgtgagccactgtgcatggccgggacaaacttatactaaaaaaattattaattgtttatctgaaattcaaatttcacagcccaagtcacatggaaagtccaggtgttggcactctggtagacagctgacttcccagatgacagctgttgtcaactgccagcgcctgtgcaggcaccatcttggatgtccagcccagttgaatctccagaggaatccagccctggccagttcctgactgcaactgcatgagagaccccaagcaagagccacccacctgagcccagtcaatccacagaactatgagaggctatcataaattgttgttttatgggatggggttcaggacccactactccaaaatatggcaccttggcatttgagaaaactacagaagcaggtaggactttctgatcttctcccaaccttttcccctgaagcaggccataaaacctggaaaatacttttttgacttttccatgaagcaggtcataagaccctcatgtgagaggtggtaccctttcaatagccaacagaaaggaacttctttatgtctgaagacacagggacgcagagaggaacctgaataaacaggcttgcgaagttcctctccccaccccagtttactaccattggatcatacattctttgtgcaatcatacttctccatgaccagccacctcgtcatcaaacctaagcataaaaatttgcaagtttacccatttctttgggttttcatttctgagtactctcatgtcacgtaaaacgtatatgaaatacatttgtatgcttttctcttgttaatcgatcttgttttaggtgcctcatccatgaacccagtgatgaatgagaaaagaaatcttttctcccctacatatgcctccacgttttagggtggtttgctatacagcaatagaccattgaaacagggagaacggccttctaatggatatgagaagtattttcaggggcataaagcaatactttcttctcccttaccactgcctctccccaccttttaaactcatttcttaaccttttgataccactgctggtgagctgaaagtttcatattcataaatgtcacagtgtagtggttaaggccaaagacaggtaagtcagaaaaatcttggctcggctctctgctcctcctgttctacagtcagccgcatcttcttttgcatcgtcagccaaaccacatccctgagacaccatggggaaggtgaaggtcggagtcaacagatttggtcgtactgggcgcctggtcaccagggctgcttttaactctggtaaagtggatattgttgccatcaatgaccccttcattgacctgaactacatggtttacatgttcc

SEQ ID NO: 43627 - DNA, 2300 bp, Homo sapien
ccaaaagtcattttgtttcttgtcatgcttttagttcagtgcccggcactcagtggaacctcaatatttgttgaaaacgtgaatgcgtggggcttggggcaaatgctggaatcgcaacttgataataaagtggagacagagcaggaaaagcaatgattctcctcacatgccccagccctgaaactcacgctgtctctgaccaaggccttgccaccctgaaggctctgggtactccataaacagaggtctcaggaggcctcccccaatcaccagtgcgtggctggagggctcaaggttgggcacctggggggcctctctgggatttcaagtatgggaacctttgaccagcggcgcaaccgaggggtggagtaatgcctttgtggcattttgctcctgcatactggcaggtgaggctagactatgcagacccttttatatctgccacagccctgggaccagatgctctggccctcgcagatgttttatatatgtttttgtggagtgaaagggaaaaagacgcagcagcaggtgtctacactggccaacgccagcgagggcggggaagggcattcttacttcagagagtccacagatccagcttctcatctcccatagccctcccccttttgaccccagggctcccctgcaggtttctgcctttgagagccaccttgcccagggagtgccctgcccacagcctgcagggtggaaaagaaaagttgttttcccggctggctgctttggggactttaccgcctgcagtggtctgtagtcctagctcagctttagaatcctctgggagcttttaaaaaatccttcatacctgggctcccactcacttaaattgaatccaaatctctgaggatggaacccaggcattgctagcttcaaaaaccacaacaacaggacaggcatggtggctcacgccttaaatcccagcactttgggaggctgaggcgggtggatgacttgaggtcaggagttcgagaccatcctggccaatatggtgaaacccgtctctactaaaaatacaaaaattagctaggtttggtggcgggcgcctgtaatcccagctactcaggaggctgaggcgagagaatcacttgaacccgggaggtggaggttgcagtgagcccagatcgagccactgcactccagcctgggcgacagagtgaaactctgtttgaaaacaacaacaacaacagcaacaacaacaaccacctggtgattccgttgtgcagccaggtctgaggcctgcggtggtgctggttgagagatgtgccctggaacctgatctactgacctttgccatctggtaccctccccttggccagttcatgccttgccggctttcagagcttgtcaccagcgctttcatttgcaaaaagtcttctggacacggggcctgactcctcggatctctccctcttgccgcagcccgcttgtttttggaaccggctgtttggtaattaatcactccttccagggcccattctctgccccttgcattgttatttatcttctccagtgtttactgccttgactcaacttggattatatactccctcctcttacttaacccgggttccattgggtacagaatcaatgaaaaagaatttcaaagtgcaaatgccctggctccagaatgaagggagttgagagatagaagatattcctagtagtttctcttggggtttttgctggccttcacattcgggaagggaggcccctctgcatttgggaagcacagggattcccgtcagggggttccaggttccccgcacagggtgaaccacatgaaacatttgttgattggctgaagacagccctggagccggtagagaaacttctggggacaagtgcacagccgggtactgtgaagagtgcttaattcggacctccttttacagaggaggagaccaaagccagagagaggaagtgagctctggaaggccacccagtgagctcctgctagagccagccccaaaaagcagccgaactcagcccagctgccccgtctccttccacgacctctggctgcttcctggaaggcaggattactaaattgatagacggcaggaggtccgtgaacttggatgggaagaaaaattacatcttcattttcgctaacctctcactgaaatcctttaatagacgtaggaaacaaaccacagtgatattggcaggagctgtgactttgtcgccaacagaaatcacagatatttccatattatgttacagttactgcaggtatctcaaataccaattacactcatcattgttttgaaattacagcagtt

SEQ ID NO: 43628 - DNA, 2300 bp, Homo sapien
aaagaaaaggactctgtcctttgaaggactagtcatgaagggtgttttctcctaggggtgacctttggtatcaaggtacaaactgcaagaggaaggggaattccaggaggaaagtttgggtgtttagcgtctcatgtctgcctggagcttttccatcctggaaacctgcttttgtttaaccctggaaggttctggggcctatacaaggaagggcggccatgttagggacactgttcagtaaaacaggacccacctctcccagcggctggtgatagaagtggagtcaatgcagacaggctgtgaattgggctgtttttgtgtcagtataaagaaatacctgagattggggaatttataaagaaaagaggtttcattggctcttgattctgcaggttgtacaggaagcatggtgctggcatctgcttccgatgagggcctcagggagcttacaatcatggtggaagacgaaggggagccaatgtttcacatgttgagagtgagagcaagagagagggaggggaggcagccacacacttttaaacaaccagatttttttttttttttagatggagtcctgctctgttgcccaggctggagtgcagcagcgtgatctcggctcactgcaacctccacctcccaggttcaagcgattctcctgcctcaggctcctgagtagctgcgattacaggcgcgtgccaccatgcccggctaatttttgtatttttagtagaggcagggtttcaccatgttggtcaggctagtctcgaactcctgacatcgtgatccacccgcctcggcctcctaaagtgctgggattacaggcgtgagccaccctgcctggcctaagcaaccacatcttgcatgaactaactgagcgagaactcacttatcactgaagggatggcgctacaccattcacgaggggctattcccatgatccaatcacctcccaccaggccccacctccaacagtggggatcacatttcaacatgagatttggagaggacaaacatccaaacgatatcaggctgaaaacacggctggcacttgaaactttagagaagtcaccttttccctgggctcctcgctctggtctccctgagactgtcacagcggcttcataggtgcttcgagtttctttgccaccccctgatcaggccttctgtgttttgtagtagtcgccttcccagatttattgagtagctcagctgaaccaaggtctgagcattcaattaggtcttgttattcatccgttcaccaaatatttagtgagccatgtgccaggcacatttctagctgctgatacagctgtgaacaagacagatgaagcccttgcccttcgtggagctcacattttaataaatagtttggaggcggacaaagagaaaataaacagagaaacacgaacctggagcatttggctcacaacttagagttgactcatcttcagtttgacgtccctcctgctacgagttcctggctaactgacatctcttctcctcaagcagatgctaactttgagccctaccactggtgagtgcccctaaaggctcacacctgtgatcccagcactttgggaggccgaggtgggcagatcacttgaggtcaggagttcgagaccagcctggccaacatggtaaaaccccatctctagtaaaaaaaaaaaaaaaagacacaaaaattagttgggagtagtggctcatgcctgtaatcccagctactggggaggctgaggcaggagaatcgcttgaacctgggaggaggaagttgcagtgagccaagatcacgccactgcactccagcctgggcaacagagcaagactctgtctaaaaatatatatatatatatatatatattccagcttcaagatgtcctggcacaagagatctagatccatgttctctctcagttggctaaggtccactttctgaacaccagtagggccactttccacttccagacgttttcttcccaagtgattgatggaacaggtgacgtcatcctcagagcacaccctgttcgttaccactaaccctgacctctacgggataacattggcagggaccttcctacacttactttagtaacagagatagattgctttatcactgggagtttccttattattttaaaaataagttagtgttttggaggaggaaataacatttccccgagatttaggggaacactgcagctaacaaggccctctgaaacggcaccaaacagaagaacatgttaagacactatccttattaggatggtggggcgcttcctctgtctcgtggttaattccgggcg

SEQ ID NO: 43629 - DNA, 2300 bp, Homo sapien
cggagtcctaggacacatcccacaaaccgaggtgaacctaagccaccggctacgtctgaagggaggacagacgagacgaggggcagccaactgagcgaatcactctgccttccgcctttgcaaatgaatagggctctgtctacagcttccgccattcctacgccagatctgcaacgcctaaggcttaaacttggcgcggcggtaaatttagcccgaaggcagcggctcctaaggggcggggatgtctccttggaagaaggaaagggaacagggtaagaaaatggagttgcctctaggaagaagaatcaggcagaggaaacattcagggccgctggcggaccactgacaaaaagaaatcggacgcaaaagaaacctccccagaagaaactgggccaccgtgggagccgtgcgagacagacttcccatctgggaagggctgcctacgggtaattgggtttgctcgagttgcctctataattaataagtgatttgacttggagattggaaatagtcatgaaaggaagccgcgggcgtaggggtgtgaggcccaggagcctccatccgaaatccaaagaccgcggaggaggacggtttaaggaacaggacgaatgtgataatattggcatctaaccttctagtgtttgagtaattcgttgcttagctactttggataggccattattttgcaaactggaaacatttgcaagtggtgatattttgctcttgcctgacgcaggggctgcaaacctacgccggctctgctgaactcttcgaaatatatatgcataaattgttcctaatgagaccatctgttttttatggcccctctggaagcaggaggaacccgaagcctgctccgtcttgcagaaatctgtggccaggcaggcctgggaaataaataggggagattagaacggtgtgcgtgatttaacaatacgcagaacggcaagttcggtggtcgagatgtgtgcctcgattcccaggggtgcgggtcatttagggtgactccagacatgggggttcctcctaggaggcccagggactttgcggagttccacggcacacacgaacctcgtttttccatatctggaacatcgccagagccacaacgcgaaaccacgagcctgtagctgctctggggacccaaaacaagcacccaggttgtaggtggtccccgacgtcgcccactatctagggcctccttctacggtggtgaagggagctgaacctgggccacagaggcagagaacgagcatcactccaccccatacccgggtcagagcacagagctcattccgggcctatcccaaagactgagctgctccgcgagcgtctggcaggcccagcgccccggcctgagaccgcactgagggtggcagggcaaacacttttcacattaccgcgtggctgttaattggggcagtgcaaaagacgccgcgactacccctttgcggcggcgggggaggggggagcgggtcaggagtgggcagtgggggctgcttataatagaaggactgccctggggagcctcagatatcggtaacccccatgattaattcataactctccactgcgcctggcaccgtctcgggtctttaatcggttctgaatgtcagcgaggcttccccgacagcctgagcactgctttttcaatgtgttgaaagtcgctgcgcgcacaccaggagacaaagttgccatctgctccggggaccaaggcaactgggcgctgggaggggccttcctcccgcggctcccgctgccccgggcggcctcctcttcccggcctgccccaaagccaacactgtcacccggaacgtccccgccccccgccccgggtgcatgcatggtggaaactccggcttgcagcgaaacagagcgctgcgcgcgggcgcgcagggagcctcgcggtcacccagaccgagacctatgctaatgagattataggcccgggttgtttgtgtgcgcggacgtcaaagggggggcgcagataaagtgtggaaaccgggatgacttggaggggggaggggcaggaagccccaggagaacaaagctcctggccgtcggcctccaaagagtcgcagaagtgaccgccactggctcgtgcacaggcggaagcgggggagggcgggggacgccaggcctaaagcgcctcgtgggtttagagaactcagagagggcaccgggtgggggtgggaagaagactcaacccgtagctaaatgtttggcctttggctattttttaaggaaacgaatctcagggaggtcggggcgcgggggatgggggcatcatcgcgcctcgg

SEQ ID NO: 43630 - DNA, 2300 bp, Homo sapien
ccctaaatgatgctgtccctgtcatcaggcgcttcgcacatgtgtttccccctcaccaagacatccacagcccgcccgagaggttctcaggttctcaggcctgagggtgtatgtctttgaaagctacagagaggtccaccttacaaggtcattgtgcagtgatctgatggcattcttccctcccctccccacaggaagtggtcctgtactgcttagagaacaagatttgtgatgtaaatcatcgggacaacgcaggttactgcgccctgcatgaagcttgtgctaggggctggctcaacattgtgcgacacctccttgaatatggcgctgatgtcaactgtagtgcccaggatggaaccaggtcagtgatgtgtcttgttctcagcctggctctgctgagaccaagcttccctatctgtgcggtggtggttctcagtgtatacgggaaattccaggaggaaagacagagggtgactgtaagcacactgaccactgggttctctggaattgaatccagcagacctttctggcaaatgtagatgtaaagctcccaattttgatcagtcctataatgttcctgtgaaccaaagcttctgaaaatgttgaggcctgcatgaataattgggggtgttgccttttaagaccctggactcttcatcaccatctatgaagtcactgtatttaaaatatatttgagctgaaagtcccaggagtacacacagagtgccagctgcccctccgctggttcagcaggacctgccattgccacccacatccccagccgtggccctcaccctgtccttgaccctggtttattggtcagagacccaggtctgagtcagcctgaacatcttcctggttgtgtgagtgggatgctgccatgaggctgggcactgggggtttcctgacagtgacagaaatagccaaacggaaatgtatttggtgtttcacactttgcaaatagcattccctcagattgggcagagacccatcttctccctgccaaccccaacccccagctccatggacacaggtaggaggcctctgtatcctgctgagaacacaccccaccaggcctgtttcttctccccaccgttcccttggcttctgggccagaggttaatcactgatctgtgtgaggtcctgggatcaggctttcaggagagtctctgctaatctctttgcatctagtttcttttaaaaacagaggtggcttttttttttttttttttttaatgtgtgacagttgcttgttgtattggcttccatgatgatgggacctcttttatcccctgtaagttaccttcatatggtccatgactacttaaatttgttgaaaatgttttcattttgggcttgacttccttcttaggccttggattaagatagggtttgcagctgggcagtggctctcttgcctgtaatcccagcacttttggaggccgaggcaggaggatcacttgagcctaggagttcaagatcagcctggaaaacatagtaagaccccgtccctacaaaaagaaaaaattagccaggtgtggtggcatgcgcctatagtcccagctatgaggaggctgaggcagaaggatcacttgagcccaggagatcgaggctgcagtgagccatgatccgccccactgcactccagcctggacagtggagtgagaccctgtccacccccacccccacccccgcaaaaaaaggatagatttgggtttgagatttaggcctgaaatagtctcttcatctgccctgtaaagggttagtcatcaaaataacagtgattcattgcttgacgttgagccactcactgtagctcagtttccctatctgtgcagtggcggtgactgtgcacacctcctggatgaaatactgtgcttaggaggctcagtacccaaggtgcacatgtgcccagctttgcctgttgcttttaaaggagacaactgctttataagcaagtgtggcttgcatgagcataattctattgcgcctctcttcctaggcctctgcacgatgctgttgagaacgatcacttggaaattgtccgactacttctctcttatggtgctgaccccaccttggctacgtactcaggtagaaccatcatgaaaatgacccacagtgaacttatggaaaagttcttaacaggtatgacaaagttcaagaaatggtcttattcaaaaattagatgataactcgatacaatagatgattggaatttgactaggcagaaatcacaaaggctgaaactgtaaagcttttaggagagcagccgagtgtttgaacttttgtgtggtttg

SEQ ID NO: 43631 - DNA, 2300 bp, Homo sapien
ccaggtggcctcggacatgcctcacagccccaccctccgggtggacaggaaacgcaaagtctcaggtgacagcagccacactgagaccactgcggaggaggtgccagaggaccctctgctgaaagccaaacgccgacgagtctctaaaggtgagccctgtctgcttcgcccgcctgccggggggtgggcctttgcatgcggccacagtggatggacaggagatgtggatgtgcggcgcgctgcccccgtagacagagtcggtgaggggaagccgtgggggcgcagcagtggagcggacctctccattcccacactgcctcgtgaggttcccaccctggagcccccggggggagccgcccacacctcccctcccccaaagccagaacccagatggccaaagatgattaggccccttcccaaaagcagagaccagtgaccacaccccccctcccccaccccattagtgatgcgtaagacagtttgttcccccccggggggctttttgattaatttgtagttatttctccattagatgactggcctgagagggaaatgacaaacagttcctctaaccacttagaagacccacattatagtgagctgaccaacctgaaggtgtgcattgaattaacagggctccatcctaaaaaacaacgccacttgctgcaccttagagaacgatgggagcagcaggtgtcggcagcagatggcaaacctggccggcaaagcaggaaggaagtgacccaggccactcagcctgaggccattcctcaggggactaacatcactgaagagaaacctggcaggaaaagggcagaggccaaaggcaacagaagctggtcggaagagtctcttaaacccagtgacaatgaacaaggtatgcgggggccaccccttgagtgttcaccccgctcctggagggtgggtcatccactctctgtaggaaagggcttttgaggagatcttagaaggccatagcaattgacttcaacgaagatgtggcaggcagggagttctctcttgatgtccttgcccgtggttgcacaggaaggaagtctgaacaccttcattccagcctcaggctgtctccagtctctgggtcctgagcaacccagacccagtgggtagggggcaggaaagcaggaagagccagcttctgtcctctcttccgggccctttgaagcaacttgccacttggcgttttgtgggttaacttaggtgccgtttgaatgtggtataattaaaatattaatgctttgaaaacataattggtgtatctttaaaaactgaagccgctccagtgatcagtgttaacaatgggcttttcttcctgcactggctacaactgtgtaacgcccgcttcttctcccgtctcccatccgcccgccaccccgtcaccccctccgtatttaggcttgcctgtgttctccggctctccgcccatgaagagtctttcatccaccagtgcaggcggcaaaaagcaggctcagccaagctgcgcaccagcctccaggccgcctgccaaacagcagaaaattaaagaaaaccagaagacagatgtgctgtgtgcagacgaagaagaggattgccaggctgcctccctgctgcagaaatacaccgacaacagcgagaagccatccgggaagagactgtgcaaaaccaaacacttgatccctcaggagtccaggcggggattgccactgacaggggaatactacgtggagaatgccgatggcaaggtacctcttgaccccggcttccctctggggcctgtgcgaacacatccccgcctgcctgcttcccagcttgaggggacaaagctttccttttcctggactcctcccccacaccacacgtcactcccctgtcctagaggagcatgtcttctgggtggcagcgaagtttcaaactagtaagaatgaaatcccttcccccaaaccctcctttgacaggcaccccccacccccaaaaaaagataaggaataaagtgcctctctccacgcaggtttgtcacgtggggaggaggaggggaagcagcggctgttagaaggacacgggcttaaccgtgtgcgctgcttggttttatgataggtgactgtccggagattcagaaagcggccggagcccagttcggactatgatctgtcaccagccaagcaggagccaaagcccttcgaccgcttgcagcaactgctaccagcctcccagtccacacagctgccatgctcaagttcccctcaggagaccacccagtctcgccctatgccgccggaagcacggagacttattgtcaataagaa

SEQ ID NO: 43632 - DNA, 2300 bp, Homo sapien
ttggtcactttatcctatcagcctgccatttatttcaaaataatgacctcagcaaatgtttccataaagatttttaggtcagccccagcttggttgcatcttctgctgaaaggactatagtgctttaaaaaacgtagcattgacgccccatctttcttggttccctcttgcccccaaccataagaagggagaaggagaaagtcaggagtgtgacatgcacctcactctgctttacttgccactcgtcttcaatgtaccctccctctggaaagttctgtttctgagggttttgtgctaaccatgtgtgaggaccccagtctccaaagaagcagctgtcaatagcagattaccttgggcatggtggtcccacgcactccccagatcctgccttctcatggcgaccttcgggcttcattaatgccctcttgtctcccctcccccaggcgagtatagtgttggaaacaagcaccgtgatccctttgaagccccagaggacaaagatcttcctgtggagaagtactttgtggagaggcagcctgtgagcgagcctcccgcagaccaggtggcctcggacatgcctcacagccccaccctccgggtggacaggaaacgcaaagtctcaggtgacagcagccacactgagaccactgcggaggaggtgccagaggaccctctgctgaaagccaaacgccgacgagtctctaaaggtgagccctgtctgcttcgcccgcctgccggggggtgggcctttgcatgcggccacagtggatggacaggagatgtggatgtgcggcgcgctgcccccgtagacagagtcggtgaggggaagccgtgggggcgcagcagtggagcggacctctccattcccacactgcctcgtgaggttcccaccctggagcccccggggggagccgcccacacctcccctcccccaaagccagaacccagatggccaaagatgattaggccccttcccaaaagcagagaccagtgaccacaccccccctcccccaccccattagtgatgcgtaagacagtttgttcccccccggggggctttttgattaatttgtagttatttctccattagatgactggcctgagagggaaatgacaaacagttcctctaaccacttagaagacccacattatagtgagctgaccaacctgaaggtgtgcattgaattaacagggctccatcctaaaaaacaacgccacttgctgcaccttagagaacgatgggagcagcaggtgtcggcagcagatggcaaacctggccggcaaagcaggaaggaagtgacccaggccactcagcctgaggccattcctcaggggactaacatcactgaagagaaacctggcaggaaaagggcagaggccaaaggcaacagaagctggtcggaagagtctcttaaacccagtgacaatgaacaaggtatgcgggggccaccccttgagtgttcaccccgctcctggagggtgggtcatccactctctgtaggaaagggcttttgaggagatcttagaaggccatagcaattgacttcaacgaagatgtggcaggcagggagttctctcttgatgtccttgcccgtggttgcacaggaaggaagtctgaacaccttcattccagcctcaggctgtctccagtctctgggtcctgagcaacccagacccagtgggtagggggcaggaaagcaggaagagccagcttctgtcctctcttccgggccctttgaagcaacttgccacttggcgttttgtgggttaacttaggtgccgtttgaatgtggtataattaaaatattaatgctttgaaaacataattggtgtatctttaaaaactgaagccgctccagtgatcagtgttaacaatgggcttttcttcctgcactggctacaactgtgtaacgcccgcttcttctcccgtctcccatccgcccgccaccccgtcaccccctccgtatttaggcttgcctgtgttctccggctctccgcccatgaagagtctttcatccaccagtgcaggcggcaaaaagcaggctcagccaagctgcgcaccagcctccaggccgcctgccaaacagcagaaaattaaagaaaaccagaagacagatgtgctgtgtgcagacgaagaagaggattgccaggctgcctccctgctgcagaaatacaccgacaacagcgagaagccatccgggaagagactgtgcaaaaccaaacacttgatccctcaggagtccaggcggggattgccactgacaggggaatactacgtggagaatgccgatggcaaggta

SEQ ID NO: 43633 - DNA, 2300 bp, Homo sapien
agtttgtgacctaccaagatgccctggggttgggcatggtgcatcccatgttgataccacacacgcccatagagattactaaagaggagaaaccagagaggagatcccggtcccatgagagagcccgttacgaggacccaaccctccggaatcggttttccgagattttggaaactagcagcaccaagttacatccagatgtccccaccgacaagaacctaaagccgaaccccaactggaatcaagggaagactgttgtcaaaagcgacaagcttgtctacgtagaccttctccgagaagaaccagatgctaaaactgacacaaacgtgtccaaacccagctttgcagcagagagtgttggccagagcgctgagccccccaagccctcagttgagccggccctgcagcagcaccgtgatttcatcgccctgagagaggagttggggcgcatcagtgacttccacgaaacttatactttcaaacagccagtcttcaccgtaagcaaggacagtgttctggcaggtaccaacaaagagaacctagggttgccagtctcgactccattcctggagccacctctggggagcgatggccctgctgtaacttttggtaaaacccaagaggatcccaaaccattttgtgtgggcagtgccccaccaagtgtggatgtgacccccacctataccaaagatggagctgatgaggctgaatcaaatgatggcaaagttctgaaaccgaagccatctaagctggcaaagagaatcgccaactcagcgggttacgtgggtgaccgattcaaatgtgtcactaccgaactgtatgcagattccagtcagctcagccgggagcaacgggcattgcaggtgagcccccccacctgaatttcagttactttaccagttgtcagttttttaatgtgtaaacaggattgggggagtatggtagggcagggcaccaggcagatttggtgaatgaagcttgtggtaatttgaatatatgcaatgtggccagtaagagaacgtgagtggtagcactgaggcgtgtctggatgctttaagttattctgtagattataagggaactccactcaattgctgataaccgatgttttaattattgtgaagggtatctaaagactgcatgacgtttacctatcaattgctttgatttctctgcctgtaagatagcaaatatacctagaagtgctgcttagaatgccttacttgatacctggtagagatgtgtagcagccgcatgtctgtgggattcatgcaaatttttcaccaaaaagaaaggaaaaaaaaaagaaaaaaggttgcttaaagggatagagtatgtatttaacttgctagtgaattatgatagatgttgtataggaatttccttaagatattttacttttaattaaaagatgaataaagccaaattgttttgcaatgttaagaaaaaaattggtttatgcttataaaaatggatgaagttatctaaatgatccattgagtgcccattttaattacatagatggaaggattacaagaggacagtattttatgtctacccgctgcttactgtgaggtcagttcttcaaatttttattactagaatcttacataaaccttttgagttaaatttcatttccaaatatacaaagggaagtttgtgggccatggtcgtctttattcattgtgtattttgtttcttttctgttgtgtttttgttttgttttctttgcgttgtgttttcgttttgttttatttaccttcaaaagagaatgtctgtctgtatgcaatagtgtatgtgtggatatacatacacatcgcatatatatctatatacacatgactttatgaataaagaatgtgtgactacttatatatagatactcttaagttttatctgttaaactttaaaatatctgagttacatctcataagctgtggttggttttgggcacttttctttgaaaatactttcctttaagataaggcaaatgaaatagcttttatggtaaggtgttgtttttttttttttccatctccgttctctttctagcgtgcaatgatgcgcttctcagagttggagatgaaagaaagagaaggtggccacccagcaaccaaagactccgagatgtgcaaattcagcccagccgactgggaaaggttgaaaggaaatcaggacaaaaagccaaagtcggtcaccctggaggaggccattgcagaacagaacgaaagtgagagatgtaagtaaacctgagcagtttgcttgtgttggcctcaggtccggttggcatctgcttggag

SEQ ID NO: 43634 - DNA, 2300 bp, Homo sapien
ttctggcttacctaccttggggacatcatatttgtgattcatgtcctcacacatgaaagctttgcgtttcctttgtttttcctggtcaagttgaatcaccatttgggggcgactttcaatatgggccattgacagctggtgggggcggagggttaaggacagttttaaaaattgggttagtagaaactggtctgttctggggagatctgtgaaagatggattcagtgaggaatgctttcatgaagttggtgtatctttttaaataggaaaatccttgtaaatgatggtgacgcttcaaaagccagactggaactgagggaagagaatcccttgaaccacaacgtggtaagagattaatagcttctgttgatgccatatctgcatatcagtgatctgtaatcaatcgtattaatttgcatgcccttaaagggtggggaatgggggaggggtggcagttcagagcagggctgagttggaggcctctgcgagaggacaaggcccccacccaagctcttccagtcttgccttcctgcctcgccacacatgtccctgtcccctagtgactggtgggatgtgtactctcttttcttccataagctggatgccacatcagcgctcccagctggataaatttccagcctccaagtagccccttagggtttacctttccagtaaaatacgaaacacaggactgtcacttcagacacaagggagaggaagtcaaaagacacaaccacagtttgacccatggcctctatattgatatagaaatgaggctgctaaagtcctctgttcctgttgtcccatcgaagatcgtttcttgttctgttaagtcatgccttcctgcacccaggggaaatgaagcgaacacccacccccaagcctgacaggcccagggagggttagtgtgaattctgtaccccatgagggtgatgctgagagttttggagttggtgtcctagttgtagcaaagaatttttgctgagaaggtaaaaatcttcagacttttttatttttattttttaattttaatttttttagagacagagtctcgctgtgtcgcccggcctggagtgcagtggcgcagtcttggctcaccgcaacctccacctcccgggttcaagcaattctcttgcctcagtctcccgagtagctgggactacaggtgcacaccgccacacctggctaatttttttgtattttagtagagatggggtttcaccatgttgcccaggctggtcttgaactcctgagctcaggcaatctgcccgccttggcctcccaaagtggtaggattacaggcgtgagccaccgcgcctggccaaaatcttcagacttaatagatgactgaattaatatatgggcctcaagtccaaagggaccaatgttttccctgcttccaggatactagttgagaggtgagaaggcaggcagcaaaggggtttggataagggggtggggaaacagaccccccacccccgccccgccggaagcctgtctttaaccctttgtgcttggatgttaaggctgatggcatgttgaactagttggcagtgtctttgggtgctgctgccttgaaggagtatcccagtaacacccatgttgttcttctgcaaaggtggatgcgagcacggcccataggatcgatggcctggcagcactgagcatggaccgcactggcctgatccgggaagggctgcgggtcccgggaaacatcgtctattctagcttgtgtggactgggctcagagaaaggtcgggaggctgccacaagcactctaggtggccttgggttttcttcggaaagaaatccagagatgcagttcaaaccgaatacacccgagacagtggaggcttctgccgtctctggaaaacccccaaatggcttcagtgctatatacaaaacaccgcctggaatacaaaaaagtgctgtagccacagcagaagcgctgggcttggacaggcctgccagcgacaaacagagccctctcaacatcaatggtgctagttatctgcggctgccctgggtcaatccttacatggagggtgccacgccagccatctaccctttcctcgactcgccaaataagtattcactgaacatgtacaaggccttgctacctcagcagtcctacagcttggcccagccgctgtattctccagtctgcaccaatggggagcgctttctctacctgccgccacctcactacgtcggtccccacatcccatcgtccttggcatcacccatgaggctctcgacaccttcggcctccccagccatcccgcctctcgtccattgcg

SEQ ID NO: 43635 - DNA, 2300 bp, Homo sapien
tgtttcatggagcctgcaccatcttgtccttaggcagaaagagacaccccacccccttcccagtataaaaagaccctagtgggcagccgaatggggtcaccattggccgcgaagtccgggcccgcagtctgggcgcggttagtccggaataccccctcccccactcctaccccttcccgccagcttcaccaactagggcttctcggctcgcccttgaggctttgcgctccggggaggccggaacctcgcttctccgcttccccctccctcccgcctgcccccgccctccccccgcgcccagagccgcgccgggtgcgctggagaagctcaatacgtgtcaattgaattgaactgctgcgggcgcaggctgtacgccgccgccaagcaccgatcagcacgacgttaccgagtggaaatttatggggcgaacggtgtaagccaaaagttgctccctgtcaaggaaaataaaacgcgggagataatctcccaacgccggggcgaggggcctgggcagcccctccaaccatcagaggtacagaccgtgaaaatgctcgagaaccgggagaaatacaggcggatctccgctcgccgaccgccccccacacgcctcccggtgcctccacgggctgctccccccttcccccacctccaaacaattcccacacaattgaaacgtccggggaactcgggcgcggagttcaggcggaacggccaccgttgcctggggtggtgttttcaggtagcttttaacaccgaaatgggaaagggctcctctgggaggaaggggcaaactggggtgggggtgagcacgggagcacacaggccacgctccgctgggtctcggaggggacgaggccgggagagcgcagcgctggtggcaagaggcggcggcagcggctgctgccgctggggtttgacagctttggctgagcggagtgcgaggcgctttatggtaattgcggtcctccactggccttctgggtagcgaggggagtctcggcgcgcggctgggagagccgcccccgccgcccccatcccttcggctctggctctgccggcagccctcgccgccgccgccgcccaagtcggtctccggctcgcccaggacgtgcgcccgggtcgggcgtgcgcagccaactcggcccgagctggggaggggaggccgggggacgaggagggggggcgccacccaagtggtccggggttcggatccagagaggccaaaacgtgccgggccgtgcatcgatgacggccggggaaactcgggcaaacctttcctggggaatcacccctcccgaaaccccgccgcggaggcgccgcagcggagggtgagcggagactggcggagctcaaacttgcgagagctggaggcggcggcgggcgggcggctgtcgcccgagcgctgcgcctgcggggggaggggaggcggctgttgggagggagggaggtagggcgggcgggagggaggacgggcggagggagggggaggaggaagaggagggaaccagggaggggggacgcgttgggatcgcggcgtgcggcggcagacggagcctgggctcccagcggcaaggtgaggcagagctgcgctcctcgctgaacgcgggccgagctcggcggctgcgggggagacgcgcaggagcccagaccgcgaccgagagcgggagctaggcgggcggcggcggcggagggggagcccgcgagccgccgggcggagagcccaagccgcgctgtcgccgcgcagggacgacttggccaacactcacacacactcacacacacccagcccgagcgggcgctcgcggcgaaccgtcaacatggcgctggggctcctgcccgagcgcgggcggcggcggcagcgcgggagctgctgagctcggccaagcccagtccagctgcgggagcccggaggatcgcacggggctgtcgccacctgcccggaggccccgagcccgccccgccccgcccccacccggcccagagcccacccctcggcggggccgaccccgagggcagccggctgccagcagacggcgagggagtcgagtgagcgcggcgccgcgagcgggctgcgggcagccggggaccgcaaactttgctgctcgccgcgcttctccggcccggctccttctccgctcgttaacgtcgccaaccccccccacccctcatatctctctccacccacccaaccgccccccgctccttctcgccgcctcgagtccgcttgggggaaaacttcaaagagccggatcgcaggctccctgcctactcccccaccggggatttcaggtcagtgcccg

SEQ ID NO: 43636 - DNA, 2300 bp, Homo sapien
ctcaactacaacccagcaatgtgggattgaggcctgtgacctccttgggaatcatcagatgcttccaacctgggcttgccacaagttgaggtcatgaggtcttgctggtcactccggaccagactgtaaaagaggtggcagaggctgggcgcggtggctcatgcctgtaatcccagcactttgggaggccgaggcaggtggatcacctgaggtcaggagttcaagaccagcctggccaacatggtgaaacaccgtttctactaaaaatgcaaaaattagccaggtatggtggtgcgcacctgtaatcccagctacttgggaggctgaggcaggagaatcgcttgaacccaggaggcagaggttgcagtgagccgagattgcgccattgcactccagcttcagtgacaagagcgaaactctgtccccccacccccaaaaaagaggtggcagaaaccccagccttataatcaagatagggtcgtaacttggagaatatatacattttcatttctccattaataatcataggaacatgagcaaaaatagataactatgagggtagggaaagaaaaaaggaaggagtgagggagggaaggatagtagtcaatagatattggatggatcaaattggaaaggagaaagttcacactcaggtaacatgaagtggaatttggcctcatttcaggttgcccaactagtaacacaggataactggtaaggtttagaaaatgaagtagggacaggggagattttctaaactttaccctacttactcccactatatggtatgaacatctattctactgagctatctaaatataagtgtttttaatgcatcctttcttgggccacgagaagcagtaggacagtacagagcaccagtggcagctcttcaaatcacagatgtggtcccactgactgggatcgcggagctgtcggttaaagtagatgactgcctacacttcgagatgcaacctcacagctggtgagggttgaagccagttgcacagggtggtccgtgaattcaaaaataaccacagagatataagccacgttcccccgagcccccaccagcgggtagaagggaagccaacgaaccacgtttggcgggtgtaccctcctcctctgctgcttatgtgttcagaatcacatcaattgcagttccaggctgcctgaccctgagcagaatcctacagaacaggaacagggttgggaaaaaatggccgagaccaagtagaagctgctttggctatgtgccccagcaagttcaaatgactaccagggtggttggctaggggataggggtaggagattaatatatttttgaataagagtttcctgttacctgcgaacactcaaaaaacagctagaggtttttatttctcttaggaagaacaatggttaggactgttttctctcatcacttgtcatcaatgattctgtcaatcatttattctgacacccattcattccacaaatatttattgagtgcctactatatgccagccacaatgttacacgccaaatatacagctctcaagcaaacactgggttttgtagacaggtttgtactgtggataccaaggtatgcactgtaacatacttacagcatgtttaaccaccctgaactcagagacctgggttcaaatcctcactaagtcacttacttagctgagtaactgagctttacccagttttacacgactgacctttccctatgcctcagtttctcactctgtaaagttggaaggcttgtgaagaacttagcacagaccacgtgagtaggagctaccattattatttagcacagtcctccaccccagctctgcctggtgccacagtccaccgcttggtggtatttccgaagctggccaggccctctgctgctgaccctggaaatcgggtcacactagacaaggctgcatgtgcggggagaaggcgggggggctcctttgcacgcggctgctcgcgtttccccaaggcctccaaatagtctaaaaactcacctcggaggaggagaaagagcgtgaagtggctctttcgatctgagacaccccctcccggagaactcgccccctcccccccagcccagagcggagtgaaatcttagaagccgtggctgctgggtttgaacggaatgctggagtcagtggaagacggagctggtcggcccgaaggtcagcgagttgttttgagttctcctacccggaaggtagggggtggggtggggtggggagcagggagtagaggacgccagggcccccgagagaccccgcgtcagagcaaaaattgtttgtgcc

SEQ ID NO: 43637 - DNA, 2300 bp, Homo sapien
tactcgggaggctgaggcaggagaatggtgtgaacctaggaggcggagcttgcagtgagccgagatcgcgccactgcactccagcctgggcgacaaagtgagactccatctcaaaaaaaaaaaaaaaaaaaggaaagaaaggtgtgacagtttggtgctttcctggaaggtgatccattcaccggtgccgatagaggatgccctgctagatcacagttgttaaaatccaagagaactgggttagagtcccagctctgaccctggctgggccaccttggacaagttacttaacacctctgagttctgctttaaatggcatacattccgcatctcccacagtacctgaaacacagcaggcactccataaatgatcattattgtgtcttaaatttactcctaacttttggcagcaaatattatcaccccattttgtggagggggccacagaggttcagaaaggttcaccagtgtttcagttcctttttgctgtgcaaaaaccaccccaaatcttagtggcttaaaatgacaattaatgataatttctcataattctgtagattgattgggtggttcttgggttccatatggtgtcagctggatctctcatggggatacaatcaattggcagctagattgggctggaaggtcaaagaaggcctctcacatgactagggccttggtgctggctgttggctgggtggcctgagctctcttcttcacgaccttttcatctggctggcttgggcatcttcaagtatggcagctgggcttcaggagggagtgttccaagaggacaagcctcaatatgtgagcaattatccttcctctgcttttcgtcatgctcattaatattccattagccaaagaaagtcacatggccaaactcagagtcaatacatgggatgtgggaggtacggctccttgagggctgcctgtgtaacagtccagccacaaaggcttgcctcggatgccacagccattgactggtatagctgggatttgaacccaagcctgtccgactccagatccacgctccttcctcaagtattggttgaggctggcgtttgtggttccactgcctgagcctagtggttaggcgattttccatcttgtctccagcccacccgtgtccctggtactctctgtgatgttctcatcgtacctctcctgctcccaacagaggggagagaagcacccttcttctgctgggctccccctgccctttactcctccatgttgactgcagagagctactcctgcttcctccagagtcccagccaggtcggtggtggccccatcccttctgacccctcctgcagcagcagcagcctggctctgtgggcctcatgacccacatgcccttctgggcctcagctcaattttcaagggtacttttattgggaaagcgagggatcacgagaacaaaggcaacatccttgagataagcccaagtttacagcacgctgtcgtcatcccagtggacttccggtctgcctaccagctgggccgtcccctgagatgggccccctcccctgacccctgtctacactcagccagaagctgatttgagctggtcccacagtgctgcctgtgggaacccaagcccttcctgctcctatctgcctctggctggatgacgccccgggcaattccgcccactgttttgaccccaggccccaaacctaggtgaggaacgccctcctcacagtccttccctgcttccagttcagtgttgacagtgagcagtgctcgctttgctatggctaggccctcactctcctctcttttcaaggccccaagagagtaagccatttattcacaccctatcttgacagcaaagccggggccttgaacctggggcactgctttcagccattattcttgcagaggccccagagctcccagcctgcatttttggagtctgagcagggcccacagctgttttgcttcagctaggagtgaaggctgacaaagagcaaggtctctggagaaggaggaaatgttttctggatgccaaactggtgactgtggggaggtgtggggcagcggggagggaggagctctcacttgtgcctagggaaaggtcatggtcaatgagaaagcctttgatggggagagtctgagatgggacccaggaacatcaccatgaagctgtccaggatggatgtgggaccctctgtcagaccaggccagttctcttaatgtaagatcagcaggccaaggtcctgggatatgggagctcccaggaagtggactgggatgcctgagggatccaagaattagcagtgtcctgtgtggtc

SEQ ID NO: 43638 - DNA, 2300 bp, Homo sapien
tatcatgcttaaaaatgaatttttaaaaatgattaatttttttccgccgggagcagtggctcacgcctgtaatctcagcactttgggaggctttagtgggtggatcgcctgaggtcaggagttcgagaccagcctggccaacatggtgaaaccccgtctctactaaaaatacaaaaattagccgggcgtggtggttggcgcctgtaatcccaactacttgggaagctgaggcaggagaattgcttgaactcgggagttggaggttgcagtgagctgagatcgcaccactgcactccagcctgggcaacaagagggaaacttcgtctcaacaacaacaaaaaaagtgattaatttttttcgagtcagtcacattagagtggatgttttggaggggtgctttagacattttggttctaataatttcacatgcctgatggaaaaatctctcttctccctttcagagttctctaaagtcccatttgtacaaattctcctctagaggaaaagcaagtttgagagtttcctgtttcttgacgttaggtgaggaaatcgactctgttccctaaatttgagagtggctttggtaagcatagtgtgttctagaaagttcaaactatttagtgagtgtttctctttttttgctttctttattttctaataataaaaagacagggcctcactatgttatccaggctggttttcaactcctggtgtcaaaggatcttcccacctcggcctctcaaagcgctgggattacaggtgtgagccaccacacctggcctcgagagtgtctttctgattcagttttcagttgggcaaggttttcctagggtgggtctgctacctggggaactcctggggtcactgtttttaactcgctctcattttttcatcctcaggaaactccaagaagaaaatgggactggaaactgaagaaacagtaaggcattccccccctcccccccgccaataagtctgtcttacatttgtgcagtaaatcatgctcaaacgccttcaatggcttagtgtaggtctcttatgtacaatttaaaatcctcaataaatgtgcctaactgaaagttttagctctgtgcctcctctctcatataatctcttatttgattactgatgcttaacctgacggggctttctccccaccttaactacagttttcactggaacaatctccccatctcctatccttggatatgaaatcatttccacctttcaaggtcatcagctggggcgtcattttctacctacagacgctatagtgtgtcccttcttgcctcacatcataggcaaaagactatgaactgcgggaggggaggagcctggtctaattactatgtctagccttcatacatcctcataaaacaccttgcccagattggaaactgagtgaatggacaaattaagtaattaattaactttctgtcccatgactccttgtagattggaaagtctttggaggtagagttgccagacttagcgaatcaaaatataggatacccagttatatttgaatttcagataaccagtaatacttcttttaatacaagtatgtcccataaattaattgcgacataataacaaataatcgttgtttacatgaaattcaaatttaactgggcgccctgtattttatctggcaccactatgtggaaggcaggggttccccgttgcgcctggcttcttcccagtaggtgctcggcgtctgtatacttgttagagcgaaaccccaaccagccccgcctttcacagctggcgtccgtagccgggcggaggcacacgaccaggaaagacagacaccctggttggagaccgtcgctcgagactggcagaaagatctgcactcgggaggcaccctcaccccgtgggctccgggacccctcgactagctccatcacccattccgactacccgccctacgctccacctcttgacccgtcatcaccgaccggggggcgggactgcccgacttttcaatcgctgcctaccattggtagaactctccatccgttactttaagtcccgcctatcaggctgtcgcttcccaggttacgtcccttccgtaggccgcggcgtaactggtgattggtggagaaagcggcagctgtcccagcggaagcgacgaagggacgggacccgggagcctggacgagtccgagcgcgtcacctcctcacgctgcggctgtcgcccgtgtcccgccggcccgttccgtgtcgccccgcagtgctgcggccgccgcggcaccatggctgtgtttgtcgtgctcctggcgttggtggcgggtgag

SEQ ID NO: 43639 - DNA, 2300 bp, Homo sapien
agctttttactttttgagcttagctgcctatataattatttcttttccttcattggtgttcatttgattcatgagctgcttcaatttgatcgctatggacatggttcctaatcttcaactttcctgaaccgagcgccatttcactaagtgaagtgaggctggaaagtttgcatcatttgctcatgtattcccctcacagcctgaggaggtaaactctatgatcgctaaaggaaagcacctatagatgattcagggcggctgctagcagtatgcttttgcaactttgaactctcttccccctcttcacttactcattaactcattttgagagaatttggggaagagttaataagcatcttgagtaagagaaaaaaattatttcatttcacagaatcataaaattgatcacttaatattgatgctgggcctgggcatggtggctcacgcctgtaatcccagcactttgagaggccaaggcaggcagatcacatcaggccaggagtttgagactagcatggccaacttgatgaaaccccgtctctactaaaaatacaaaaattagccaggcgtggtggtgcgtgcctgtaatcccagctattcaggaggctgaggcaggagaatcacttgtacctgggaggtggaggctgcactgagccgagatcgcgccactgtactccagcctgggcaacagagtgaggctctgtctcaaaaaaaaaaaaatgtgatgctgggattttatcagtaagacataatcacattgatttctgcctgtatcatattagcgttactttgctacttgtaaacatgaatctttaagtagtaagggaactactgaatgaaagatcaatgtaagaaatctccattaaaacaaaaacatgactgtactgcttgttttaatacagtaatactgggaatgaaataatttttttaggggaaaaataactgtaatttatttttttaaatcatgtactgcaaaacaaatctatggggatagaagtcagaatttttgttacccttgagggtggaggtagtacttcgagggcgctgatagtgttctgtgtcgatctggctgggctacctgagtgcatgcatgtgtaaacatttgttgagctgttaccccaagatttgtatactatattatatgtattttgcactttaataaaaaaattgaaggaaaaaagtaggtcttatcaccattggttatttcaatctaataatatcaacatgtcctaagataaaggcttcaaaaaccttgtgacatacttaacaccttatctaagagtctttaggctatctgaagacaaatgttaaatctcattaaacatttttaaaattttgaaatgaaagatgaattccatttttatttcaattaaattcaatactcagattcctctaacctcttaaatgcaaattaaatactttattgtggaatatgcattcatcgtggcacatttagtcaatattgaaaccaaatgtattgctgcttcaaatacatgaatgaccaccagaaaatggtttgtgctagatatagtgttgtgtccatcaggtttaagttattttccactgaggcatgatgggagatacagacttggcttaccagggggctgtttaatcttctgtgccctcaaaagggcttgtttggaaatgatttcgggcttctaaatttccatagaaagtgctggaaaaaagtttaaggcttctttttaaataccatctgaatgatttttcttcccactttggttcacataataattgcgttcttactcttaaatttcaggcagttccttttagtcttgacagtgttgcaaattccattcactccttattttctgaggaaactcctgttgttttgcagttggctcccagtgaggaagtaagtgataagggttttattcaagacattttaaaaaataagcttttattatttgaaaattatgaaatgtaattttattatgaaaatataaaactaatttatgaacaatgttgtcatacctctgggtattggaactaatctgtagaatttgagcaacttaaaattttctattcttcttacagagagtgtatatggtagggaaggcaaactcagtgtttgaagacctttcagtcaccttgcgccagctccgtaatcgcctgtttcaagaaaactctgttctcagttcactccccctcaattctctgagtaggaacaatgaagtaagtgcagttattcaatgaatacatgaatatcattaatttccgtctttttaaaaaatagagacagggtctcactctgttgtccaggctggtcttgaactcctggc

SEQ ID NO: 43640 - DNA, 2300 bp, Homo sapien
gatgcccaagtgattttctctaataatcgggttgggacttaactttaaggtgttttcaatgtgattttagtatttacagtaataaataaaatttatacaaagtttcagagaactaccaactctctagttaattttgatgaagatgttttcattaatagtctggtttagtattaatttaaccttgaaataagaaattggtcctgatttgccaccttcatttttccatctgctgaaatgccatttcagaatgtataaaagtactttcagaattagaagaaaagtgagagcttcagcagaacgtgtcaagtcgctaataacaggagtcgaaccttatgtttgaaaattaactgagtgagttaagtgcaagcataaactaaaatttatatgactttgaatttaagaaccactaataactgtgttctaattaacacagtaatctgttcagccaaaggatactaacagccattctttggactgtggttaatttgataacttcaagaagttataactttgctaccctggattctgatgcaatttcaatataaaaagttgttcctttcatagtttttccccccaaaagaagtgcctattacattttaccttaatgtttatttatcatccaagtgttcttgatataaaatcagtatacagaaaattttaagagaacttacattcaagggacatagagggaaaatgttaatgtgtatttcattgtttcttgtggaatttttttttcattcggtttgagaatggacagtgtgtctaaggatgtgatttaaatttacttaggatggatttagcattgaggttattaagacaaagttagcagaggccagccagcactgtgctgcacaactccaggaactccatggtatgctcacaattttctgcaagttgcctccacttccaagtggccagtgatttgttaaaataccttgcccaagaatataactgattgatgaaagggcatatttaggtcaatataaaataatagcaagtatttactgagagcttactgtgtgctaggcattttcttaatatttcaatgtgtatttaatcctcacaacaacccaatgtggtaggttattgatatcctcttcttaaaaatgagtaaatggaggcccagagaaatgtaatttgcctgagatcaaattaaggttgcttaagatcaaactgctaagaaggggcagtttgagtctgagctagtgctcctaaacactggacatttttgctgtgaaccacagtcgggaaggtttaatgtttagactctttcctcagaggcttttaactacacacaattttgacatgttttccaagctcagaaagctcattaaaaacaactaaaactgacctgacttgtcacttggagttgacaatcccagtgccttctgacctttgtggcacttctttggaacttaaatcagacttccatgtgcaaggagcactaattatcatataatcaagaatactagataattatcgtctaacctttgctaggtgcttcaggatgcccttatctggctcaggtgtgcagccttctagaatccaagtgatgtgttgccctaaacaggcaaacgcccccttctgggtggtccagtggcgggggattttgagttttgggttagcttggcacaccgcaggcagccagcggtcacgtttcactaatacctcaatttgctacagctggtctgtgggcttaggaaccagtaactctagaattgtataatgcaaagaacatacacgattcaagcaatgtgccctgagcaccttgtacatctggacaataaaaaaaagttaaaacagaagtgccctacattaggagagggagtcgaatcggatgctgacagggtctctgtttgggggacgaagagggcctaagggtttcaaatagttaactgcttccccaagcaccaaagttgttagacgtcagacgtcagacgtcacccaagtggggtggagccgacgtgccccggaagtcaagatgccccgccccgggatcggtggcaccgcgccgcgcaggcgcaggcgtcgctgccgccggcgcaggcgccgctgcctcgggtacttcccaggctccgcgcctgcgcactgccgtccgccacgccccgcaacctcctggttccaagtgggagacatggtgctgtcggagctagcggcgcgcctcaactgcgccgagtacaagaactgggtgaaggcgggccactgcctgttactgctgcgcagctgcctgcagggtttcgtcggccgcgaggtgctctccttccaccgcggcctactcgccgcagcccccggcctggggc

SEQ ID NO: 43641 - DNA, 2300 bp, Homo sapien
ttggaaacagtaagcaggtatagtaggaagaacaaggcctctggagccaaacttctggaatcaaagcatgagtctgtcacttactacgtgtgtgaccttgggcaagtaacttgctttttttgtgcctcagtttcctcatcacaaaaataaagataggccagttgcggtggctcatgcctgtaatcctagtactctgggaggccaaggcaggtggatcacccgaggtcagcagttcaagaccagcttggacaacatggcaaaaccccacctctaataaaaatacaaaaaattagcctagtgtagtggcacacacctgtaatcccagctgcttgggaggctgaggcacaagaatcgcttgaacctgggaggcggaggttgcagtgagctgacattgtgccactgcactccagctgggtgacagagtgagactctgtctcaaaaaaacaaacaaacctacttcacagggttattaggaagattaaatatgttagcatctgtaaagtattaggacaatacttggcacatattaagctttgtatcagtgttaactgtcaatattgttaccctcacagtgaccatatttttcagttgaaaaattagggtttgtttttacatgtttccaagtatgagggatggttgtcatttttctctgccttaataatggaatttttaagatgtttgagtggttaagggaggcagcagagcaatttaaaatagataccattctagaaaatctagcagactgtattagtctgttttggcactgctgataaagaaatacctgagactggacaatttacaaaagaaagaggtttaattggactcacagttccatgtgactggggaggcctcagaatcacagtggaaggcaaggaggagcaagtcacagcttacgtggatggtgggaggcaaagagagagcttgtgcaaagaaactcccgtttttaaaaccatcagatttcgtgagacccattcactattacaagaacatcacaggaaagacccgcccccatgattcagtcatctcctaccaggtccttcccacaacacatgggaattacgggagctacaagatgagatttgggtggggacataaagccaaaccatatcacagacctactggatttaggcaaatttgtttttgtttttttcaatttataagctgaggtgtgaatatcaagaacacttaatacataatagtttaaatgccccatttgttatagtttatggttgcttttgcttttatcattcttctttggtctcatctactttttggaaaacaaattatgtatttgctaggaatgcttttttttgatacgattgatttaaccttttttttttttaagacatctacattagatttataattctgagccttacttgatgatgtacggaggaaaatatctgacacttcttatttctctaagtcttatttctttttgggatttttaggttgtggagatgttggaggttcccaataaacccacacaactgtcgtacaagtactactttatgtctgtgaatgctgcagatcgtgaagacagccctgcaatggcattgctgctgcagcagttcaaggaaaacattcaggacttggtttttcgtacaaaaaccgggaaacagaccagaaccaatgccaagcgcaaggtatgattccatatgaaaatgagcacagaatttgtgtgtgttaacttggttgtgttctttactcatttttaatatgagaaagaactaagatacagtttttaagagacgaggcagcaataaggcttaagtaacaattgtctacattttcttgaaaatgcttctgttttaattaaataattgtccaccattttccatgagagaacttgtgaaacacaaaatatttactaataaattaccagtgtttaggtcagtatttactcagtaaatacaataacatttgttttggttaaccctgagctttcttccagtattttaactatcttaatgaattgcatcacatgtacttttttttttttttttacctgtttgtgttctttacttaaattctagttgtctgatgatccatgtccagtagaatccaagaaaacaaaacgagcaggagaaatgtgtgccttcaataaagttttagcccacttcgtcgctatgtgtgatacaaatatgccatttgtaggacttcggttggaggtaagttttttggaacagttctggataccccaaatgaaagagtagtttttaaaatgtgttgctgagggtatatatagattccattaggaaaagcagaatgtttgtgatcctgttcattttgggaggagt

SEQ ID NO: 43642 - DNA, 2300 bp, Homo sapien
ttggtagagacagagtctcgaactcctgggctcaagtgaccccctcccctgcctcagcctcccaaagtgctgggattacaggtataagccaccacacctggcaattatcaacactttttaatctcagtgagatggggaaccatcgaagggttctaagcagagaaattttaaaagaatcatcctggctattttgtggagaagaaactatagaaggggcaagggaactacagagataccagtgaactgactattgcagtacacaggtgaaggattaggtggcttggaccagcacttggtggaagtgttgagaaatggtcagactctgaagtcaaagataacaggacttgctgatgtatgtaggatgtgaagagagaggagccaggagttattccaaaatatttggcctgagcaacaacaggaagaatggagagactagtgagatagcaaagaaggttctgcaggagggaggacagtggaatcaggagtttggtgctggagttgctatgttgaaatgcccatcaagatactgaaatgtaggcatctggatatagagtctggagttcatcagagaggtctgtgctggagatacaaatatgggaaccatcacataaagggtgtgggactataactacatacttattctacggcaataaaacagatgttcctctcttcataagccaagtcctaaaatagtaaaaagacaaccacaattcaaggaatttctacaaatcccctatggaaaagcaaattacaccaccgatagcagcagttttcaacattttttttcccacagctctatataggcacatacatgaaactttctcatggatattcttggatttttatgaaatccaacaataaatggtgcagagaggtatatcattataatagtccctaaacctgacagcgatttaaatttctcattagccatgggtaggcttctttaacactacttttttctgtcccattcaaaaaagtacaatacatcaaaactgagaatgacgttttacaggagttaagtagagcctactctttcagtcatctgcaaacaagtatctgttatcagtctctaaaaacaaattactgtgacgctttagagcctaatatctgcatactaatgtatctcaattgataaccctgatctgaagtcttgcaatagataaaaaataaaattctgattaactttttctgaacctgggttataagatgtacaacagagtcccaaaatgttacggtgccttttcttcacacactgaaattcgttagtatattctgatcctattctgaagggattaacaacttaatcatgccccaaggcatttcatgggtaactaggtgatttataaacccccttcatactccaagaaataacagactacttacaaaaaaattttactcacactaacttcattaagacctcaaacactcaaaagttccagaaaaaaagtactttgaattcaaatttgtattttatacacaacgtatgtagctcctgcattaacttagaagcaataacagcttacatttaaaacgtatcgtcaagaggctgtaatacaaatttcccatctatagagttttttctaaaagctcgaatattatgtattccagccaagaaatcaagagagttctgttgggaactcggacaaaaatttcacacaattttcagtggaagtgtaacaacacgcaaaattaacaagtctctgttgcatcgttgccaggaagaccccagatacaaagcttcttctccacctctgctgaaccccaggagttcaaaaattctagactaagcagtccagcggagaacacagcagcctctcggggagagggaggtgcaaacgtctcagccggttgggcgggaaggggggctggggaacaggcaggggtttcggggcacttacaggtccgtcaacaccataagctccgagtaggcccggtgcagcagaaattcaatgagggtgctcagccggtagcccgggctagccgcagctgcagcggccgccgccacggcggctcccgggggaggaggggctggggctgacgggggtccgccgctgcccccgccgccgcctccgggcgggaccagctggtggttctccagctgcactggggccatggcggcgcaggaccgggcttggcgcaacggcacacgatgcggtcctcgagcctcccgggcgctcggtcaccgcgccgaaacgggagcgggcagagtcgccaccgcctaccgccgggccgcctcagaacaggaagccgtgcgccgaccgcggaagcccgcccccatgtagcgagaagtccgccgaccc

SEQ ID NO: 43643 - DNA, 2300 bp, Homo sapien
agcactttgggaggccaaggtgggtggatcacctgaggtcaggagtttgagaccagcctggccaacatggcgaaaccccatctctactaaaaatataaaaatttaaaaaaaattagctgggcgtggtggcacgtgcctgtaatcccagctactcaggaggctgaggcaggagaatcgcttgaacttgggacgcgaggttgtagtgagccaagatcgcgtcactgcattccagcctgggcgacagagcgagactctgtctcaaaaaaaaaaaaaaaaaaaaaaagtaaagagtagaatggtggttaccaccagaggccgggtaggacagtgggtggagaaaggggaaatattagtcaaagggtacaaagtttcagttagataggcggaataagttctggtgatctattgcacagcaatgtgactacaattagcaataaccttttgtatcttccaaagttgctaaaagtggattttaaatgttctcaccaaaagaagtaagtatgtatatcatttgatagatgttaatagcctgatttgctcattccacaatggttacatgtttcaaaacatcacattgtatgccataagtatatactatcaattaaaaataaaaataatatttaaaaataaggtagctgccttccagcaactgtatctgtaaggggtataaataatcccaatgcattttaataactagcacaatgatattctgtttcaatgtgctttaggaccaccaagggagggaacaagtgagcttacaccttcagaagcagatgaaccgctttcaacaatgataaagaattacccaagtgatgacagtaagaatattctaaccttagggaacatcatgaacatctcttacaccaagaggagatgaaactgcaaaaagatgtttgaaaggggtcgcagcaacgaatgcttctaatagtgaatctctacgttagggcatgttagaatcaccttaggaaagttcaaaaattccccaagcccagacctcaagccagaccaattaaatctgaatctacaggggtggaacccatatatctaagtatttttttaaaaaacagctcctcagataattgcaaagtgcagccaaggttgagaatcgctgttttaaagcaggtacaaaaaattaaacgtggactttgatgggggggacgggagtgtcggtaggcatggatgaactgaaaagcccttcagaatagagcggtgactgcaagagcaaggacaaaaactatatgagagcccgtggcaggggatttaagggccgtttttgtgtgggactgacaggatttgggggatggtgacgacctcagcatacacccgactctattaaaattgagttactctgccagcggccctgtctctacccgcaatcatattttctagcaccttttcccacagtttggaaaaaaaaaaaaaggggcgaaaacgttctcccacgtaacgcgccgtggacgtgtatgggaggagcaaaggcctgagaatcacaagcgcgcggccgctcccatttcttcgcgattccagaaccagaattcacgaacatttagaggaggcctcccctggctgtgtttgtgccccacttaggaagcgatggtggatttctctgggcaaattgtcgcctttacaacgccagggggcggaggcgggagggagagcggcgagggtaagggcggggcaactgctgacgttcccggtgacgactccggctcagccctcaccctggtttccggcggcgcgcggctcccttttccgctctcccgcgcgctcacaggtaccgcctcactcccacgcgccccccagcgctgcggtgctagacagctgagagaacagacacagacctgtcggaaggtcctctgcaggtcccccttccgctctgccgatcgacttccgcctcgggcagtcaacatgtacgttgcggctgtctggcgaagctgcttctgagcgtttgcggaggcgcagcttcccctctgcggggccgccctgcttcccccccatccccgcctccccccgcccctcgctcctgtccctggggtcggcggacttctcgctacatgggggcgggcttccgcggtcggcgcacggcttcctgttctgaggcggcccggcggtaggcggtggcgactctgcccgctcccgtttcggcgcggtgaccgagcgcccgggaggctcgaggaccgcatcgtgtgccgttgcgccaagcccggtcctgcgccgccatggccccagtgcagctggagaaccaccagctggtcccgcccggaggcggcggcgggggcagcggcggacccccgtcagcc

SEQ ID NO: 43644 - DNA, 2300 bp, Homo sapien
ctgcctttccctggcactggctgcaaccaattattattttagagagacggttcacaactgcctgaccctcacctgatggttacctgacattcctggttgggaaggccctctcctgccttgtttatgtctgactagctagctacataacacaactacatgtgaatccacaattatctcaataaaaacatcaattaaaaatgtggattacttactgtgggataaggcaaaggatctgaaagctattacagtgctgtgtaaggaactttaaagtctcattccccaaacaaaattgtattgtttcttcgtctgtacttccactatagtgcttatcacattgtttcctttctttctttcttttttttttcttttttctgagatggagtcttgctctgttgcccaggctggagtgcagtggtgcagtctctctcggctcactgcaacctctgcctcccaggggttcaagcgattctcctgcctcagcctcccgagtagctgggatcacaagcacccaccaccatgcccagctaatttttgtatttttagtagagacggggttttgccatgttggccaggctggtcttaaactcctgacctcaggtgatccacctacctcggcctcccaaagtgctgggattacaggcgtgagccaccgcgcccggcctatcacattttctaattgtagactgtctctctgaccacactgagctaattaaggtaggggccatgatttattctttatagccttagtgccagttccatgtgagcctcagtatgctttggccaaattaaatctttctgctctatgtacatcatagagtttggcatataataaatcttcaataaattttgttggcttgaactagattgtagcatagtgttgtcagtggcatgtgaaccagagcaaccccatcttaaataggggctgggtaaaacgaggctgagacctactgggccacattcccagatgggtaaggcattctaagtctcaggatgagataggaggtcagcaaaagatatgtgtcatcaagaccttgctgataaaacaagttgcagtaaagaagccagctaaaatccaccaaaaccaagatggcaacgagagtgacctctggtcgtcctcactgctacactcccaccagcaccattccagtttacaaatgccatggcaacatcaggaagttaccccatattgtctaaaaaggggaggcatgaataatccacccctagtttagcatatatcaagaaataaccataaaaaatgggcaaccagcagaccttgcggctgctctacggagtagccattcttttactcctctcctttcttaataaactcgctttcactttactgtatggattcagcctgaattctttcttgcacgagatttaagaaccctctcttgggatctggatcgggacccctttcctgtaacaattcgatctcagaaatgttaaaaacttaaaaacttgaggtcattgtgcccctttgacccaaggaatgacagtaatgaaagaaagtgacattgcagtctgaaaagctgcctttttgtcctgggagatgctgactagtttcctgaattggctattgtattgccaaaaaaaaacacaaaaatttcctcaagtatagggggcaactactggagaagggggcatgtctgaagtgagtgagttacaccatgagaacaagaaaaatctggagtattttcttagttaacattacccactaaaaccaaagggtgggaggattatgcgttcctgctggctgatgctgctgacagcacactgtttggacagaatcccaggcactgctagcagaagcagaatttctctcacacaaaaacatggggggaaggggcagagattcaaccacagcatttagctatggaaaatggaaaacgaaaaatgtctctttaaatgctagtgcggtcactcccattgtctttccaaattcaggcctccttagggactttgctcaagtcttcaagatagttcttgtcgctagttatgaccaaaataaaatcacctccttctatgggatgatttggtagttgctccctgaaacggcctctggccccttcaaaaaaattcacctcagtgaccagcagcagatgcttgaaattcctctttggcaaaaggaattccccctttcagacttcacttttttaaatgcaaataatgtcagagtgggggtgccacttactgtaatgtaaatcagtttgtcagagattatcaatggattctcacaggaacaaatataatacaaaatggaaactgtatgaataaaggactgcattaaggacggtgac

SEQ ID NO: 43645 - DNA, 2300 bp, Homo sapien
tggtaacctaagtggtgaaaaatacttgggtattaatattacagaagcaagcccccaggtaagttttatataccatggtatacatttggttttgaatgtcttaagccaggtcataattagaaaacttagaaatgaaactttgcaatgcttgtgggaagtctctctcaatctcttgagagccagtgagttagaaccaatcagttaagtttctctatctggtggcaccttagagtcattcactgggggagattttttgcaaagttctgatgcctaggccttactcccagatactgtaatttatttcatctggagaggaacctgggcatcagtgttttaaacaaaatcacttcaggtgattttattgtgtagctgaagagggctactgatctaatgaatatagaattgaggatttggtagcattctcctgtacttgtttgctggtcagtttgtaaagaagagttccctgttcttaaacagttgtggccttgtaaccctgttatggctctaggagtggctggagccaaaaccttgccaaagtagagagctgagatcatctgacaaattcagttgtattggagtattatgtagtttgaaccctcttaaaattttaccagaggtttttggggggttttcagggttttttgtttgtagggggtggagagagcggggatcttaacagaaatttgttctctcacaattctgaaggccagaagtccaatatcaatgtgttggtaggtttggtttcttctctggcttgcaggtggccacctttttgctgcatctttacgtggtctttactctgtatgcgtgcacccctgatgtttctctccaaagcgtcaaagtttatgttaaaagtacttagaagctagtttaaaaaaccatttataatgccctagtatcagtgataaacgttagttgtgcggcctgccttgaaatgttttaaaaaatcactttgtactttgtctaagtacacatgttactgaaacaggagagttccctgacgccctcacaggatgtgtgacaggggtgtggctcatttattcctcttatgggaaggggagcacacaggtgagcaggtacaggagccagggtgagcgcttttgggctccggccccacagcagtgtctaggagtgttacaatgctcctttagccctgctgtcccagcataagtgttaaacagctcagagaagagtcagtgtgacagcctttttgggtttctgcatttagggcatcccgagttcttttcctgtgtctgggaagaatcaggtcacagggacttgaaggatggtgaatgtggggatgttattgagtggtggaggtggctgtcagtgggatggggagctggagaggggatggagtgggaagatgatcttctcctggagttcggctatctcacagccaatctccaacggcccccagcttgaacctcctctccacctttagacacttcctctcttctctccttctctgctgtgcttctctgccactcttctgcttttggagcctggggcttggggtttatatgggcacgggataggggtgcgtggcaggccaaaagggaacacttgggcgtgaaaacaggaatgcctgttctcatttagggctgcaggtccaggcttgagccctcaccagggaccccaccctcatacctcttgtccttattcttacagtgtaatgaatgcatcagcaaattgaaaacagatagtttttgccgtttcttaatttaattaaaatgacagttaagtactttgatatattgcctttggagtcatttccaggaggctatatttgtttgttttcttggtataatggccagtgtaccaatgatcagttttaagttaaatgtagtattaatgaaacttcagctttttactttctcttcttgtttgtatagcccctttttcctgattagattcactggtgatactaaattcgaacagttccataattcatgttttttatatctaaaaccaattactttttcccctttctatttgtaggttatgcaatggtctctgcaagatggtttattcttgaattggacctttttaagactgacaaatgctggtacttcatcttctataagtggactataatttcttttctcaagacaactacataagcagacaaaattgcaaagatctgccctgtgtcgagtatgacagccacgactcgtggctctccggtcggagggaatgacaaccagggccaggctcctgatggacagtctcagccccccctccaacagaatcaggtaggatgttgaagatactagttaaagctacagtggggctggact

SEQ ID NO: 43646 - DNA, 2300 bp, Homo sapien
catctccaaaactcttcatattgcaaaactcaaactgtagtcattaagctactccccattctccctccccacagcctctggcaactactattctttttgtctctatgattgactactctacatacctcatataagtgattatataagtgaaatcatacagtgtttgcctttgcatagctggcttatttcattttaaagtctaagtaatattccattatatgtatataccacattttccttatccattcatttgtcgatggacatttgggttgcttccccatttgagctattgtgaataaggctgccatgaacatggatatacaaatagctgtttgaggtcctgctttcaatatttccaggcatatgctcagaagtggaagtactagatcatttggtgatgctatttttattttattatttattatttttttcagacagagtctcactctgtcacacaggctggagtgcagtggtgctatctcagctcactgcaacctctgcctcctgggttcaagcgattctcctgcctcagcctcccgagtagctgggactacaggcacgcaccaccataccccgctaatttttgtatttttagtagagatgggatttcaccatattggccaggctggtctcgaactcctgatttcaggtgatccacccaccttggcctcccaaagtgctgggattataggcatgagccaccatatgcggccaaattttttgaggaactgttttctagagtgactgcaccattttacattcctaccagcattgcacaagagctccaatttctccatatccttgccaacacttgttatactcactcgttctggtagttgacaccctaattgagtgtgaggtagtatctcatggttttgatttgcatttaccaaatggttaacgattttgagcatctttagctgtgcttattattggccacttgttgatcttctttgtctatttttaaattgagttgtgttgttgagttttaagagttctctgtatgttctagatattaactccatatcagatatgtgatttgcagatactttcttttgttgcctgtacctctgatgtcatatccaagaaatcactgccaaatccagtgtcttgaagcttttgccctatgttttttttttttttttaacagttctgtggttttagctcttacatttaggattttgatccattttgagttaatttttgtatgtagtgtttcataagggctcaactttattcttttgcatgtggattatccagtttacccagcaccatttgtggaagagtactagtcatgcaccacataacaacgtttcagacaattacagaccatatatatgacagtagtccaatgagattataatgtcgtatttttactgtaccttttctatttttagatgcacagattcaccgttggtttgcagttgtctacagtatgtagtacagtaacatgctgtacaagtttacaacctaggagcaattggctataccatctaggtttataggtacactatgatgttcacatgacaaaatacctaatgatgcatttctcagaatttatccctgtcattaagcaaagaatgactatactgatataggtatattttattgacagatctgagcattttatatacaacagctacacaaaggatatattacccccattcacacataaagaaacttgaagcctagaaagtttaagtagtttttacttgctcaaagttacttggtttataagtggtagagcctgcatttatgtctagttcagtctaaattactatgctaatgctacactatattatctatctttcttacacatggtcagggttatttggttatgataactaatatgtgaaatggtggggataaacactaaataactaaaaatttataaattgaaaagtgctttggaaatgagcataataggaatacaaatcatttgttcaataactgcttggcatttgtctcaacgtattttattatactttagctcattggtgacattttttggtttctagagcaatgttgatcccagggatgatgtatttggatatcctcaacaatttgaagataaaccagcattaagtaaaactgaagatagaaaagagtacaacattggtgtcctaagacaccttcaggtcatctttggtcatttagctgcttctcgactgcaatactatgtgcccagaggattttggaaacagttcaggtaaactatggatggacagtaatagagatacttcttaaaatgaacatctcaatacactaacattaaacctctaaaagacatgttggaaggc

SEQ ID NO: 43647 - DNA, 2300 bp, Homo sapien
gacgaagaaatgaaaaaccagtgttttggtggagagtacatgggagaagtgtttgatcacatgatgaagcgtatgtcatacaggcgccagaaaaggtggtggaatgcttatatacttttttatgaacgaatggacacaatagaccaagatgatgagttgataagatatatatcagagcttgctatcaccaccagacctcatcagattattatgccatcagccattgagagaagtgtacggaaacagaacgtacaattcatgcataaccgaatgcagtacagtatggagtattttcagtttatgaaaaaactgcttacatgtaatggcgtttacttaaaccctcctcccggtgagtatcaagagagtttagcttcttagtaataaagaataatttatagtaggcgtcaacatgtttaagttcataaaattaatgttttcactttaaatgagtctaatttgctgggtgtggtggttcacgcctgtaatcccagcactttgggaggccgaggtaggtggatcacctgaggtcaagagttcaataccagcctgaccaacatggtgaaaccccatctctactaaaaatataaaaattagccaggcatggtggcatgcacctgtagtcccagctactccctgtagtcccagctactccggaggctgaggcaggagaatcgcttgaacctgggaggtggaggttgcagtgacccaaattgatggccactgcactccagcctgggtgacagtgagtctccatctcaaaaaaataaaataaaaaaataaatgggtctaaattaaagtagcctgagaagggttcttaacaaatttaggacttctcaaaattaatggaaacacagacttgtttgaaaatggggttggaaaataaaaatgtgtttttatatctgcattttatttatagggcaagatcacctgttgcctgaagcagaagaaatcactatgatcagtattcaacttgctgctaggttcctctttactacaggatttcacacaaagaaagtagtccgtggctctgccagtgattggtacattgctttggattttcattcctattatactaatgtttggtttgcttctttaatagattgctttatgtttttctaaaccaagagaattttgtttgaagtttggaatatagaataaaaactctgggtcacaatagagaaatcatattaaaatagttacttagtctaaacatggccttttgttattcagaagctgacttctgcttctattaccttgtatcatatctttgacatccctgcaccaaagactacaagctgagactgggggacagtgactcacacctgtaatgccagcactttgggaagccagggtgggaggattgcttgagctcgggagttcaggaccagcctaggcaacatagtgagacccccatctcttcaaagaagattttaaaaattacccaagtatggtggcgcacacctgtaatcccagctactcggaaggctgaggtgggaggatcgctggagcctgggaggttgaagctgcagtgagccatgactgtgccactgcactccagcctgggcagcagagcaagaccctgtctcaaacaaaaccaaagattacaagatgagactgaaaagtgtaagctacttatgaaatttattaggttttagcttacctagattgaattctgacaccgattaaaagggtaaaaaattaaaatggttttcttaagtttctaattgtgaaagtatagaggccattatgatacattgatttaataatttttacttactcatttcaggaatatgtcaagataagggggtggtattttgtcattgaatctaggaagagtttgttaatggatttttagaggacaagctttcacctgtttggtaactctgagagaatagaccaagtcatagtatttatctattgttttaatattagaagcaacctttgctggttctctccagcagtagaggaagatctttgtcttttttttttggttcaatgagactcatccttttactatagagaacaagttattgacttaatagtcataggtttttttgttttattttaggtatgatgcattgtgtattctccttcgtcacagcaagaatgtacgtttttggtttgctcataacgtcctttttaatgtttcaaatcgcttctccgaataccttctggagtgccctagtgcagaagtgaggggtgcgtttgcaaaacttatagtctttattgcacatttttccttgcaagatgggccatgtccttcaccttttgcctctcctggaccttctagtcaggtaatt

SEQ ID NO: 43648 - DNA, 2300 bp, Homo sapien
agtcattcggagtgctgtgaaagttggctcatttatttagctgcctcaagtgtgcacatcattctttttcaaagtgaatgtgtttaaagacaaagctttgtatgttttcccgcttcctctccaattggatattccaattataacgtattgattaacaaaataccctggtggtttgaaccaagtatgcctatgagcaggggttaattgaaaatagggaactgctgtatatttcaattcttttaggtactcccatggcggtaccctgtactcggctctactcaaaagtaaaacaaagcccagaaccagggtagtcagtgcatcccattgttgctatatgcagtttgaagagctgtcggaactcacagttttcgaacctgactcatgtttaccctggttcataggaaaacgaaactgaaacaaaaccgaggtccttcaccaaaactccatgagaatccacgaatctcagggcaggaagggaccctaatatcattaaacctagtggctctccaaggggcattgtagaaatctgtgtatttctggttgtcacaatgactggcgagagctactggcatttagtgggcaggagccaggcacgctaggatgttctatgatgctggtcagtcccacagagcgaataattgaatcactggacacatgtcggtgaaaaactagttcattatcatctaagcctagaactaacactgttttacatatgaacacaaagtatctttgcccagtttccatatatcctgaattttccacaaatgcaggtactgtttcaattgaaggaagattgtactgttttatttaaaaattattaatagttcatcattttggaaaatgaggttcctagtagcaatgctgctcatggaacttgagttgtgaaatcaacacacctttccagtttgcatttgtggctctactgggcaagtgtcttcccaccagttagtgtagctgtgcggcggcatttacatattataatacattgttttattataatcattttgctttcgtttgttgacagatcatgttttttgaaattgtgtttgtaggtttacataaacaatttaggttttgttatttcagtataggtaaagggggcgttagaaaatactcgttatgaaaaggagttgggtctttcacagggttatggaatgtagcagactccttttatagatgagcaaattgagacccaaagccgttaaacaacttgcccccgacagtgtgatattctctccctatctcgttcgaatttccgtctcgattttaaaaattgagaagggagagaagttatgtgtatagtaaattatgtgatgagcacgaactatttgaattctggcagcagaagaccttttgtgggggtggtggaaaccactgcgttttatttaatttcgtagggctgagggtcagaagagaggggaaagcggtcataagaaactacggatgtgcgggcgccggctcaaagccgggaatccactagtaaacaccttcttctatttaagggcctgcggcaccgaagccgggacttggggtggcctgcctaggagggaaccacaggaagaggttccaccgacggtagaaacccggttcctcctgttcctcatccaccgcagcggcctgagagtcaccccgagcccaggccggtaaccccgctgcagcccctccggcaggcccaggttgcaccggctacaaacattcccgacacccttgggccctagaagagccgttcgccacccgcggggtccccgcaacgccggtggtcaccggccctaagccgctgggcgccccgcgggaggaaactaggggcaaatgtagcccgcattcctgcggagagccggggtcccgggagggcgcgccagcggcggttccggatcagcgcgtgtctgtctcattgttccctcaccgcggggggcgggggcggaggcgcgcgcgcacacgtcggggggttggccaggaggggccattgtgtgtttctaggcggcgcccccgctgcctaggcaaccgcgcaggaaggtgtccggccacctgcgcgcgccgccggctcccctccatttccccccgactcccgccccggtcaccatcctaccctcctccctcctcctttccccttactccgctcccctcttttccctccctctcctccccttccctctgttctctcctcctcttcccctcccctcccccgtccggagcactctatattcaagccaccgtttcctgcttcacaaaatggccaccgcacgcgacacctacggtcacgtggcctgccgccctctcagtttcgggaatctgcctagctc

SEQ ID NO: 43649 - DNA, 2300 bp, Homo sapien
atgcaggtactgtttcaattgaaggaagattgtactgttttatttaaaaattattaatagttcatcattttggaaaatgaggttcctagtagcaatgctgctcatggaacttgagttgtgaaatcaacacacctttccagtttgcatttgtggctctactgggcaagtgtcttcccaccagttagtgtagctgtgcggcggcatttacatattataatacattgttttattataatcattttgctttcgtttgttgacagatcatgttttttgaaattgtgtttgtaggtttacataaacaatttaggttttgttatttcagtataggtaaagggggcgttagaaaatactcgttatgaaaaggagttgggtctttcacagggttatggaatgtagcagactccttttatagatgagcaaattgagacccaaagccgttaaacaacttgcccccgacagtgtgatattctctccctatctcgttcgaatttccgtctcgattttaaaaattgagaagggagagaagttatgtgtatagtaaattatgtgatgagcacgaactatttgaattctggcagcagaagaccttttgtgggggtggtggaaaccactgcgttttatttaatttcgtagggctgagggtcagaagagaggggaaagcggtcataagaaactacggatgtgcgggcgccggctcaaagccgggaatccactagtaaacaccttcttctatttaagggcctgcggcaccgaagccgggacttggggtggcctgcctaggagggaaccacaggaagaggttccaccgacggtagaaacccggttcctcctgttcctcatccaccgcagcggcctgagagtcaccccgagcccaggccggtaaccccgctgcagcccctccggcaggcccaggttgcaccggctacaaacattcccgacacccttgggccctagaagagccgttcgccacccgcggggtccccgcaacgccggtggtcaccggccctaagccgctgggcgccccgcgggaggaaactaggggcaaatgtagcccgcattcctgcggagagccggggtcccgggagggcgcgccagcggcggttccggatcagcgcgtgtctgtctcattgttccctcaccgcggggggcgggggcggaggcgcgcgcgcacacgtcggggggttggccaggaggggccattgtgtgtttctaggcggcgcccccgctgcctaggcaaccgcgcaggaaggtgtccggccacctgcgcgcgccgccggctcccctccatttccccccgactcccgccccggtcaccatcctaccctcctccctcctcctttccccttactccgctcccctcttttccctccctctcctccccttccctctgttctctcctcctcttcccctcccctcccccgtccggagcactctatattcaagccaccgtttcctgcttcacaaaatggccaccgcacgcgacacctacggtcacgtggcctgccgccctctcagtttcgggaatctgcctagctcccactaaggggaggctacccgcggaagagcgagggcagattagaccggagaaatcccaccacatctccaagcccgggaactgagagaggaagaagagtgaaggccagtgttaggaaaaaaaaaacaaaaacaaaaaaaacgaaaaacgaaagctgagtgcatagagttggaaaggggagcgaatgcgtaaggttggaaaggggggcgaagaggcctaggttaacattttcaggcgtcttagccggtggaaagcgggagacgcaagttctcgcgagatctcgagaactccgaggctgagactagggttttagcggagagcacgggaagtgtagctcgagagaactgggacagcatttcgcaccctaagctccaaggcaggactgctaggggcgacaggactaagtaggaaatcccttgagcttagacctgagggagcgcgcagtagccgggcagaagtcgccgcgacagggaattgcggtgtgagagggagggcacacgttgtacgtgctgacgtagccggctttccagcgggtatattagatccgtggccgcgcggtgcgctccagagccgcagttctcccgtgagagggccttcgcggtggaacaaacactcgcttagcagcggaagactccgagttctcggtactcttcagggatgagtcatgtggcagtggaaaatgcgctcgggctggaccagcaggtgagccgcaagaaccccaccgggctggctgctgcgtgaattcctcccctgacctaacctggct

SEQ ID NO: 43650 - DNA, 2300 bp, Homo sapien
ggcctttctcctgtcttgagctttaagtttctcccaggggaagtcagtcaatcgcatttcctgtaacaaccctgggccacctgcttttctccctgcagcaaggttttgattaagggctgctcatcctcccaagtcggtggtaccagctcacctggtggatgggctccttcctttttatgccaagagtctctgatgcctccttattttccacttgggagaaatgtttcagttcacaggtggagaagaaggtcttccttagtgggatcccagtgccagagcaccaggcccactggcctggagaagattgaagggaaggttggaccaataagctgcgaacaaaggttgtgggtgcagacaggttggctcttacagtcgagattcagcctctggactgctgctgggggagtgggggcttcgttgggctaaggcttggggtgatggctacagggacacctccgacactggtggtcacaatgagagggctgcccactgctctcatctaataagccaggcgagtccaacactggggatagagatgtcatttgagaggcctcccccacccacatccctaccccatccctagtattctcttctttccagcaggttagacaagttcagccacattttggctttcaaggctcaaatggaagaaaacaaaaattccccagggcacggtggcctgagatgtctagattcacatccagaaccctttctgtgggaagggaactcctggcttcctttcatcagcactggctcaccaagtcctgcgtggccagaacttggcaggttgccatggatacctggaagtgctgtcccagcagacagcagaggcttgctggggccaggagaatgtgggggcacctgaactgctggccagaaaggctagataaacaggcccccctgccaccctcattttgatcagaccccctccaccagtctcctaaaacagggctttccaaactttaccgggcacaggaatccccctctccgccgacctagttaaaatgcagatgctggccgggcgcggtggttcacgcctgtaatcccagcactctgggaggccgaggcgggtggatcacaaggtcaagagatcaagaccatcctggtcaacatggtgaaaccccgtctctactaaaaatacaaaaaattagctgggcatggtgtagtcccagctactcaggaagctgaggcaggggaatcgcttgaacccagaaggtggaggttgcagtgagccaagattgtgccactgcactccagcctgggcgacagagtgagactccatctcaaaaaaaaaaaaaaaaaaaaaaaagcagatgctgattcaacaggtctggggcggggggtagaaggcgctgagattctgttttcctaacgagctctcaggtactgctgctggtccaccggccacactgagtagccagggcctaaactgagtcctggtgggtttcagaaacctcagccagattctgaaggtcccattcctggacccactgccttaggccaccactaccagccctaaccccagtgggaacctcttgccttcttgtagtggaaggactctctccagtccgtttttgtatcattcaccatcaaccacttcaaagaaaggaaatcagcagccggcattttggggaaacattttaagctgtcctgtcccttctccagctctccaagttatataatgcgtccttgttgaaaatgctgataatgctgtttgggtggcaggaagccaatttcaggctacatattgcttggggctggggctggggtcagggaacggggcagggtctggggaaggtttaaggagagaaaggggccaggcagatggagagaggacaggagggccagggtggtcaaggcccggggataaagccgattggtatgtcagcaaaatctgtcactggctttagtgattcgaaaggcagacacattctttcatctctgttaatcctcatgtgatacagaggattttcctgccattaaatctggagaaagaaaaataagcactcaaacctgcacaagtaactattcctcttcaccccttcctcccgtccccccacccccacctttacttctctctcaaaccattttcagcatctgtggctgcctgacttgggagatggatgggctgagggagtggagggggacctcagaggagcaggaccagggagactcccaggacggtaagcaacatttgaggaccattcactaacgcttctctgcaggggtttcctctccatccatttccttgctgggttgtcagtgatgccatctgagttgctgtcagggctgtagcctga

SEQ ID NO: 43651 - DNA, 2300 bp, Homo sapien
acagccccacagtgggtccctgtctcctgggtctattaggcctctccccagatatctgagcataactgggagcacctcatttgtggaaaagcctctttgttatcggccttgtgtcagcaggtcatggtccctagagactacctagttgtagtgtgacctacatttataattattgtcatgtccgaatagataggaggagaaaaacaattacacactaatttaaagagacagtatcttttttaatcagttctcctaaactttaataaaatgtatctttaaatgtatgtattattcaatcctttggaatgttatatttttggaaatcatagctttttatttccaaggcccctaaaaactgcacaaaatagatgctgctttctataatctattttaataataataaacaatgattctgttaccttgactgggggtggaacactacattctttttagagtctgattttatggattggaatattgggatatctttctttcctttatttatttgaaataattagtgtagtgattacaaaacagtcataaatttttaaaggccttttttctctctttttttttttttagaatagtatttttttttaagtcctttatgtaacatccagataatgtgatactgtctctttgaagcaccctgtaaaccttttagagatttgaagttgggtcttgactcttaatgcatgtggacagtcgcgagcgtttatgctgtcggtgtgtctgtgttggacaaaacaatctgtaatctacagcaaagtacattctacattccgttcatggggcacacccaggggaataagaataaaatgctattatgactaagttgtaaacctatgcacatcccttgcattttgggcaactttataaaaaaaaagaaactgatttttattaataataatcatgtagtgaaatgtgtttgtaattttgtctcaatttaatttgttgtaaggtggggtggggggaattgctggtttcaccatttcagatctgtgttgtctaagagtattaacgttttaattaagcaaagaaatgatttttaatctgtatgtaattgttttaaagcacccattttaagagaaaatactgtgcaatgaagaaaccagtttaggcatttgctataaactgaaatattccaaaagaatcatctataacagccctgtaaattcctttaaaatgataactaacaggacagtttgaccaattttttttaaatatacttccttttatgtgttcaataattaaatgcctttgggtccttcatttcattatagatttgttcaggcttccaagctgataatctttacaattgtataatttgttagatgctcattgaacctttgaaggcccaggagtgagtatcagttggcagggtgacaaagtagcctgccagagcacagctggaccacgtctgactcgcacagagccatgcgcccaagggccacgggtgtactggaggccacctgtggtctctccttcctcttgctgtatcccttggcacaggggaatcatctgtccttgttgctttagagacattaaccatctcataactcttccatgaagtcacattcttccaatacaggagattcgggctggggttctcagactctttgccagaggtcagtagaatgtttttcattagcatgtgagggtgtgaagtgcttatattaacctgtgatccttgaaaacataccatcattttttgcttcttgtaggttagatggccttgtcactttgtgccttggcaggatgtgcagggtgtgttctgagctgaacagctcctcttaaaggaccaaacagagaaggcattagtatacttcttttacattgtcaacaccatacccgcctccgccccccaccgcctattattaaatggtggcgatttttttttttctgatgttgttctttgccagtgaccagatgagtctgcaacttactaacaaggtattgagtgaactacttctgtatgggccccacagtggggtgaccaagccaccaaaccagagataagctcaacagtggtctcacactagatagagagagaaaccttcaaagagttgggtagggctgtgttagaactgattcgaatctgatagatgccaaggccagacagtcgttcctggtatggtactgaccacaatttcgggctcttagtgtgaaggtgcgcactctacctcttttctggtgaagcacaaagacaactacaactaacacatgggaaacagaaacttccctccctctagtggaaacccccacgcccccacttgccctttgagcccacatctccagag

SEQ ID NO: 43652 - DNA, 2300 bp, Homo sapien
cttaagaacacattttctctctgcttaaacttacctgctttcttcagcttgctgctaaatggcctgggtttgactttttgataactcaacatttctgataaatggaataatgtatattatctctttacaacttaaatctagctcatttttttaaccatattgtaacagaacacacaaattactttgtactcttgaaaaataaatgaaaatttttctcctgggttggctttattctacaggacttgccatcaactacccaaccaaaaggacgacaggtgaatagatatcctctatagaaacttctctaaactgagcagctaatagccaatcctttattaaccctttccatcccataatgtttgcattttggaccataacatttgagcattgagagcttgtaccatttcattttaacacattacacatgactaattctctataaagaatttttcctcacatctttgtagctgtaatggttattgtaatttcaacctgataattttatattaatggttaagaattcagcctttgggggtggctgtgggcctgcctctggcatgcaaaagaattttaaaggttataaaattcttagaattctaagactaactaaaaagttattcttaaaatgctgatgaacatttttaagcaaaaattttctgaagttgaaagctttttcttaaatttgtatttgcatgtgtatttctaaaagccatttgcaatgaaaaataagaaaagaatataaattatcttagcttcacatcctgatatacctgtgttagttcaaacatgaaaagttaagtgctgcctaacactggcaagtaactttcaaattgccagcactttagaggtatagattttaaatgcaaatgcagagacttgtaattttataggctggattgctgaaaataaacagaaaaatcacacagtggttccaaagtcttcaggttggttttacagtgacttaaacattaatattcaattttaatttcaagagatagaatttttatgggatttttatcttgaaatatggtattaaaaataatcagatttagtgttaagatatgtataaattagtacctgatagaattcacccataattttgtcttaagactgtataattgatggaacattgggtatgaattaccttatcttaaagcatttaaaaaataaaataattcataaaatgctgccatataataaacccttgaatgctaatctatttcctaagtaaactcacatatcataaaactcagagccttgaactatgcatgtcttgaagctctgtgctgatttcaagtgttacattgggggaagctagggttcaaattcatttttattctctcagaagagtaaaatacaaacctaaaacctaaattagaaaaaaatgaagctttttttaacttttaaaaaattgtttgagttacacttaactttatcagcaatgtgtagacacactgccagttgtcatataagcattctacagcaagataccaacccagagttcttgctaattttatatcgtgtgctgctttagggttaaaacctatcctgactgctagtatttatggcttaaaggctgccacgcagtcatgacaacgtatccataatgccagcatcaccaatgcaggtttaaaaaagagcgagcatacttttctataattagaggcctattctgttacagtaaaagcataaattaagtctttatttttattaaacaagtatttcaagtgttccttccaaataaaaacagcaaagttttgaagctatactcatcaaagattactagtacattgtttctagcggtagaagttttttgtgtcgtatttccatgcatcgtttttgctttcaccatctgatgtcctgtttgtattgtaactgttggtgtgtggttatgacattagagctaacttctctttcacatcactatggcatcctttcttacgaactcctgttttatagatctatgtaagagcacaatttgaatatgatccagccaaggatgacctcatcccctgtaaagaagctggcattcgattcagagttggtgacatcatccagattattagtaaggatgatcataattggtggcagggtaaactggaaaactccaaaaatggaactgcaggtctcattccttctcctgaacttcaggaatggtatgtttttatgcgtgttttgctttgcttggttataaaaacaaagccctgaccatccattttccaattttatattattttagagtgtaaaacctgtttgatatattccttcctttacgagccaaacaaaatttaaattagtca

SEQ ID NO: 43653 - DNA, 2300 bp, Homo sapien
aataccttataatcccaacaagagaaagaggaagcgtgaagggaagaggacatatcgaaaatgagctaagaacgcagagacaaaccagaatgttcagaatgaacaggaaaaagcttatataaagaaagaactagaaaaagattatactcaaatctggtggtagctgtgctgactcacattgaggagaaaatgtggtcacaatatgaggaaactgaagattaaaacaattagtgttttgaaaagggttgtcttaggtgtaggaaaataatatagaaaaaaatatattcatgctagattatatgaaatagaatgcacgtagttaaatgcctatttagtcattaaaaaattcctgctaggatcttgaagagatatatgcatactcatgttcactgcagcattattcacattagtcaagaggtggaagcaacccaaaaatccatcaacagatgaatgcatagggaaaatgtggtgcatatacagtggaatataatgcagtttgataaaagaaggaaatcctgtaacatgctgcaacgcagatgaacctcgaggatatgacaccaagtgaaataaacatgtcacaaaaggacaaatactgtgtgattccactcatatgaagtgtccaaagtagtccaaatcaatgaaacataaagaatcatgattgtcaagggcagggggagaggagagaaatcgtttagtggtgaagagttttagttttgcacgatgaaaaacttctagaaactgttgcacaacaatgtgaatatacttaacactattgaattgtatacttaaaaatggttaagatggggctgggcgcaatggctcacacctgtaatcccagcactttgggaggctgaggtgggtggaccacctgaggtcaggagtttgaaactagcctggccaacatggcaaaaccctgtctctattaaaaatacaaaattagccgggcatggtggtgcatgtctgtaatcccagctacttgggaggctgaggcaggagaatcgcttgaacctgggaggtggaggctgcagtgagccgagattgtgccattgtacaatctcttgtcgcctgggcaacaagagcgaaactccgtctcaaaaaaaaaaaaaaaaaaaaaagttaagatggtaaatttaatgttacatattgtaccacaataaaataaaatcctgccaatacaacaatattgcaggactaatacagcaaccaccttccttctcagaggttctaaggggaagtaagagctacaaaacatttttattctattaatttaaaaatatcctgtcccataaatcatatttataacaaacaaaaagctctggagaatataatgttcagaagagtgtacccagaaataattagaatgttagatacagcccaatgagtcaaatatttagtgcaaacaagctgcaggataacaattatggggagaataaaaactaacttcttcatttcaaatgacaacaaaaaaagggaaataacactaaactgcagggccagcagttacatagatggacagatagtggttaaattttggactaggatcaaaaccaagactgcagaatcccatcattatttcgcttaaaatacaggtgatgttttaatttgctcgggagagtttatcatagtgatcaaaaggggagaacaccatcagaaatctcatctagtcctaataatacaagtttgttttagcaaaggtcttaaaggaatacatgaaaatatgctaaaataatgtacagatgaaaacttaagaaacagaaattcagtgcttgtgctttgaaagtccatatagcatattatgtatcatttcttacaaaacacagaaaatacatatttctgcttagaatttataaaacttttaaattttgagcggggggaggaaaacattccacaattgtcaagttggaaggtattcataaagaagatataaataatttcctaaagttcagtgttggttgagcttaaagttgttccatggtagtagggctttttaatattttcaaaaggaatctgagagttgtcataccgaaaaaagaaaaaaaaaaagagggggaaaaaaaaaaccctaccaccacatatgaacataaaaaagaagagaaccccaaccaattgcaccacgaccggatggaagagcccagctgacacaaccaagacgagtctcagtgtctagggaagcttggggttctgctccttttacttcaggcgaacctgaactgtgagtatttcttgatttcggctacataaatgaacctttatttcagctaaaatttgattatctgaacattcaaagtgaaacgtgattc

SEQ ID NO: 43654 - DNA, 2300 bp, Homo sapien
caataagtatttgttgaatgaattacactgtttaacaaaaatagacctaaaaaccaaaatagtgtaagaactggcaaaacttacacctatccaggtatgcttgtccaataaacaaccagtggactgacaacggtttttaagcagtacttctgactcttcctttgtttcaacggttgattgacatctgtgatagccagtttccaagatggctcccagtgatcatcacctcctgatatttacccgtcccacactgatgcagggctggctctgtgtgaccaatagaatactgcagaagtgacactgttgacttcagaggctagatcacaaaaaggcattgcagctatggacttgttcttgaattagttgctttgaggtgagccaatcaccatcctgtgaggacagatggctgtgtgaccttgggcaacttatgagatctttctgagtttcagttttcctcacctttaaaatgagacatttcacagggtgttgtgaaaaccaaataagacttggatgtaaggcacatagcgagatatctggcacatagtaagctctcatgaaatgtggctaatgaatgatggtagtgatagtagaagctgtagtaccagcaattgattagatgtgagatgtgaaagaaagaggaattaaggatgattcgtaagtttttggcttgaataactgaaggagtgatggtatcatttactgagtttggagacaatggaggaaaacaagagcgttcttttttcggaccaaagacgcttatgcctgaacagataatattacaactatctttcaatcacttagaaatagcattccatttctgttcttctctaaattaattaaaactgttttttgttctatgtaattccttcctggaacatgatacattactgaagtaaaagtgatgggaattctaaaagccaaactactctgtaatgaacggccatgtaaccctggatgagtcactgttcttaagtaaatggtggcaaggcaaagatgaacagcagcagaacacaatctggacactttaggcagttctcacttttgttttggagagaaatattagcaaacatcatagagaatttatgaaataaacatgaaataaggtaagcattgcgggtttatgagaaatggcaaggtacttctgtaaattttaagtgaagatttactgataactaaaatgctcaggtttgatgaaattagatttctgttctctttttcagactcccactggtttaactactcaaggatgagagggagtgcttgatgcaagtcttcctccccagatgtacacacttagctttcatttagttagtaggtcacagactgattcgacaatcctgaacaaaaaaattggtttcacaattctattttttatttttaaaatttttattgttttagactagtcatggtttcacaattctttataactattcatttgatctgaggcatacttggcacttcccaggatttgccaaatccattatgaaatgccccaaacagtgtattatgttgacaaatggagatagtgcagggcaattagaaacagagtgggttaactcattagtaaccaaactgggacccaaccctgggtgcagtctgtgcttacagtgagttcctctgggcctcagcttcttcaactttaaaacaaagggtctcagtccacagatgatcatgaagttctattttagctctataatatttgattctagtaagttataagaaaactttgagttttgtttctatttttgataaagatggattgcaaataagccatccacaaacaattttacaaacgagtttgcaccaatatttgtattgggttactacagagtggctccttctatcactgtgtcatataaaactggccatgggggattaaacctgtgaacttaacttcagtcaatcgtgcaaacaaaggttactggagtgtaactagttcatgaaataatcataaggaagtataatatgtatattgttcaccacttcctcccactacagaaatagagaaatgagggttttttgaggaggcagttgccacattgaccataactattgaatttcttcaatattctgtttaatttccccttttcctcccactgtagttggtgtcatgcaagaatctattcacactgactaaagatattggaagagtgaagatcagagaattttaagtctgaaatttggcatcactgccctgaacaatataaccttagttggcataaactactcatacaggtaagagtgattattattcatttttagcttaaaaattaaactctataaaaataaacaggacctaa

SEQ ID NO: 43655 - DNA, 2300 bp, Homo sapien
acaaggtgacttgagagggtccctgtgcacttcagggcagaatggagtgacgccttattcattagacatgagctggacatgccaacttgtggtgagtaactcttggacccttaaaggaggcaatgtttctcaagttctgaagcccccgtctctagagaatgcacaagctctttgagaaaggaggaaaaccgtgtgcaattacacttgtcctctgatctgcatttaaaaaaaaaaaaaaggtttagtacccaaatccttagcaggcaaatctctcagccttttgagggagtggtcaagggtttgcacgaaacgtttctgaagagaaaataggctgtgagtctccacatcaccccctccactttggtattaataaatactttttttaaaaaaaatactgcactgagaaatttaccagacgatttctggaaactgacttatgaactaattgggcacttttgctgtgcggaggaacaaagacactattggtcttcaactgaggcatatacctgtctgatggcgctggctcattccgcacatgctcagttgaacagaaatcttcatattgaatgcaacctagcacagcggcaacacccagaacctcactccctggctgctcctgtgcctgcactccctctagttgcattctgttcctgacaagtctaacatttatagggagtatagagagcagagtaggtcctgggagtttgaggacaatatacaaatgagcttaaagtcacggtttgtccctgccttcctagcttctctctaggttggtctctagtgagggtaggcgctggatagatatttgttgagtttggggcagaacgtgggagaagctgtctctatagatgaccgtttgctgtcgcacaccttcctaggcagtttttgtttagtccttttcttggacgacctccccttacccccagccctcatcttcattaaggaatgacagggtagcactaaaagcatccgctgccaagcacggattcagtgacaacctctctccacctctcttttagctttctcattcattagcaccctttccctgcctcttttcccagcaaaaaactgggaaaggctccctgcgattacaaaagaaggaaaggggagcggccagagtttcgtgcctcttgccggacaacgagcgtgcagccgtggaccttttgtctccagcccctttcgcggcttggtcgcggctaggcgcggaggcgacgaccccaaccagccccgcctcggcagctgcagccggcgcgccccactcaaccccccgcgccctctagaatcccggtgcccgcccgttcgccgtgacgcggccggcgccccgcgcatgcgccgctcggcccgctcccctttccctgggccaccgcctcccgaccggttggagtgggcggagcctgtggttctggaagccgcgccgccgacgggggaggagggcgtgtctgcgcgaggcgggtgagcggggctggcgagccggtcggctgctgaggcgtaggggcggagcagaaggcggcggccgcggctcccgcccgcacagagcgccggtcccgcgaagccccctcccactcccgggcgggcggtggcggctgcgggaggaggagaaagaggagggagcgtctctgccgccgcctcctggtccccagcgccgatccgccgccgccgccacctccctccgcggcgatcctcgctccatggtcctgccgcggccccctctgtagcccgagctgctccgcgacgcgacggagccggcctcggacagagggagcggtcgcggcctcgcggcccgcgcgggctgacgagcggagagcgcgacgccgcgcggtccccgaggatccgcacgccgggcagcgcggcccgagcagcgcgagaagcagcgggcgggcgggcggcgccgggcccgggccgccctcgctcccgcgccccggccccgccgcccgcgccggggcggtcgcctgcagaggaaggcgccgcagtctctgggcctcgcggccccactcgagcgtcctcggcaccgagggctcgcgggtcctgaggggaggaggcgatcccggggctgggcactgagctcttgggcgcccccacccccgttttcgaagccctccacgctgcggccgctatcccctccggaccatggccgacgacgacgtgctgttcgaggatgtgtacgagctgtgcgaggtgatcggaaagtgagtctccacgcgagggagcgggagtgtggaaaaatgcatttcagtgatgccccggtcttcccgcacccgctcggggcctgccccctgccctccctccttcccctcttcccc

SEQ ID NO: 43656 - DNA, 2300 bp, Homo sapien
attaaataagggtgggagacaggaagaattttctagccaggaccaggcccaggaatcagagaatatatataactccattccaaacaaagagccaggaagaaagacttccagcccaacaggtgccttctttctctctttctttttcttttcctttttttgagacagggtctcattctgtcacccaggctggagtgcaggaagctcaggtgcctttcataaaaagcttcagactctaacgcagcttcagagagtatactcagaatcataagaatcaaaatgtatcctcaccatgcttcaacagactgccatctggagcactggctcaagagttgggcttaccaatggattcctgatcagtcagccaagagtgaagacaaaggtttcaaaggtgcatacttcaggttctggatgagagctccaggggtccaatggtgaatctgatcttatctgagtcacagccaacacaactgttaaaaaaattattcatgacacttgttaaagatggtaagaaagactctattccatggaggactatcacagtagatacacgaaccactgcaatggggtccgtgtaggggaataaaattggcattgactgccactccaacaagaataggtaaagggcaggatggagactcagtgaatagaaaattactgaaaggaaacatcagggctaaggggaattcttgctagactgacccaacagggtgacaagatatctagtgtggggcatgaggaatttgatcagctactcagggaagtcagttatcagtggtggggaattttcactaaattaacttagtaggattcttgctcaaactggattctacaagcccaagtttaggcctagtcgagcagagggcttagaggagcctgattaaagtttggtcaaaggagagaatctttgtcacttccttttatgttttgatgtttgtcatctagtgtacacagataagaaattacaaatgactcaaaatgctgtcacagagaataagagacaccatgaaagcaaagcgaggtctatttgctgttgggggtcaggaaatggcctctgaaagtcaatgatgattgaactgaaatctgaaagggtgctccaggctgcatgaagaacctggaaaaaaaaaaaaaaaaaaaaaaaaaacctcttggacaggaaggttcatgaatgctcccacaatgggaagatcagaatagaaagctggaggtagagtgggaagaatttaaggggagaaggctgcagatagacacgtgagtaaactgagcatatcataacagctgttttcagcctcttctgaatttgggtctttatgtcaagaacagtgggcagccgttgaagggtttgaaagagagatgaagaagatctgatgggtgttttgaccgtggataagagattggacagcaggaggaggagatactgggggcccagttcaatgactgtgagtgaagttgccataagagaaaatggtgatttgaaacacggtggtggcagaagagatcaaataagcctcttgaaatatttaggtcacatccgagggctggattggagaatgggcaacatgaagggactgaggaggacacgcagattcccagctgatataattagctctatgttggggtcattcaccaagacagggagaagagaggaggaccaaggtatgcgtggtggagggagagtgtggatgggcacaggagggaggagcagaaggtcatcaccttctagctgaggcctctcatctttccaaccaaagtcgtggctttcaaagttttgacagtgacccacaatgagaaatattttacatagctttcctgtgggcagacagggtgtatagaagtttctaaaacaatgcttcccctttccatgtacaaccaaagggtatttcctaccttattttccgttaaaagagaaaaaaaatgacgttagcatgggccacgaggcggtaacgtcagcggtacagccagcggcaacggcaaaagcaacggtagctgtaacggtagcggtgacgtcagcggtagcggcaacggtgactgcaacggtagcggtaaccatagcggtaaccgtagcaactacggcagcggtggcggaggcggcgaccatagtgacgtcatacgcagcgccctttgtgacaccagggccctggtgctttaactagggcgttgggacctgttgcccacacagaccgccctgcagtttcagactggagggcggtggacggctactcagcggcccaactctctcgcagcccttctctccgcaaaatgtcagcctccacctcctcgcaccggcccatcaaggggatcct

SEQ ID NO: 43657 - DNA, 2300 bp, Homo sapien
ttagcaagtaaggcatcataggagatgaggccagaaaagtatccaggggccagatcagaatcagatcaggccagttgcagtggctcatgcctgtaatcccagcactttgggaggccaaggtggatggatcacttgaggccaggagttcaagaccagcctggccaagagggtgaaaccccatgtctactaaaaatataaaaattagcctggcatggtggcacacacctataatcccagctacttgggaggctgaggcgtgagaatctcttgagtttggaaggtggaggttgcagtgagctgagagtgcaccactgcacttcagcctgggcaataaagcgaggctctgtctcaaaaaaaaaaaaaaaaaaagaaaaatcagaagatcaaaagaggatatttaaaggatctggggtctggtttaaggtgtggatttcagtgtggtatcctgatcaagactgagcagtttgtaacataatggtttaagattggtagacacaaggtcttgaagcacgccttggtaaataaaccgtttaatatataaattgtttttcaggagagcaggctgttgtctcagataaagtgacttgtaggaatttcctgaagcgaagactgaaactatttattggtttgcagttttatcatccctgggaaaggttttttttggaacaaataactaagtcatgttgacacagatgatcttagctcttagtcctaattgctgtgtcatattgatatagttggatgcatttctcacatattgcatcatgatatgtacaagtgattgtcttagtctgtttgtgttgctatagtagaaaaccaccgactaatagactgagtaatttatagcaaatagaaatgtattggctcccagttctggaggctgggaagtccaataacaatgtgccaccatttggcaagggtcttcttgctgcaccatcacatggaagaagggaaaagagaaagaagagggccaaacttgcccttgtatgaaaggtattagtcctacttacgagggcagagctcacatgccctaatcacttctttaaagtttcatctcttaatactgtaacagtggcagttaaattgccatatgagttttggagggaacaaacattcaaaccatagcaggtacatttcaaagtacaaggaagagactccagtgctaatacactgagcacctatgtgaggtcttttccaagcatcatctaatttagtctttacaacattcttatatggtaggtactaggttcaaagattctacctgagaaaactgaggatctgagagttaacatgcctgtcatagtccattaatcttgctataacaaaataccacagactgggtaatctataaataataaaaatttatttctcacaattctggaggctgggaagtccaagatcaagatgccagcagattcagtgttaggtgagtgttgctctctctgtgtccaagatggtgccttcttgctgaagccacatgtggcagagagcaaaatgcaaaaggacctagcttgttccttccagtccttttacaaggcactaatccattcatgagggcaaagctctcatggcctaagaaactttcaaaggccaaacatcttaacactgttacattggggattatgtttcaacataaattttggagggcacacaaacattcaaaccatagcaatgcccaaagtcacataattagaaagtgacataaccagaattaaaatccaagtcattttttttctccaaagttcatatacttagccactgtaagacacggcctcctatgaaccaaaacaatacgcagtgtattttcaatcttcaaaggaaacttgtctgaaattatgggaaacttcttagtcctggtgatagttgcaggaggcagctaagggaggatccctggagaatctcccaaccaccccacaagtgtttacatcagatgcttttatgcacatgagagaacctgcccaggcccttgtctggacatgcccacaatggactgggggccggcctgctcactggaagcatggggtggagccactggggattcgttccttatgcagtggggaggagcgtggcctcttcaggttgtgtgtgtggtggcctggcattcaatctgtgaggtggatgcgtgttggaaggaccccttttggtttctttttgctcagagctttcttttaataaattccgctctcctcacctttcaatgtgtccgtatgcctaatttttcctggtcctgtgacaagaacctgattttagctgaactaaggagcgaaagatcctggatcattttggtgacccatactggt

SEQ ID NO: 43658 - DNA, 2300 bp, Homo sapien
caccgcgcccggccagatttcacctatctttgagagttccagtaatgacaaattcagcttttgatgacaaattcaggataacaaaaagtggaaaattaagaaagggataaaactagcaaacagaaggctggctgcacagtaaaatatgtgcactaaatagcactcttttcagtaggatggggaaacacatgttttcttatttcatttgtttctgcaccttagccatccctttgaccttttaaaatgcagtcccacttaatacatgataggtgagttatttttcttgcctacttgcttcgatttgggttaagcgcctcagcttgaaaaaccccacagagaaccaacaattgcctggtctcccccaagtgacggttctcgccccgccccgtcccgtctcgcctcgccccgcccctccccgctcctccccgcccctccccgctcctccccgcccctccccgctcctccccgcccctccccgcccctccccgcccctccccgcccctccccgccccgccctcaacctagtgagggctggaggctgcgcagacctcgacgggccctacatgacgtcacaaaggggccagaccaagtggggcagcaccctgcgaccctgcgatcctgcctggctcagccgccttcatatatctgcttccttaagtccactcttgcccagatagctttcagttaaaactaaagaatgaaagcactaggttgagagcccacgcggctacacccacgtctactcccccactctcgccaggcaaccgcgccccccgcctgcagtggcatcgtccggccacgcccagtggcagggtttccagcgcgagcctgcaggcaggccgggaaggcggagccaggccggcctagagtcacttctccccgcccctgactgggccgggagcccggggctggtctctaagagtgggtaccgagaacagcctgaccgtggagaagggctgcgggaagcagaacaccgcccccagcgcccagcgtgctccagaaacatgagcacaaacgcctcagcctccttccccggcggcaccggcaccggcaccagtacccgcaccagtaccggcaccggcaccagtacccgcaccagtaccggcaccggcaccagtacccgcaccagtaccggcaccggcaccgagcgcaaggcggagggcccgcccgaagccgggggcacaactgcccaggtcccgaacccggactccagcttggacgacacctcctacagcctgtccgaatggagcgtccgttctgagtggcggtccgtctcggatccgctagccagttcccagtggagcacgtcctcaactgccgaggccgcctcctggagctccagcatacactccccaatcagcactaccggtcttagcgagagtactgactccgactccaagagtggcctccggggtttcagcgcttacaacccgagcagtcggatccccaagtctaccaccagctcgaactcctccgatggggccgtcacagcctccaatcaggacaccggcattccctgggtattagtaacaggacctaccccgcccgtaaactcccccgtagagtcattgcaagggtctgccttctcctcagggttcagcaccccacggggtttggtaaaaggaccgaccctgcccccggattccaacctgacctcagtgtccgactacacttggatatttgtacggggacctcctatacccaatgacctttcgcaagtgtcaatacaagcacctcctacacccagtaacacccccgagtgtcagtacaagggtctgccgcatcctcagtgtccagcttcccctggggtttggtaccaggaccacctctacccaataacatttccccagtgtcgccacaagcacctcctgcaccccataacatccccccagtgtcaaggcaggcgtctacccccacctcagtgcctgacactccgcggggttcaatacaagaacctcctgcacccagtaatcctttccagctgccgacacaaggacattctaaacctaataactctcgccgagtgtcagtacaagggtccgccccgctctcagtgcccagctccccccgggtatcagctgaaacatcagctccgcccctgggcgctcccggagtatcagcaaaagggttcgccccgcccacagtgcccggctccccccgggtatcaaaagaaggatcggctccgcccccgggctccccgggggagttgatagaagggtccttcccaccctttgccgtccccactcctgtgcctacgacccaggagcgtgtcagccaaagcatggagaatcaagagaagg

SEQ ID NO: 43659 - DNA, 2300 bp, Homo sapien
gtcctaggttctaattcaatccccacccccatcccttttaaaaatatacctcatggagcacaaggtaactgattacctttgtttggggaaaatgctgtttgctaatgaattttctccagataccatggaaccgtgtggatcctctcctgccctcattgccagttggacatagagaagggtttatcagtctgccttttattcaaagtcttagatccccaggctcctggctgacttgcactgttggaactaagcaaaagagattccaagaagatcccacaaggatctcgtgttagtccattttgtgctgctagtacagaatacctaaggggggtaatttacattgaagagaaatttattgtatcatggttctagagtctgcaaattccaagatgagatgttggcatctggcaaaggccttcccaatatgtcatcccatggcagaagggcaatgagggttagaaggagcaagaggtcaaatttgctgtctcaggccctttttatagtggcattaatccattcatgaggatggagcccttggaacctaaacatgccccaacattgttgcattgaggattgaatttccaacacgtgaactttgggggacacattcaaaccgtagcagatcctctccattcatcctacctcacctggcacgtaattcacttgcaggctaggtggggagacaagagtatccacagccaagaagcccacagcttcagggacctgtgaacagaagtggaccagataggggatggcaaggaggaggtcagcacaaactgtctgcagggtgaggtagcttcattctctgcagtggggacatgaggtagggatcggggttcaggcacagggtctgactgttttataccaaagcaggacagatggaagtcagaggtggacaaagacttttcctgtcacctgtgactcagtcacagaagtgcccaaattgtcttctggtctgaggacagcagaagctcaggatacctttctagcaggtagatacagggaatggtgtgggatgaggcagaggtttgcttcaggttctcatcaaattccccagatctgaagccagcccctctcaggcctgaacagaagcacttcacctgtttatttcttgaaaagccattctatgttgctgcttcccacttttagttctcagaggtggctttcctactgtccagaagacataaacttctgttttccctggagtcaccttagcttaaactcctataatcttgttgaatcatccctgtgtttggctaaaccaggctcctcatacccacgttccagggtcacacaggtaacttggcttgctgcttctgggggctctgaatcccacaatgccgatccaccacctcttccctgctgccactagtctcctggggtctagcctcaacagcttccaccaaggacacactgcattgcttaagagtgtatttaaggtgcggcatttgtgatgctagggaggagccttcctgacttaatcacgtagggggagtggggaaagaagtgggtatttggaaggagggtgaggtgggctgggaatgccaagaaatggtagtactgtgtggtgaatcaaagtgggtcttggaatcttcctagcttttcttttcttttcttttctttttttttctttctgactttttatcttatgttgtcactcaccatgttttgttttcctcatctgcaaaatggattgttgtaagcttgaacaggaatcatgcataaagtactgagcacagtgcctggtaccttgaaatcactcaatggaagtttcttattatttgccctacacccaaggagtaattggggccctgaaggaagacaccccaatttgccgtcctcccagccgccaagcctgatagtgcactagggaggctgatgggaaaataccgtgcagaaggctgaggagtggggattctggggcgggactctttgaagtcctaggtgacctctccgcccaggcacccgccctccccgggcctgggctgcagagctgcgggcgggggcggtggccctgcgctgcacccggcctgcctgcgcgtaggcgggcgggcggggctgcgcgtccgggctcccggggctggtaatatagcggctcgccgaggcgctggtgcacgggggcagcgcgcagcaggccggcgggcaggcgggcgggctggctggcacgcaggactgggatcgaggcccagaaaacggagcagcgggcaccagggaggcctggaacggggcgagcgccatgagcaacaaatgcgacgtggtcgtggtggggggcggcatctcaggttagtcgcggctgtgcg

SEQ ID NO: 43660 - DNA, 2300 bp, Homo sapien
taatcaattctctttctgacactaattaaggcttcaaagagacagataaccacttgggataatttagtcacagtgaaacttgggaaatggtcagtaatatttcatcctctgaaagtggaccccaagaaagttctggctctttgagttgttgtcttggtaattttcagggtaacgtgtataggaaaacccagattatgcagatgaaaagaaaacaaacatgctcttctgcatcctttgcagatttgaaactttgggcacaggtttgatttatttcaatgagatgttgctattagcatgaacataaagtggtgcaaagttgtgctggaatatggtctcgtcaactttgggctcactgtctgcatatggagatgatagtaactgaatccatagttatcaagtggtggcattttagaacacaaagggacagcagatgccatctctgtcaactccttccctctacagatgaggaaacttgggctagaggaggttgaatgacttgtgtaaggcttccccagctaattaatggcagtgccaggactcaagtccaggtgggttccctcattactggtccttgcccttcctgcaatttataggacttccctgaggcacatgtgctgaggctttgctattgccagggattctgtgctctgaaacagccctatctcacacacccctttccacttaggatcccctacctcacacttccaagacagctaattgaggctaaatgggtctgatgccattctattagtgcaaaataaattggcttatgccaacttgaactcctaatcttgattttatcaacactttgccctgtttattcagactgttcatgagtaggaagttaaggaaaatgttgcctatgaacaaaatgatcaaacttttatctgaaatacctttgaaagttttcccgaagctttaattatcatgttccttttgttttggatgtaatagcaggccctcccaattttcctaaatgtttgaaaatatttttgatactttctgtcttctgttgtggttaaaaaaaagaaggcaccagtgttggctatgcctggggagttagtgaggtaatctggagagatctctggaccccagtcctttgtccaagaggtatggtcaaaagaacaaagcaaatttcagaaaaaccggtataatatgatcctattttaatggtaagtctgttccaacaactgctttctttttcgaattacaccatgtgcccaggctacaaaggctctgcagaaatgtgactctgttggcaaatacgcgtgtgataccttaaccatgctggaggccagttagcataatgtgtatttcagatgcagtttgtcatcagtgctgggtgctatggggcttaaaacaaaaacaggatgagcctagagcacagaagtggaaaattaggtgggtgggtgagtatggacttggaaatggaaaatgtgcttccctgtgggacatggcttgtgttcattagtgctgacctgcctcctctctagccctgtaagctgacgctgacaccaaagcttgctgagaaactgaatagaccctcccgccccgaccaaccaaggacaaagatgagaccacccaattcggttacgttgttgccagaacaacatgtttaatctttaacatgggttcaaactattcttggccctaggaacatggacttcagcaattaaagtcaacatgtgcttccattaaaccattgtgtccacctccaaatggttataaatatgtagcataagctatgggagttggggtggaatggatgacagcctttgctaatgacgctctagaaaccaatattctcctctcaaaataacatggaaaaattctacttaatacctcctgggttccattagtggttctgggtaaataattctggggaaagtaatttctgttttcattccagctgtgcagcagatactgtgatgatggattgcaagtgcaaagagtaagacaaaactccagcacataaaggacaatgacaaccagaaagcttcagcccgatcctgccctttccttgaacgggactggatcctaggaggtgaagccatttccaattttttgtcctctgcctccctctgctgttcttctagagaagtttttccttacaacaatgagaaaacatgtactagctgcatccttttctatgctctccctgctggtgataatgggagatacagacagtaaaacggacagctcattcataatggactcggaccctcgacgctgcatgaggcaccactatgtggattctatcagtcacccattgtacaagtgtagctcaaaggtaagaccaa

SEQ ID NO: 43661 - DNA, 2300 bp, Homo sapien
aggggtcccttcatccctttggcaaagttaaagggagtccttctttctcagcaacattaatgatggccagtaaagaaactacacgtggcacagtgacctttctaaaaagcatggtgatgagataaaaacagttgctgttgccagctctctattgacaggcttagaaatgggttctctggagcccaatgtggggaggcaaagccttcctcttgaatggggcagcagatggtattcttcgccactcctgacaaaataacggctggaagaagcagtaggactccatctgggagagatcttgtcttctgtggccaagcagtcaatgtgtttgcaatctttacactttctgtggtgctctttcagaagggcagattgtagaatgctggaaaattctgcccaggaactgggcagaattcatgcaaccctgacaacctgaaggcgaaagatggcagggtggagtggcgagcatatgttgagaaagccacagattatttcttgggagaaatgagaaggtggacggatgtcaagttctgatatttgaaaatgttggtggccaaagagtttattccccctcccaatctgacccacaaaattaggccagaaaatgtattcctgactgtttccatggctcttactcagctacaagtcatttcccctttcagattatttccagttttaaggcccaatttccatttgctttttgatcttctgcttttaagatatttagccaatatcatcatcagccaagtgccaggttttttttcaaggctttgaatttgtcatttatccatgatcttcgcaggtggattctgtttgtgactggctggtccaaggtagacagggtatttttttttccaagtggagcataagaaaagggatttctggcaataaaactgaaagttttaagacacctcttgcaaatatcagtgactggagtaaaggtcccatggaaaagtaataaggtgaatgtaaatttattaatgaataacaaatagtttgatacagagttgaacaagacagtttcagcatcaacaattacatgaagctcccaagaaaaatttctttttgagttttataatgtattattttttccacgaaatatatatattttaaattctcagtttaattcttcatcagtagtattaataaaacaaattattctgggtctgatttacctgacataaaataattattaaatgttctttgtattttcctccaaaatccctgacggttttctgtgttaattttaagctttcaaagggcaagaattatgaaatatttgcctttgtagtcccacagctcataacacagcatgattcagctgcaggtatttaacccacacacatagttacctttgtcacttttctactagttgttgtgtaatgggttagctttatctattagtttctccttcatatagctcaaggagtcaaggaatacacgttctcattgtttctaaatcagacctaaagttttattctaaatgatgcagatgaaggggcttattaaagtgccattgtgaatttaatcatgtatatgctgctaaaaatcatttaatggatgaacaacccggaaaaaaagaactctcaccacccacacacatcgtgataaaatagggcagcgttttgcacttgctttaacagcatcgcctgagaaaaaaatttctggttcccatctttcccctctcttacttaaaatttcaacttcatcacagtcagctgccgaatcgttcaacagaatgccacactgcctttgtatttccaaaactatacgtctctattgcggacggcacatctttatggcagccacatgcttgaaaaagaattaaattcagaatattcatttggcctcttattagttccataataccattaaaaaagaaagaaagaaagaaacttcctcgcccttgttctgctacgctgttcccatcgtaagatgctccgtggaagggagccgagcggtgggcagaggctgagtccccgataacgagcgcctcacatttccgtggcattcccatttgctagtgcgctgctgcggccgcacgcctgattgatatatgactgcaatggcacttttccatttgacattctctctctctctctccctctctctctctccctctctctctccctctctctctctccctgtgtcgcttaaacaacagtcctaacttttgtgtgttgcaaatataaaaggcaagccatgtgacagagggacagaagaacaaaagcatttggaagtaacaggacctctttctagctctcagaaaagtctgagaagaaaggagccctgcgttcccctaa

SEQ ID NO: 43662 - DNA, 2300 bp, Homo sapien
gcatggcacactctaggactcatctcaaatgccaactcccagaggggctttcattcagaggggctttctagatcctatctagagtagatcacctgctgttattcttagccacttgtttatatttttcacagcacttagcacaacttgcagttattttatttagagatctgtttacttgggggtggggtatctatgtgtatgtgctgtgtgtgtcttctcctattcgaatgtgagctttctgagggtggggaactcaatggtgttgttccctgcagcatcccctactgctgggctcaatacatatagttactaaatgaaataatgaaccactagagttgttcctgggggttctagtttggaggtgatggcatggccttcaaatgagagcgtagaccaagagtctagatgtctcaatccatatgacatgcttggtgccggatgctgagccctctgtgcttggggctgctcatttgtgctcagcccacaaatggtccctgcaccttgtcttcagccccatcttatgcttttcaaactctttgagcaaagaaaaaggaactacatagcccgtgtctatcacatcataccctaattcaattctttgctcagtgcttttactagctaatattttcctttcattatgtatgcgtatgtgtgtgtgtgtttgtgtgtgtgtgtgtattctgactctcctcatcagaatataacctctttgagggcagggaccttctctttcttgttttctgctttagccttatgacttatttcagtgtctggcaaacaatagggtgttaataaatactagttgaatgggtacattttttttttgtttagtgtttaatatgcctcagatgaaataattctctgagataattctctgcttttgtgtcttttgtgttctaccttctctcttttctcttctccttccttccttccttccttcttctttttctttttcttttttttattatactttaaattctggggtacatgtgcagaacgtgcaggtttgttacctaggtatacacgtgccatggtggtttgctgcacccatcaacccatcatctacattacgtatttctcctgatgctatccctcccctaggtcccgaccccccgacaggccccggtgtatgatgttcccctccctgtgtacatgtgttctgaatgtgtacattttatctagccctcactgctttggctttgacctgtaggctgattgtgtccatgctagttcttcaagctcagacctttctcctgagctataaacctggaaacacgaatacctctgggacgtttccccctcgcatgtctcttaggcatcccagaaataactttccctaacttgacctcattttcttctttcataaagtagcagctaggagactgtatcctgataaaggccatcatgggcatccccaagagtccagaccaggtgttggctttgtgtctcccctctcccctctctcgacctctcccactcaccctttggaattatacgtcttgaactacctctgggaactttcccttctttacatctgcagcttcacggttgtagttcagcttttcatcactgtttacttggaccctctggagagcagtgtaactgatctctttttcttaactctcatcctgcaaagttttgccagagtgaccttcctaaactctgatcggatcattcttctgctcttaaccctgcatcagtgtgtcacatgagtttgcctacctttagctccgtatttccatctcactagaagaatacttttgtagaagccaccatgtattgagcacttactgggggctaagcatcgtgctaaatgctttatacctactcttcactggtagcctcctgtcaagttgttacttgtttgcttccctgcctccacatcagctcctgccaagtgcaatagatgtttgctgaataatttaatgaacgatcctatttctcaaggaacgttcagtctaaagcttgcagcaatcaagtaaataattgatttccttgcaccagggaagggccatctggctcttacttagggaagtaaggagaagctaggcctgatcctcactagccaagtaacttgggcaactcacttcacctacctgtatctcactcatttgttcatatattggtctctgaggtcccttctaggctctgacaactggaaactctgaaaatgtaagtttataatattcttgtaaaatgttctcttttcaaatttgtacattgagatagtagagaagagcagaggcaagcaaaggcaggactgcagcataggcctatgggcttggcctctgtggccctga

SEQ ID NO: 43663 - DNA, 2300 bp, Homo sapien
cactcagatatgtacgtaattccatctttcagtatgtgccctagatcattgccaaaggaacaggcagagtcgctcactgcagcattgttggtaactagtggaaaattggaaacaatctaattgtcatcaacagatgagagcagatagttaaacaatttgtggtataatcatacaatgcgtttaaaattaatgaacactacatgtgtcaatgtgtagaaatctcaataacagaattttattattattattttcaagacagagtcttgctctgttgcccaggctggagtgcagtggagcaatctcagctcactgcaacctcagcctccccggttcaaacgattctcctgcctcagcctcccagtagcatattaatattctactaatatttttagtagaaacggggtttcactatgttggccaggctggtctcgacctcctgacctcttgatccgcctgcctcggcctcccaaagtgctgggattacaggcatgagccaccgcgcctggcctcaataacagaatcaggcaaaaaaagcaagtagcagaaatttagagtgtaaaatttataaacacagaagcaataatggatattgttgatgaataaaaaaggagatacagtccctgccctggaggtatttgggggcatttaaagaaatgtcaagtaaacaggtaattacaatgtagtaggatgaaagccacgatcagaatagacaccaaatacagatggaggcggcaggaagaaggtgaaagaatatattgaagaaatggcaataccttctatgccccactcccacgctggcctcaagtcctgaaagacaagaaggggttacttatgtgaaagataggaaggaagggtgtttctagacgatagtgttatttgcaaaagccccaagaggagaaaccgcagagcctgatttagaaactgccagtggtttctcagagctggagtagatggaggagggggcaaagaaagggatggagggcattggtaggtgccctctgacaaaagctcctcagaccaggctataaggagtttcaccaccttctgaaggcggcgggaaggctagattattgaagcagaagagtaacagctgcaccatgaattataaaaacgacggctctggaggcaagatcagttagttttttgtgtgtgtttgtttttctttttaaagaagaaaaccaggcaagaaacaatgggatcgcagctgaaatagacgaggtggtgactgagagagagcatcgagtccaacctttagggcttcagggagggattagacgtaggtgtcgggagaggaggttcctggcccggctatcttggggtgaacgatggagtgacaggggttgcgatttgtgacacctgactccgccccggccacccctgattgggccttacaaacgtttagttcaaatacaaaaatgggccggacacggtggctcatacctgtaatcccagcactttgggaggcagaggcgggagggctgcttgagcccaggagttcgagatcggcctgggcaacatagtgagaccttgtcttaaaacaacaaacaaacaaacaaacaacaaatataaaaatatccagaagaaaaactgaaggcggtggttaccattacaacgcgttttcgtcagggtatatgtggctttagattcatcttgaacgttttaattacaaaataaaagctgatgtctatgcaacataggaaaatatcgacttgtgtaacatctcagtgagcacacgggcgtcatattactttctgtactttgctgtgtgtttgaaccacatagcaaaaaactgttggcgacaagaattggaaaagcaagaaagtacaagaaaggctttgagttctataagggggttaaaccagaaagcggcgggggcagggaacagtcaatctttgtgtgtgcacactgcgtgtgcagagagaagactcctcaggagaccaggacctggctgagtgtgtgcggggatgaagcgggtggaggggaactggggctggggaggaggtacgcgccgcggaggtgtcccccgccccccacgatccttctcgccaaccccccgcccctcctccctccgtgacgccgcttcccgtctccaggcaacgtgggggccaaacaacacggccgggaggcgccgctgcctgccgggccctctcttctgggaccctggattttcggacactgagcgccatggccctgcctctgctgccgggcaacagcttcaaccgcaacgtgagtaggaagggcgtccgaggtcacagctcccggctggagtctggggtccaggcagggtcgtggcgtggcca

SEQ ID NO: 43664 - DNA, 2300 bp, Homo sapien
tacatgcttaggaaaattcctttcccagtcaacaaatgacaaaacataaacttgcaagctatgtgttaagttggtgcaaaagtaattgtggtttgctattaaaagtaattaataaataagaatattaataaatgggcatattgtaaaaagaaataataaagtgccaggatttgaaaagccaagtgcatctatgcaagccaatttttaaagtaatgcaatttatgccagaattccttgtttttccattaaaatgaatactgagaggacttttgtttaattgtacagcagatgcgggtgcaacgcaagttcaagacaagtttctgggttggtttatgtggacttgggttagctgcttggtgatcaatatggctttgtattcatagaatcccatggggtttctgggtgaagaccttgaccttgttcctctgtcagatttaaataataagaatgatgctggccgggtacggtggctcacccctgtgatcccagcactttgggaggcccaggtgggtggatcactgagatcaggagttcgagaccagcctgggcaacatggtgaaaccccctctctactaaaaatacaaaaattagccgggcgtggtggcacgtgcctgtaatcccagctccttgggatgttgggaggctgaggcaggagaatcacttgaattcgggaggtggaggttgcagtgagccgagattgtgccattgcactccagcctgggcaacagagcgagattccatctcaaacaaacaaacaaaagaatgacactaaaaaattatgtcctcttgccaggtcaggaattacgaggtttctaggcctttctttacctcctttggattcctggcaggaactcaagagagagagcaggtaaacagattccaacttctagcagcagggcattagaaaacttgtggtccctttgtgagcgcttgcgcccttagaaaagtatggcttgaaacagggtttctcttatcttttacaagcctttttcctcaagcatttgaattctggtaatgttcaaaatactgttaaaaaattattctgacagtatgcaagtgatgggcctgacaaaaaaattatgggacacttcttaaaatggtaaggaagactttgttcatgactactgcaataggtatcacaactattgcaatacagcctggcatggtggctcacatctgtaatcccagcactttgggaggcagaggcaggaagactgcttgagcccagaagtttaagagcagcctgggcaacacagggagacctactctccacaaaaaataaaaataaattagccgggagtggtgatgcacgcctggagtcctgggtactctggaggctgaggtgggccgatctcttgggcccaggagtttgaggctgcagtgagccatgatagcgccactgcactccagcctggtgacagagcaataccttttctcataaaacaaagactatggcaataggggtgagtgatgggtctcaactctgaatacagcagggaatttatagtaaatgatcagagtgaatggatcaatgggtggaagattaccaagagtagacatgaagggtaggggtattcttgctaaagccaatttaacaggatttttgctggtggcagagtgatcagatatcaagagtggggttgaggaattcgatcggatattgagggtgattcgatattaagggtgggggagttcttactaaactgacttaactgcattcttaccacaaatggactaggcaggtcaaagacgacccaaggaggagacccagtcaaaaacagctcagaggagcctcctgactaaagtttggtcaaggagagagtctttgtcaatacccagctggttctccctttgtaccaccatgtggcgcccttcaccccattccttcagcccttaaggctcttttaaaacaaaataatcaaattcaagttacggaaattctaggaggggcggtccctcccccttcctagttgcggaaggcaacggactacaagtcccctacgctctcgcggggctatgatccgcccggccctccccacattccggagtttcgcgcctgcgcagaaggcagaaggtcctgcgctgagagaagggggcggagacaggactacgcgcctggagtaggagaaggaggaaaaaagagaccatagacttccatcctggcctagagcggcccttaaagtgccagggagaggagggcgggtggggaccactccagaattggccgctggcggtatcatggcgacccggaacccccctccccaaggtgagcggccagggcccgaagtggtatctgggac

SEQ ID NO: 43665 - DNA, 2300 bp, Homo sapien
agtgacctgcttccaaactcaaggggagaaaacgttatctatccaggaaaagctccatagcggaattttaaaacatccaacatccctcagactaacaggtgtcacagaatatgaagaataaataaatgaatctatttaacacgggtcatgcttgtctttgaaaatagtgtctgaggccgggcgcggtggctcatgcctgttatccctgcactttgggaggccgaggtgggtgggtcacctgaggtcgagagtttgagaccagcctggccaacatggtgaaacctcgtctctactaaaaatacaaaaaattagctgggcatggtggcgcgagcctgtaatcccagctactcatgagactgaggcaggagaatggcttgaacctgggaggcggaggttgtggtgaaccaagatcgcgccactgcactccagcctgggcaacaagagcaaaactccgtctcaaaaaaaataaaaataaaaaaaagaaaagaaaatagtgtctgaaattattttgttaattgtacttagttttaaagtttaagaagtgtatacttatgaaataagtagactccaatactagtttagggcctccacattactacatagattacaaagcttctccgttagcccagctgagctgcccccaacaaacagttttcatatttatttagtattcgtgttctattttcttccagatagctttgtggggactgacaatttaagtaatgcaaaataatttgattatgacaactgagaaaagaaacgtgtgttgtgttttgaggttatcatttccttgaccatcataagcagcctggtatctatttcatctttgttcgtaatcacagcacacctttgaacacataccaaaatgatgatggaatgagagcaaagtatgtgagtcaattggctactctgtgaaacaatttgttagttttaggctatagttcttttcaattttcagccaaattctataaaaatcttagctggaaggaaatgcaaatgtcaggttacattttagaaattaatttttgggctgagtgctgtggctcgtgcatgtaatcccagcactttgggaggccgaggccggtggatcacctgaggtcaggagtttgagaccagcctggccaacatggtgaaatcctgtctctactaaaaatacaagaattcgccaggtgtggtggtgcgttcctgtaatcccagctactcggtaggctaaggcacaagaatcacttgaacccaggaagcagaggcctgggactctccagcctgggtgacagagcaaaactgtctcaatttttggcccaattaccatgtagcattaacttgtttcagaatgtttaatattactgggaagacagcatcggtagtggtcaaagtgatttgtagttcacaaagcatgtaggcatttttttttgaagaaagtaaacaaaataatttgaactgttgtttcaggtaataaaatagactcatgcggtaagtcatttgagctgtatgtacaaatggactatgacacagctaaattagtcacaactgtccaccacaggccaacttcaagataaagggctatatatcagttagcaatgctctcttacaaccagccctgatgtgtttgtaagcaggaaaataattttatggttacaatcaacaaagaagtatcaggccagtccaccaagcccagccaaatcccatatctcgctccagttttatagagattagcatatcacatgagccaaatgctgttccccaacttagaatgtgatattgctattttgcagggaaagtgtaagccctgttctgcaacactgatgaaatagaagtattcatagatcttgtttaacgtggtccaataattgaaacataaaatagatatcttgtaacagaacatttttaaaagtcaagaaagataagaattaggccttggaaaataaatgactatgaagaaagataaaaagaaaagagactggggtgtctctgaagaccctgcttagaggccctgtcctccttgcggcaagcggccattgccatggaaaccggagccgcagggctatctgtccgggattgtgacgcccagatgggagtggtgagaggagacagaaagagggtggtggccgatagctggtcctctttctccaacacctagcctgagacttggcggcgcggctgctatcctgaactagcttggtaagtgttgtgtcccgaaccagcgtagagagacctcggaccagccgccttgatgacagcatccgcgtcctccttttcatcatctcagggtgtccagcagccctccatctacagcttctccc

SEQ ID NO: 43666 - DNA, 2300 bp, Homo sapien
agcgattcttctgcctcagtctcccgagtagctgggactacaggcgagcgccacatgctcgactaattttgttttttgtatttttagtagaggtggggtttcaccacattggccaggctgctctccaactcctgacctcgtgatccgcccgcctcggcctccctttgcaggcgtgagccacagagcccggccgggattgagtagccttataatccttgaaaaggacctgagtcaggaactgctaacttcagggagatagtcaaataccagcaaaatgtctatctgtgcttgtgcaagtgtgtgtgtatgtgtgtgtgtgtgtgtgtgtgtatgagagagtgtgcgagcgagttactggggtcaaaatttccttggctttaaatgtcaccatttgtgacaaagttaacaatgtattaatttagccgtagaaaagatttggccctttgtacacactcattcaagcaaaatggagtatcataaagggaaaggtgtttcagaggaagtaattaaacatgaactataatctatacaaaactacagtttgttcgtctagttactagtctcaggggaacaatttaaaactgtgtgcaaaatcagttgggattcccatagcttcccgctgaatactggtaggaattactgggtcagcactgaattgtcttcgtcatattttgaaatccaagtttaaatatataatttttattggttacaggtggaaaacctattgaaaatataaaaaactccgtttataaacagaatcttgtccttatatgtctatcaattttttcctatccctgttataagacatacagcttagtaaataaatttgccttttgagaagagtagtcgaaaggcctatttttttttcacctatagtaaagattaaaagtcagactaaagcctttcccctgcacctgagagacagaacaacaaaatgttactgttgtctaggggttacaaacctgcaggttttgggggatagaaaggatttcttgggccaccagctgtgatgatttaattatgtcttctctcaggtctgtccacaagcagcccctacttttgtaagaaggctccactgaaatcatggcaatagaacccaacattctgcagatcccgcttcacaatttctcattgctttttcttgtaagactgtaatgaactactgataagacacagggtaaacacagcacgaaaatctggccccaaagtgccgccaacagacagacctttggcggtggggagccatggtcggcaagccaggccccgcgggcgactcttcattccctccggcctggggcgtatgggcgggggtcaggggagcccttcccccttcactttcggcgcgggtgaggtgatcggggctgccagcgcaggtctggcctagggcggcacccggaccgcggggcacgggaccggcagccgctccccgagcgccctcctcgcggaggccattatttccagcagtgccaaaagtctgagccttcttcggagggcagaggtcgagggccgtgcgccgcctcccggctacgcgacctgtaccaggccctgtggggtcccgggacccctggagcgcgcgcgggacggccggagccgcggtctgggcacatcccagagctcgcgggcaggcaaatgccgtccttggcgtcttcgcccgccgctcgcgcccgccgcgggcggtgccggacctcgcccttccccaccactcccctccccctccagagcccgccgcggttcccgaggtgacacggcccggaccctccattctctgccccagtgtatttaaccagcacaacctaacaggaagctccctctcggtgacaacccttcccccgacagacgcgcccagcagccaaccaccggctagaattggcctgcgtcccgctcccatctcggtggcggcctcggtgggcggggctcgggcagctagcaagttaagtggagccacggctgacgtgagtcaacaaaggtcacgtgaggcgtgcgggccgcgccgattggtggcgccagccgggcggggagggggggtcacggcggcggcgtggggttcgctgtgtgacacaattacaacaactttgtgctggtgccggggaagtttgtgtctccaacgaatcccctcagtgctccccagccccgcgcgctccggccgttcccgccgtccccgcctgtggctgccccctgcccaaccccgcgatgtgaccctacagccgaaagccgccgctgccgacccgggggctccgcagcccctgccgccgccgccgccgccttcaccgccgccgcgttgggatttttcgtcgccgccg

SEQ ID NO: 43667 - DNA, 2300 bp, Homo sapien
atttaaaaattagccaggcgtggtggtacacacctgtggtcccagctatttgggaggccaaagtgggagcacagcttgagcttggaaggtaaaggctataatgagacatgatcgtgccactgcactccagccaacagggcaagaccctgtttcaataaataaataaatacatagacacacacacacacacacacacacacacacacacacacacacccaggaccacctaaaacaaacactggaaatatccacatggctcaaacagtaccaaacacagttgtgctcccacaagtcaaagtggaaaaacttgtaatacaagtggcatcccaaagaatcctaacaaggatattgcctccacactgggcaacattagcccaagactaaaggttgctctattcccagaggcttgtataattaaaagcaagcctcaaaagcatcaaactatttccaagtgatttaactgcatcccagaacagagttcaaaaatacttaaaatgaaatgatagtatacagaaagcaatgagataaaattcactgtctagcatgcggccggaatattgaacgtagatgcgaacaataggagtgtgtaccaggaatcaaagacaaaagttaccaggcatgagaacaatcaagaaactataacccacaatgagaaaaatcaaccaatagaaaattaatcacaaatgatacaaatagcagcattagtcaaactgtatttcatatgctcaagaaaataaagaaaaacataaacatgttaaagacagggaaaatataaaacagcctaaacaaaaattacaatgtcttgaggtaaaaaacatactgatgaaataaagaggagattaggccgggcacagtggctcatgcctgtaatcccagcactttgggaggccgtggcagatggatcacctgaggccaggagtttgagaccagcctgtccaacatggcaaatccctgtctccactaaaaatacaaaaattagccaggcgaggtggcagatgcctgtaatcccagctacctgggaggctgaggcattagaattgcttgaacccaggaggcacaggttgcagtgagccgagattgcatcactgcactccagcatgggccacagagggagactgactgtcttaaatcaatcaatcaatcaatcagccaggcatgatagcatgatggcgcatgcctgtaatcccagctactcaggaggctgaggcaggagaatcgctcaaacccgggaagtgtaggctgcagtaagccaagatcacaccactgcactgtagcctggacgacagagcgagactctgtctcaaaaaaaaaaaaaaaaaaaaaaaagcagagaagattagacactgcaaaagaaaaaaattattagtgaacttgaagacatcgcaatacaaataatccacaacgagatacagcaaagaaaaagactgaaaaaaaaatgaacagagcacagtaagtgatagaataatttcagatatcctgataaacatataattagaatgggggtaggagtggaaagtatagaggacacagaaaaatatctaaagatacaagagcaaaaaattttccgaatttggtgaaaatttaaaacccacatgcccaaggagctcaacggatctcaagcacaataaacatcaaaaagaaaaagaaactacaacacataacacataacgtaaccaaatcacttaacaccagcaataaagagaaaacctcaaaagcagtcaaaggcaggagacgtcttacagaggaacaaaaataaggatgacagaaaacttcacctcaaaaacaatgcaaaggagaaaacagtagagtgccatctttatgaatacaggagagaaaaaagtcagtctagaattctatataacaagccaaaatatttttttaaataaagaagaaaattaaacttttgcagacaaaagacagaaaaattaattactagctaatcttcacttaagaacttaaagtcgttcaggcaaatttaaatctacataaaggcataaaaagcaatagaaatagtaaacatgtgagcaaatataaaatagtatataaaatacattttaaaacattcaaaactcaacattttaagaatattcaaattaggccgggcgcagtggctcacgcctgtaatcccagcactttgggaggctgaggcgggaggatcacctgaggtcaggaattcaagaccagcctggccaacatggcgaaactctgtctctactaaaaacacaaaacttagctgggcctggtggcaggcacctgtaatcccagctactcggaaggctgaagcataagaatcacttgaa

SEQ ID NO: 43668 - DNA, 2300 bp, Homo sapien
agccgacccccagcaaatatgccataagttgttacagtcatgttggactgttgtcaagttagtgcaatggtagtatgttttcaatacattggaaactttggtttattcaccagcaactttgtgagttcacttaaatcaccacgataagtaatttagtaaattttaaaatatgtcaaaaacagaatgccaaggagtgcattttcctctgaaaagtttaatgttaggaagtctcagatttaggaggagcatatcaaatagtatgctgaggagtagaaagttaattttgaggatacacattcatttgtcttacgcccctgtaatctgccagacactaacacattctaaaaatgctaataacatataagccaatgtttgaaaataaattctcttcaatttcaacagtgccaagctcattgaaaaccactcttgcacaaacttaatttcttgtcatattattttgttattcttttgaccatcttataaagcactgttttatattttttctttttctttcttctttttttttttaattaaaaaaataaagacaggatctccccatgttgcccaggctggtctcaaactcctgggctcaagggatccccctgcctcggcctcccaaagtgctaggattaacaggcatgagccaccatgcctggccaatatttcagtttttaaatgtgccatcttatatgcacaatgttaatgttttatgtgctttctctgtgccttttgtgtatatgtgatcactatgtgttcgatgtttgcccatccatttttattttcctaagtcttagagtctatgctatttaatatcccagtaagatattacaggaagggcagcattgtgtagtttctggaatccaatctgccttcatatcttagcttcttcatttattggctggggaactgcggacagattgctaaacctattagtctttatttcctcttctgaaaaatggggataatactgtctttctaaaataacttttatgactgttatgtgagtcttagcatacgataagcattcagtaaatggtagttgttgtaattattattattttatagaaaccccaattaccttctatttttttaattaatattcttggacctagtgtagtgcttctcaaatgtggacaatttttcctccccccactttcctttcccaggggacatatgccaatatcatgacttgagtgggagagatgctactagcttttttgagtagagattaggaatgctgctattaaatatcctgcagggcacaagacagctccccataacaaagaattaccataccaatagtgctgagattgaaaaacccttatctaatctaatggaatccagactaaacaccttttgaataactttatttcattttctttttggtgtgttaactattatactttgagttggcattcatcatacaattttttcaaattaaataactttaatttagtaattatatgattattttaatacagtttaggaatttgacatgtcaagttcaaataattaacatttattgagcattaactgccaggcacaagtctaagcattttatataacatatgtaatcctcataacagcactgtaagttaaatatccccttttttcagctgaggaaactgaggcacagaggtgtgcagctggaatttgaacccagacagtctaggtatagaatctgctcttgcccactctacagctctttctatggtctcttaaaggctctaatcctaaaaacacagtgattcgtgaagttgatattttaccagtctattgaaaaatacactacaaatctgagacattggttttaattttgacacttacgaagtaagaggtttgcactggttctctcacttgctgatcacaagaatcacctggaactcttattaaaataggttttcagagctctatgcaaagaactctgggaacctttttcatggtggcctagtgaatcttatcagacaaattaggtcttttttagaactaagaatttctttgctcccttttctttcacatacattataggttattaccttacctacctacataaaatatactttatcacaaacacagaatttcaaaatgtaaattaaagcgaactcataagtattaactcccttttctctttgattcccttatttaaatggataaatatggtgttatacaactctttagtccacacccatttgacctaataatggaccaagatttttccaacactatgcgtagataatggtatagccataaagaccagtccatagttagcattgatcctagtgatgtagtgctgtagtcct

SEQ ID NO: 43669 - DNA, 2300 bp, Homo sapien
agtgactggcacacttaagtgtttcacaaatgcgtgttactcttatcgttatctaaaagagccacctagtgataactttccagctccagtccctttagtggccggggagtgggggtggggagtaggggtgggtttgaaactccatgagcaggagcagctgcaggatacaggcagacaggccagtctctgggtcctgggcccttccttatccacctagaggggaggatcttttcccatagttgtcctgaaacttccagtaaaatggactcattacaatgttacactgtttcatctttttaaatacattgatgccagtgttcttgtacagaatcctttgtgcctacttccattgcaatttgcattgtcctgcattgcagaagttgctctctgacagtttccactggcgcaccttcccagatgtgagaggctggagctctagtgcataactcaaggattcagaggcctgggctgtccagtttcctggacaggtcccttgacctctttgcccttgtaatttttttgtgtgactttctttgccatcaaaacagtaggaaaagcttgcagtctcttagggtaaagttgtgtcaggtaagagaaaaaaacaacacagtctagggtttgggtctaatcaaaatgctaattcttccaaaacgcattatccaaaactcattatcatggggtggcccaataatgcccaataataagaatttaaatattcttatttaaattaaatatataacatgtcacatgctgcctgattttcatttgcagtatgaccttcaattgttaataataatgaaggtaaactttttctgagtagtttttcatacacaaatcaaaaagagatttaacattcttccctaacggaaatatcagcacacagctggataaatgactatggagaaaacataactgtggggcctaggaaattggcaggtgataataggccaatgcctgccaggcacagtggctcacgcctgtaatcccaacactttgggaggtagaggcgggcggatcacctgaggccagcagttcaagaccagcctggccaacatggtaaaacgttgtctctactaaaaatacaaaaattagctgggcgtggtggcgcactcctctaatcccagctactggggaggctgaggcaggagaatcgcttgaatccaggagacagagattccagtgagctgagattgagccatagcactccagcctgggcaacagagtgagtctccatctcaaaaataaataaataaataagccaatgcctctcccccaggaggattaaggactggccaggccatcatgtagaatcacacacctcctggagcccaggtagcttccaagttgatgaccatttagtagtcactcttgcctgagactttgttggtgctgaagacttaaatttttagactaatggggctgcttggggttgggtatggaggtagagtggtctccctagtgcaggcccaagagcctcttcaagaacctctgtggttccaagacccagccattggtcagagggtaagcagtttggggaatcagtgtagggaaagggagagatactggggtttgctgactgacagcccggggtccgcacctctgattggcaacatattgtctgaccttggccaaggtacttaagctctataagcctgagtttccacccttgtaaagtggaaattggggattaggggaatcaaaaatgtcagtgtatgtaaagctgctatctttacagggagtaaaagttcagagagctatggctagtctttctgtgccagttgtatgaagaggataatgtttgtgcgtgactcacacctccctcaccttttctgatatgacatatacactaccgtaagtttgaagaagcaaaaatagtcctctcacagaaagaatttcgaacacctcagtctaagtaggagaaatggatcagttgggctattgtcccctgtcttcctgtccctgggctctgtgagcctccagctcacaggccaatcctcaaagggctattcttccaacagatctgacaactggctggcttcccaccttggactgcctcccgattccttgctttcttatcctgcaaattactcagatgattccaaaatctggcgccctgtggagatctttagactggtcagcaaatatcaaaacgagatctcagacaggagaatctgtgcctctgcatcagccccaaagacctgcagcattgagcgtgtcctgcggaaaacagagaggttccagaaatggctgcaggccaagcgcctcacgccggacctggtgcaggtgagtgtgaaggccat

SEQ ID NO: 43670 - DNA, 2300 bp, Homo sapien
ctcagactgaatttatagtttgctctagtcattgacctttggttttcttttgtttctctagaaatgttagttgagttggtttgtgaggaccttggctaaggaacatactgcagtctttcagtattatcctcctggtagtcatcataatctccctggtgaactacattcacttgagggtcttaaatgtgtgttcacagtcatcaacggtatgccagatgatctcactgtaattagagcaacaaaaatgagatgaacaacaaaaggaatctttcctcaatgagcttgatgttgtgacttatgagtttcacactgagacaaggacaacttagccatgatggtcacagagagtggagcttatgcccaagttttagtcaatatctcttaaatgagaggctgatcaaaaaggatgaattatgttttaaaattctaattggaaggccattagactgaggtggctctggcactttaaattcctgtgtgaacaaaccaaagcctaatgtaaatagtaaatttaaactagaaattgtaccaatcaaaaaaatcaccaattaatctctaactagggactttccactctaaccaataaaaattgttttctttgtcctgcttctgcaaacactataaaagtttcctttcttgcccctcccagcagaatgtttgcagtctgatactgccctgattcatgaatcgctgaatattcaaataaactctttaaaatttaaatgtgcttaagtttttcttttatcacacctgacaccaaaagcatgattcaaaaagaaaaaattaacaaattggacttcaaaatcaaaactttcactctgcagaagactctgttaaaagaataaaagacaagttagccctggggagaaaatatttgcaagccacatatccaacagaggactcggatctagaatatataaacaagcgtcaaaactcaccaataaaaagcaaacatgaccagacattttactgaggaagctatacaaatgctaataagcacgtgcttcatcatcagaaaattgcctttacctgctcttcccaccaatctttagcaaaacttgtcaattgtccagaggcaatccccactccctcttacctcccttttcctcacccccagccccatcttcctatgcactttctcatattttcaaaccgtgccccgctccccacctccaccctctcacagaatgtgaggcagcctgacttccctgatttggttctcagaggttctctctactcccaaattagcacttccatctactccatgctgcggaccttatcttggtatcctgaggaaggcaatcctggggcagttaaatcctaccaaatccggccaagccaccccgagaagtgaagcaagttggtaaaggaagagaagctttcaggtctgtgggagagggatagacacagctgtgtgctgtcagagggctctttctggtgctcccctcatcatgccacagaggccaccgggttctttctggtctcttgttctcagaccagcaagagaagatggactaacctgaggttttctcttccctaagcagcaaaaagctttcaaatcagtgctaaatgtgccagttaatggcaagcaagctaacctctagttatttcacaggcaaatatggtaaaagtgggggaaggagggctgattaaggggcaggacaaatgacctagcacagaggggtcaaaaattggggtgcacgtgtaatccatagggacagataaacctggaattaaaacagtggagggtggaggctttcaggatcctttgaaactcccaggtggaacgcaggttggacacacatcctgcatggacctttcctgccctgccgggatatcctgtgtttgtcaaaaggaccacacagggaagccctgacaattgtccttcccgaaatctgccagcgagcccctccccagcctgaagcagccacccccggcaaaggaagagtaactctggaaacagcgttatcagcatcctccactgacttcctcacctcctccccagcctcattagccccaagctcctcagcatcctcaaagagaaacctgggaggctgggatggggtcagcacccagaagccagccccctctgacagcttcctctttggccaagccctgcctctgtacagcctcgagtggacagccagaggctgcagctggagcccagagcccaagatggagccccagctggggcctgaggctgccgccctccgccctggctggctggccctgctgctgtgggtctcagccctgagctgttctttctccttgccagcttcttccctttcttctctggtgcc

SEQ ID NO: 43671 - DNA, 2300 bp, Homo sapien
cttgggtgtttctcggagagggggatttggcagggacataggacaatagtggagagaaggtcagtagataaacatgtgaacaaaggtctctggttttcctaggcagaggaccctgcggccttccgcagtgtttgtgaccctgggtacttgagattagggagtggtgatgactcttaaggagcatgctgccttcaagcatctgtttaacaaagcacatcttgcaccgcccttaagccatttaaccctgagtggacacagcacatgtttcagagagcacggggttgggggtaaggttatagattaacagcatcccaaggcagaagaatttttcttagtacagaacaaaatggtgtctcctatgtcaacttctttctacacagacacagtaacaatctgatctctctttcttttccccacatttcccccttttcttttcgacaaaaccgccatcgtcatcatggtccgttctcaatgagctgttgggtacacctcccagatggggtggcggccgggcagaggggcccctcacttcccagacgtggcagcctggcagaggggccccccacctcccagaaggggtggccgggggggcgccccccacctcccagaccaggtggctgctgggcaggggcactccccacctcccagaccgggcggccgggcggagacgctcctcacttcccagactgggcggctgctgggtggaggggctcctcacttctcagacgaggtggctgggcagaggcgctcctcacttcccagactgggtggcggccgggcagaggtgctcctcacctcccagacggggtggcggccgggtagaggtgctcctcacctcccagagggggcggccgggcagaggctctcctcacatcccagacggggcggccgggcagaggcactccccacatcccagatgatgggtggccaggcagagacgctcctcacttcctagacaggatgacggccgggaagatgcgctcctcacttcccagactgggccgccgggcagaggggctcctcacatcccagatgggcggccaggcagagacgctcctcacttcctagatggggtggcggctgggaagaggcgctcctcacttcccagactgggtggccaggcagaggggcacctcacatcccagacgatgggccgccaggcagagacactcctcacttcctagacggggtggcggccggtcagaggcttcaatctcagcactttgggaggccaaggcaggcggctgggaggtggaggttgtagcagccgagatcacgccactgcactccagcctgggcaacattgagcactgagtgagcgagactccgtctgcaatcccggcacctggggaggccgaggggggcagatcactcgaggtcaggagctggagaccagcccggccaacacggggaaaccccgtctccaccaaaaaatacaaaaaccagtcaggcgtggtggcgcgtgcctgcaatcccaggcactcggcaggctgaggcaggagaatcaggcagggaggttgcagtgagccgagatcgcggcagcacagtctagcctcgggaacagagggagaccgtggaaagcgggagatggagaggagggagaggggaagaccgtggaaagcgggagatggagacaagggagagggagagggagagggagcctcttatttgttcttataacccagttgtggtctctttaagtttcttcatttgaactttctgagttgaattctgttttctattgggatccaaactgataggatgattcctctatcttacagtactttcattgatagtactagatgtagaacagtactatagaaatttagagaatgaagaacaaaaatcttgatcttacaacctcattgcagaaatgggaaagacataaatacacacacagggatgttaagtccccaaacccaataaacaagagaagaatcaaccccatatgtacagagacaggtgcaagatgcacacaagtaggaaagtggggaagataaacatgtttctctgagcctctgttccgaccacagtgtgattcacaagtgcctgcttgtgctgtgagctctcccatagggcaagatcatcataacacaatgtcaccccagggagtgcccacattttagcttgcttgttgctggggaaaagacttgctgctttgtgtttcatttgatgaaggtaatgcttccttatcagaaattcattccattctaaggtactttatgttttcctgtttctccaaagtctgtcatttcctacatggtgtatatctgtttccctttgtcatggtttagaggaaa

SEQ ID NO: 43672 - DNA, 2300 bp, Homo sapien
caaaaccaaagcaaagagaggcaggagtcattctttgcataattactggcatttgtcatcctttccttgaaaaggggatcatcagtttttctaaggattgttttctttgcttcagagtcttttcttcagaactgtttatcatccacattgtcctcatttacccagcaacacatactgtactaacgtactttccattagtgaatttaatgaatttaattttggttcaaaatgttaattaaagtgtgcctttcattcttataaggatgaaacttaaaaaactcttggttctcaagtggtaggtgaaattactaaaagcagagttgaaaaacagggttaatcaatgtgaaatgtagtatcatgagcctgggatagatattgataatgaattataattaattttccatctcttttaagaaaacaaaggctcaaaaatcacggcttccataactttgcctatacttaggagaaattttggaagaaaaacgtgtaagaagaaacagaaaagaagtttgcctcaaagagagaaacaaagaaaaagctaccagaccagatattccctcatcagaaaatgaatgagaattttattatctcttggctttaaaaaaaattctgtcctttgccagatctgaaaatgctgccaacctggaagaaaaagaacccatttttctaaacaacctcatttagtaatttccatgaaattgacattttagaactatgacaaaaagccaaattaaaactcaggggttcctaatccctaaattctgagtccgttttaagaaatacctaaaatacactttaaaacgaaccaattaatataattaccgtgggtttaaataacacatacacactggatttgtttctgtaaaacacagctgttctgttatttacattttgctattttttaaattagaaatatggctttatatattgtacatatatgtaaagtaactttttaaaaagagtgaatctgttgtcttctgccatcattacattaaaaaaaaaaaaacccaaccaccctacagccaattaacttggaaatcttatattcaagcttctgaatattactgcggttgtagcaagggaagcagcacatccaggtagttaatgtagaagaaacagggcacaggcagcaacttgcatcccctggcaattcacatggtaatttcttcgcttccactctcaggctcactccaccttgcttcaccaacccccctccccctaagacacgaggcaccctctgggccacggaaggtgccatgcggggagacgccggaagagcgggggcagagtgcacggttcccacacccttagccgcgggcggccgccgcgggccccaggagtggggaaccggttgggagagcggggttgggggcggaccccagggccgcacccctggtcccccccatcccctttctaccgccacagacccaagaacccgaaatctgcggcacgaggcgcggcgcccgcagcccccggctgggccccggcggggatgggcgggcagggggcggagcgcagcgcagcgcggggcggcgggaaaggggcggagaggatagcttgggctctggcgggccgcgggactggcagaacctgcgggcgaggtgggtggctcgccagccgggacgaagggaaatgaggaccaccgctccggggcgcgagtaggcgcgtggagtccgggggctcagccgccgcgcctcttcctcctgcagctggagactgcaacagcggcgggtgcaccggcagcagcgacgaccctgcgcgcaggtgggcacccccgagcgcggcgctctgccggctcccccggccaccgcgggccggacgcccgctcttccaggccactgcgcttgggggcgagggctgggtaggtccaggggcagaaggaaggtgcacggccccgtggtgggcgcgcttctgcgcgcgcgctgtggtaggtgggaaagaggtgcagaaaagctgcctcccttagggttcactccctcggttccactgtccccaccccaccccttctgaggagctgggcacaccggtggggctttggaaaactgcgatctcctacccgccccgcagtatcggtggcgtgtgcaggttgcccttctcttcacagtccacacccagcaaccatcaggacgccccctgctcccggcccgaagactgtagggaccatgggaggagagagtggtggctggaccggtcggggcgtgtgcgcggaaggctggagttgcttgagtattgtctgccggggccggcgcttgcgtcagggtgctccctcgcgctttcgggggtagggaatgggtttgctg

SEQ ID NO: 43673 - DNA, 2300 bp, Homo sapien
cctagtacaggagagggagacaccttacaactggaaatttatgtcctgcttttagtcagaagcaggaagggcagagagctaattgccttcagctcaaaaccatcctttttgagtgacatgtttgggggtggcatattctggcccccttcacttgcttctagtttctggtagtttgctagcaatctttcacattccttgacatgtagaagtgtcactctgatccctgccttcatgtccacagggcattccccttatatgtgcatgtctatctccaaatttcccctttttataaggacactagtcatattggattagggacccaccctattaccctactctggtatgacctcatcttaaccaattatgtctacagtgactatttccaaataaagtcacattctgaggtactggcggttagggcttcaacatatgaattttgggggacaaacacaattgaactcattgcaggaaatctggtggggcagaacaagaacaccaccacacacaattgatcagacaaatctagaatgtggggctttctacaaagtctcttcaaaaacacaatgtcatttttaaaaagtagagggactattccaaaaagactaaaaaaaccaaatgtatgaattgtgattggattttggtttaattaagaaactgctacaagacatagtacaggttgaggagatttgaatgtggactgggtattctgagagttaggtggtattaggcaattactgtcgattttcttagaggtaatcattgtacaatagttatataagagaattaacttatattagaatgatgcaagctgaagtatttgggatgaagtgtcatgatgtcacttttaatttaatttacttttaaatagatcagcaaaaaaaaaagtatatattcatgaagcaaatctgtatatatagctgtgtatatagataaagcaaatataccagaaggttaacatttgtcaaatttcaatggtgggtataggggttttcattgtgctattctttcaacttttctgcatgtttgaagtttttcgtaataaaaagttgacagaaaatgaagaaaaatagttttttaagagaagatttttttcccccatctttctattgaaaatagagcattaaaaaaatccaactggcttaaaacgtacatgaaaattcagttagtgaaaaagtaaaatttgctgttagggttgtaaaacagttgggctgttttccaagcaattccttccctttattactgtgagttggaggttagagcacaaggccctcaatcaagaattatttgaaggcctccaaaagccctgctgacctccaagtatctcccctgctggctttccatgtggcctgaaatttctgtcacctgggtcaattctcagggatcaagtattttctcactattggggaggcagtgcccccttttaaaatgcaaatctgggagggatcctgggcccattaagtgggaacaattgtctgaggagccaccacctgcccaaaggcccgcaattctgacagctccttccccaaccccttaccaccactgagattggacaatgtgtgctttaggaaacaaaattgaacaatgcatgctctaagaaacttcttaggtgaagacaccatttcaagaaagcttattttccgtgaataaaatggggtgcatgaggtcattgctgtttttactttgtaaactgggtggcctctgaaagcttctttacaacacttcaaaggaagcctcctcaactcttccaggcccccaccccctttcctttgttaccgcattcttactgaccccaaggtttttcactgaatgaagagtttccaaggggtctaaaaaatacctgggacaattagagaaatgaaaaccagggggtcaagatgaatcgacccttggcagaggatttacataaataggtcctaacctctggctgtgaataaaagataaaatgccccactggggtcagaactgcagttcaagggcatttgcagggccaagcctggcttctctgctatgtcaggaattccaggaatgccactgatcattgtgtgttggcagggcgcaggaggttgcagccaggctaacagaaacccagccctgcccactgggtgaaactgcaagtcgagagcgtgggaaaccagcaagttgagagaggatccagaagtaaccccttctaaaacgggaaagatgccttccgaaaggtgaccaaattcttgttttagatggtggtgttaatttgggaggttggaagggaggcaggtgggagaagggacatgtccctttcgaagagcccctttgtttcttct

SEQ ID NO: 43674 - DNA, 2300 bp, Homo sapien
aagaaggttatcagttcacctttcctctagaagtaaatagggtggtatctctgaacctggccatcgttacagatgcaaataaaatacagagtgggcaataatgcaatgcacatatgcctaagacaaaacgggctggcacaaataaggaaaggggcttcatttctgaaaataccagctccacttaacactggatattctcctgcctatggaaatccacagggtcagttgcagagagtgctgcatgtttcatagtgttgggagaggcagtgaaaactaacatttaccaggtgcctgccacgggctattcctgggcttcaggctctaaagatgttcctttgaacaattacagcagccatctaggttaggtggtcctcagctatgggagaaagcgggggaatgagacccaagaagctagcaagtggtggattccagtcttctcttccaatggattagtagacaccaatggccgaggcagggtgtttcttaatttttgaatactaacatcatgaatagcaaatgctggcatggcaataagagcgtgccctgcatctggtcacatctaaaatatcagtcccttctctttctgaagaaatacctgttcctgcagaatctccatatcctgaaatggagagatgctggtcagggccacagaccaggtgcttctgcagtttgcagtttctctattgtcctcaggacactgtcatactattagccctttcctgcctcgtgatagtgatgtctgaaaagaatgttatcagttcacctctcctctaaaaataaataggttggtttctctaaacctggccatcagcaacacatacacatgaaattctgaatgagcaataattcactgctcacatgcccaaaggaaaacaggttcttttcctaggacttgtacaggaggcttagacagggtaacttcccaggggatggctgtactgagtttgcaaatttgggctgagactcattcaaactacctggggaatgcaagttaacctgcagaggagaaagcgaaaaagaaaaaggagaaagacccatgttcaaatggaaattaaatacatatctgatggattccatgatcagctttaacactttcatctataaacagtgtctggcaccagttggctccagcacagaagggattgctttgtacctggtggagaccctgccatgcctgacccaaggaagcctgcttggtgactaggcaggcacagaaggatggagaacacacttcgtctgtttcccccaggcccagacaggaaacagaaaactttcctcaaggccattacaggcctttttaggggaccatgttgccactggctggcaatctcacagaaaacacctctttgctatttacagtgcgttttcaaaaaagtaaaatccagattctcccagggtgtctaggatctcaggaattggagcccctctattgcgtagagaaaaatcagaatgagggtttctttcctcatttcaagagatcgctggctctgcagcccagctcaaaagcccatcctccaggccacttccccggctgagccagaccccttgctcccatgactctctgagagccaggcccagggtcgggttccctgagaccagcctggaccctagatggccacgcctccgagcgctattggcgccggaggcgcgactctttttcctattcccaggagggtaaaaaagcgggaacaatggctttcaggacggagggacacaaacacccaatgccgcagcgactgggagggtcgcgatgcaggaggacgaaatgggagaagggggacaagggggacttcggcctccctgcgggcgggagctaggccgctggaaagtccgctcgcctctcgccggcaagggatgacgccctgggccttttgtaccactcgccacggaaaatggtcacacgcttttgtcctcaagccgaacactatcagaaacacggggtccctggaagccgccatcttggccattggcggtggcgcacccacccccgtgctactgcgcgtgcgcggcgctgcgacacactccgaccccatcccgcgttcccagggggcggtgggaagcggaagtgctccgctgacccgggagggcggtccctagttcacactggctgttgtcagcggcctctgaggtttcaggctcttggcggtgaagtaagagggacgcggaggtggtgatggttttgatgggggcgggggttgacggggtcgtggggtcatggggccatgggtgaacgcctttgtgggtgacagggtggctctacagcccagctcaaaagcccatcctccaggccacttccccgc

SEQ ID NO: 43675 - DNA, 2300 bp, Homo sapien
tactgagtttgcaaatttgggctgagactcattcaaactacctggggaatgcaagttaacctgcagaggagaaagcgaaaaagaaaaaggagaaagacccatgttcaaatggaaattaaatacatatctgatggattccatgatcagctttaacactttcatctataaacagtgtctggcaccagttggctccagcacagaagggattgctttgtacctggtggagaccctgccatgcctgacccaaggaagcctgcttggtgactaggcaggcacagaaggatggagaacacacttcgtctgtttcccccaggcccagacaggaaacagaaaactttcctcaaggccattacaggcctttttaggggaccatgttgccactggctggcaatctcacagaaaacacctctttgctatttacagtgcgttttcaaaaaagtaaaatccagattctcccagggtgtctaggatctcaggaattggagcccctctattgcgtagagaaaaatcagaatgagggtttctttcctcatttcaagagatcgctggctctgcagcccagctcaaaagcccatcctccaggccacttccccggctgagccagaccccttgctcccatgactctctgagagccaggcccagggtcgggttccctgagaccagcctggaccctagatggccacgcctccgagcgctattggcgccggaggcgcgactctttttcctattcccaggagggtaaaaaagcgggaacaatggctttcaggacggagggacacaaacacccaatgccgcagcgactgggagggtcgcgatgcaggaggacgaaatgggagaagggggacaagggggacttcggcctccctgcgggcgggagctaggccgctggaaagtccgctcgcctctcgccggcaagggatgacgccctgggccttttgtaccactcgccacggaaaatggtcacacgcttttgtcctcaagccgaacactatcagaaacacggggtccctggaagccgccatcttggccattggcggtggcgcacccacccccgtgctactgcgcgtgcgcggcgctgcgacacactccgaccccatcccgcgttcccagggggcggtgggaagcggaagtgctccgctgacccgggagggcggtccctagttcacactggctgttgtcagcggcctctgaggtttcaggctcttggcggtgaagtaagagggacgcggaggtggtgatggttttgatgggggcgggggttgacggggtcgtggggtcatggggccatgggtgaacgcctttgtgggtgacagggtggctctacagcccagctcaaaagcccatcctccaggccacttccccgcctgagacaggccccttgctctcaggaccctctgagccaggaccagggtccggttccctgagacccgcaggcctgtgggcgtgagtgctggggacgaggttcagggccagcgagtgactgattgagtcactccgcgcctgtttcctgagcgcctaaaaatgccaggcaaccttgcaaatgtttcacattaatcttcacaggagccctgtgaggtgttacgatgattattttcgtgttatagagagaaaatggctcagtgtggcttgacaacctgtccaaagtcacgtaggtagcaaacccgaggaatcttttttttcttttcctgtgcttcgtttatcatgtttattgtttcctgtgtgtctcccccgctggactagaaactctgcgggagctgggactttgagattttgttccctgatgtatttccagcacggagaacgggctcatggaaggaaggcacccatttcttcagtgaataaaagtggcacagcagtcagtcagttgattccaaagcccggactcaggaaggcagggtttcgctcactgaggataattgagctgtgaatcaatgttaactcttaaagctagaatgaggcattgtccctcttctgctgggtaaaacctttgggttttactcaacttcactgcatggaagggagcataggtgttgctaattgaatctcctgtggtcattgtgtttccagggtcagagtgcagacctgagaccactgctcaccgacttcagactccagtttatctgtgccccagcttcctcacttagtctcagaagacttaggctgaggcctcagaaggaggtgagttccctgggtcacaggcagagatctggtgctatagtgatggcctcaactggggcgtgtttgtctctgaatcccttggtcctgcggccttggacacaagagaggtacgctgagctgag

SEQ ID NO: 43676 - DNA, 2300 bp, Homo sapien
gctgaaagaatatgaaatgtatgtagaatagtataccatgtatcatacttcatattcttaaacattaaaaaggttgataatagtacagtcaagtatgtagaaaaaacaccaaagaagttataaactgtatacagcattttgtggtggaacagttggtttacatatatcaacatttacaatgcaaatacccttaacacagtaatgccctttctagaattttaccctagacctttaatatatcaataagacaagacaacccaacagaatgaagactcatagtaacagaaatattagtggcctagaaacatacaaaaagattataatcctcactaaaactcacatacctgctgtcatttatctgtaagagtggtaaactttgaaaagatagataagagccactgtggatgagagtactggctggttgagaggtaatttggctgtacttattaaatatctttttcttattttaatcagcagttgcattgataggactccatcctagtgaaatatttatatgtccacaaagatttccaaagcagttctattcatactagcaaaaagtagaaggagaaagccctaagtgtcccatgttcctgagaatccaataatggtagaatgatagctatactaccaggtggcattgcttatgataaaaatgacccctgattggtaaacaaacttcacatggatgaggaggactatagaatagttaaataaattgccacatccatactctggaactgttatgataaaaattgactcatatgtaagaatgtctgggatacttttgtctaagtgaaaaaaaccaaagttcagaaaagcatagtaggagcagccgggcatggtgactcacacctgtaatcccagcactttgggaggccgaggtgggtggatcacctgagatcaggagttcaagaccagcctggccaacatggtgaaaccctgtctctactaaaaatacaaaaaattagccaggcatggtggcgcatgcctgtaatcccacctactcatgaggctgaagcaggagaattgcttgaacctggggggcagaggttgcagtgagccaagatagtgccacggcactccagcctgggcaacagagcgagactgtctcaaaaaaaaaaaaagaaaaaaaaaaaagaaatttctgatgtctaggtagtcaagtttatcactctgtagctatgtattttctgaatttggggattgcttagaaaggccatcagccactacaaaactatcaaaacttttaacttatctatcatttttatggttattttgtacacatttaaatctctaatccatctgtaatttacttgggggctcagagtaagatgagtaatttacttttatggagtttcttccctccataaatgcctagccagattttcctaatgacatcttttctgcagagatttaagatacttttattatgaagtaacctctgacactgtacttctaggatctgttagtggttattaactctcattatcattgtcatgtttagctatgtgttactggaagcctgataatggaatgacggctgttttactaggtctgagagatagggaaggaaacccaagtttttcctactgtctcctctcacttgacacaacacttctgacaccatatgtaatcccaggccccaggctgttccctcacataccaagcagttttccctggacaccagctcggtgtgctgtgaagtcaattccattctgacaccatctacctggagttagcgtgagctcccacaggttgagggcttagtcccacaagactgccctgacttgagatgccagtcacaagtagggtgtcacctatacatctgactgatgggccacaaattgggggttcccatgaacccctcctgaagattgattaatttgctagagtgagtttcagtttccctgagtttcccctatttgttataaaggatattacaggcaaagcgcggtggctcattaatcccagcactttgggaggccaaggcgggcggatcacctgaggttggaagtttgagaccagcctgaccaacatggagaaaccccgtctctactaaaaatacagttagccgggtgtggtggtgcatgcctataatcctagctactcaggaggctgaggcagaagaatcacttgaacctgggaggtagaggttgcaatgagccaagaccacatcattgcactccagcctgggcaacaagagcgaaactcagtctcaaaaaaaaaaaaaagctgggggcaggggggtggatattacagaggatacagatgaaccgccagatggaagagatgcatag

SEQ ID NO: 43677 - DNA, 2300 bp, Homo sapien
agaagatattattctttaatcttctgccttcttttttgaagaagtctgatgttgatataattatttctttataggggatatttttacttattcatggtagcttacaatattttctttctgacttgaaagccttgtggctacactgaactttgtctaagtgcagacttgtttattttccacactcaaggactttggacattcagtggtaggatacatgcctttcttccattttagaaaagaatcagtcattgtatcttcaaatactgcctagatcaggggtccccaagacgactcccatactcagatattctctagagaaattcatggaactcagcatatagttgtaatcatgggtaagatttattacagtgatgtagtaatgataaacaactggattataagggaaaaaggcacaggcagaatctggaggcatccatgtgcaggcttccttatgctgtctgcctgtcatgaatacagagcacactctaacttccttatgctgtctgcctatcatgaacacagagcacactctaactccagtatcaaagatgcaccaacatgtgtgatgtttatgccaagggaagcctattagagactaagtgatttcccaagatctgtcatctaatttattaaatctgtcttatctgtggctagtctactgttcaacctatttagagttttttttttaaataatgcctaccttaaaaatactcatctgtcttttttcaaaatttcctgctatttccttcatagtctagttcttaccttatctttgtacatttgaaatatacttattttaaagtacagattgttctattatctacagttctaggaatgtgagtatatttaaatgtatcggtcaattctttctaatgatggatcagctccttctaaggttttaaattttcttttctttttttttttttgagacggagtcttgctctgtcacctaggctggggtgcagtggtgggatctcagctcactgcaacctccgcctcccagcttcaagcaattctcctgcctcagcctcctgaatagctgggattacaggcacctgccaccacgcccagctaatttttgtatttttagtagagacagggtttcaccatgttggccagtctggtcttgaactcctgacctcgtgatccacccacctcggcctcccaaagtgctgggattacaggcgtgagccaccgcgcccagccaggttttaaattttctactgtgaactcctcaatgagagttggttttccctagaagttctgtgatgtcttcagctataaagacatgagtgtgtgtatgtgtatatatatatatatataactgcaagggctcccatgcttgttaaacaggaactagaaggattccccactagccagagaaattggcaagaaggatgttatatataagacatcaaaagcctaattctgtaactcaatccaaatgattacaagcatagtacagagcctataaactgaaaaatttttaaagttggtcttgttattggtaggttcatagcagtggcaacctttcatatatgtatacacacacacacacacacacacacatatatatacaattatatgtatatatatatataagctttaagccaaaattacactctgactttgctgaattcctgaacatttgtgccttatggtccccttcaaatcctcaagctgttctgtttactctctcactttaaattcccacttcattttgatacctaatacatttcttttcttgattttgagcctgggacatgggaagggtcctccatccacatcagctcaagtcatgttgataggagttcactgcttgggcatttagggattagttatttcataaattatagtgggaagacaagtttgatgattcattgcattttcttctagaagtctgggaagttgacgagcagatagatcactacaaggaaagccaagacaaatttctgtggcaagctgcattcataggcaaggaaacactgaaggatgaaagtggtcaagaatgtaaaatatgtagaaaaatcatttatctcaacacagactttgtttctgtaaaacaaagactccctaaatattattcatgggaaaggtgttcaaaacatcatttaaactttcttggtcaaaatagaagctatgtaagaaagaaagatgatggatgtaaggcatattggaaagtatgcctccattataatcttcataaagctcaacctgcagagagattttttgaccctaatcaacgagggaaagccctccaccaaaagcaagcccttagaaaaagtcagagaagtcaaact

SEQ ID NO: 43678 - DNA, 2300 bp, Homo sapien
aaaaagagggcaaaaaaagaagtaaaggacatccagattggaagggaagaaataaaactgtctttatttacaactacatgattgtttacataggaaatgtcaagctatctacaaaaaagttacaagctatctacaaaaaagttacaagttttaatatgtacacttagaaaggtcccagggtacaagatcaatatacaaaaatcaatggcatttctataagatagtactggccaatgggaaattgaaattaaacaaaataccacttatagtatcttataagaacaaaaaaagctggtattaattaaacaaaatgtgaaagacttatgcattcaaaactacaaaacattgagataaaatttaagaagatctaaatagagatacatgctattcattaattggaagactcaatattgtcagtatatcaatgatccacagattcagtgtaatcccatacaaaaatccctgcgggcttttgtgtacaaattcacaagctgattctaagatttatataaaaataccaaggacctagaataggcaaaacattaggaaaggaagaacaaagttggaaaactcatacttcctgatttgaacacttaatgttaggctacagtaattaaacagtgtattaatgatgtatagacagacacatctctgttcaactgtttggttttttttgagacagggtcttgctataccccaggctggagtggcagtggcgtgatcacggctcactgcagcctcgtcctctcgtgctcaagcaatcctcccacctcaacctcccaagtagtggggagtacaagtgcatgccatcatggttggcaaattttttaaatattttatacacgggggctcactatgttgcctaggctagtctcaagctcctaggctcaactgatcctcccacctcagcctcccaaagtgcttggattacaagtctgagtcactgtgcccggccattcaaaggttatcagcaacgatggcaaagtaagtcaacaacaacaacaacaacgaagagtattttcaaaactgctgctggaaaaattggatatacatatgcaaaaagccccctgaccctcacctcatgtcagatttacaaacttaactcattctttgtcataggtctaaatttaagagctaaaattataaatcttctgaaagaaggcataggagaaaaatctccattgctctgagtcagagatttgttagataggatacaaaaggcatgaaccataaaagaacttgataaactcagccttatcaaaattaaaaacgtctactctacaaagcacagttaagaaaaaaagaagccataatctgggagtacatacttaaaggacttgcatcaagaatatataaagaacctgctgggcacagtggctcacacctgtaatcccagccctccaggaggccaaggcaggtgaatcacctgaggtcagttcgagaccagcctggccaacatggcaaaacctcgtctctactaaaaatacaaaaattagctgggcatggtggcgggtgcctgtaatcccagctactcgggaggctgaggcaggagacttgcttgaacccaggaggcgaggttgcagtgagctgagattgcaccactgcactccagcctgggcaacagagcaagactccatctcaaaaaaaaaaaaaagatatataaagaaccttacaatttaatagcaaagaaaaatggcaaaagattacaacaaatacttccacaaagaagatataaagatagcaaataagggctcaacaatattcatcattagaaaaatgcaaaattaaatcacaatgagatccccctacacacctactagaaaaaaggactaacactaacaataccaagtgctggcaaggatgtgaaacacgtggaactcacatacattgctagcggaaaaaaaaagtggtatagccatgttggaaaacagtttagcagtgttttataaagtattccaacctgggaataatgttctctcaagtttatttttgaataaataaagagataatataaaaaacaagagttgagtgggaggaaggtactgaaaacaggaggaatctgaaaacaggtggcatcaagtcagatttgtaagagtctgggaaggaatacaaagagaaaatagaaaacagtgtgaggtttacagtgtttaccacaaaataagagcaggcaagaacatggtgggtaccaggctgggtagagtaaaggtcaccagcaaagctttgttgcctataccaactccaaaaaataatgtatgataatttccttgagtctaaaaaaaaaaaaaagactccaactttca

SEQ ID NO: 43679 - DNA, 2300 bp, Homo sapien
caaacagagccctagaggtgaaaagacactctccaagtgtgtatgagtaagatctcttcatgtggtttggaggaaggagcccaaccagcgctcaaagggccgcagggaaggagaggtgtggggctgggtgggtaacagccaagcactgtcagttctgtgaggggctgaaaaccactgtgcctgcttccctgcatccacctctctaactggccacctaccctgctcccaccccaccacttcctcctttcccatgatttgcattttgattgccatgctcctccttctttggcagattttcaaaagaaagttccagcaaggagattctgtgcagagtaaccatttcatactgcagcaatcactgtgataccatcaggacaacagggttcagctccgtgtagcttagcaggtcatgtcccctggcccactttcattaagcattgaaataaggcagcagagctggatgacagcatacctagagactactctgaaattctataaactaaaaatatattttctgcactttggtcaggatgaacggacactcagcatttcccctggaagcaggtgcctggttgatggtgtggggctgactcaaattcagaaatagccaatggcaagagaaggaagcatgggggtgcacaaataggtgtgctaggagaggccaatcctctgtggctggctgtgatccttcccagcctcatcccgcctttgcaggtactacagcagggcacctgcccccatgggggacatccatgcctccatccacctgtgactttcacctgtccctcctccagcaggaatcaaactgcactgtcacatggtcctccatggcacctggaagtagagccagctttgctctgtctcagctgaagtgagggacaaaggccactacgggtccagctcttctaggacctgctgtcccgtgagcctcctttgctctgaggatctgggtctgggctcttgctgaggcttctcctccaactcgcctcagctcagcgtacctctcttgtgtccaaggcggcaggaccaagggattcagagacaaacacaccccagttggggccatcactatagcactagatctctgcctgtgacccagggaactcacctcttcctggggcctcagcctaagtcttctgcgactaagtggggaagccgaggcacagataaactggagtctgaaatcggtgagcagtggtctcaggtctgcactctgaccctggaaacacaatgaccacaggagattcaattagcaacacctatgctcccttccatgcagtgaagttgagtgaaacccaaaggtttttacccaacagaagagggacaacccctcattctagttttaagagttaacattcatgcacagctcaattatcctcagtgagcgaaaccctgccttcctgagtccgggctttggaatcaactgactggctgctgtgccacttttattcactgaagaaatgattgccttccatgagccggttctccgtgttgcaaatccatcagtgaacaaaatctcaaattcccagctccagatttctagtctggaggaagagacacactggaaacaataaacatgataaacaaagtacaggaaaagaaaaagaaaaaggattcctcgggtttgctacctacgggactttggacaggttgccaagccacactgtaccgttttctctctataacatgaaaataatcatcgtaacacctcacagggctcctgctaatgtgaaacatttgcaagagtgtctggcagttaccaccgggtgaggatacaagcgctgagtgactcaatcaattagtcactcgctggccccgaacctcgcccccaacactcacgcccaccgcctgtgtcactcaatccccacaaggacgctcacccgtggccccatgaccccacggccccgtaaactcccgtcattcctcccgtccccccttcccccgatcaaaaccatcaccacctcaccctcccgcttacttcactgccgacagcctgaaacctcaggggcggatgacaacagccagtgtgaacgaagcgccaccctccgggtcagccgagcatttccgcttcccacagccccctgggaacgtgaagtcaaagcaatgcgcacgcgcagtggctttgaaggcggggcaacaaagcctgtggccgatgtggcgctcctcggcccgcgcttcagtggttatgacagtgttcgctctaaggggagaaggaatgtgtgaccatttccaacggtaagtcgtacaaaaggtccggggaggcgtacctgggcggcgagaggcgagagaactccgcgcgg

SEQ ID NO: 43680 - DNA, 2300 bp, Homo sapien
ctctcccctcacaccagcacagagccacctacttgcttaaaagatgagaggaggccaggcacagtagctcaggcctgtaatcccagcacaaggccgaagtgggaggatcacttgagcccacgagttcaagaccagcctgggcaacatacagaccccggtctctacaaaaaacaaacaaacaaacaaaattagctgggtgtggtccacatgcctgtggtctcagctgcttgggaggctgaggtaggaagatcgcttgggcttgagaggttgaggctgcagtgagtggtgatagtgccaccgcactccagcctgggtgacagagccagaccctgtctcaaagctttttaaaaaagccagagaggagggaaaagtgaaaacagaagggaaagttgtagattaatattgcaaaatcatatccttgctataaacgagatgtgtacagaggtcaatgcatatatgagtttggtagtggaaaagtgagagatcgtctaacatggtttctttatgaagtaggcagtaaggtcatgtgctgagaagaggtgggtgggggaagaggggtatcagaagtctgaggagactagagaaggtttgaaatcatcataatggaactggagactgggaagtgacatgaagaacctaagatttcagcaaccatttcaggttgatgattatgaggttatcttgatgctgatctgttctgtgggctcccaaagtgctgagattacaggcgtgagccactgtgcctggctcacacctgtggagaaatgtttcgcagtggtgtttgcaggcacagagaaagccaaaagcagggtttgggggattttgctagatgagtaatgaaaaggcagagggcacgtgagtttagcttattggagggagtgttattaaaataatggtatggcatctttcagctgaatatgaaaaattgagaagaaagtgggggtggtggtcaaaaagtggaggttggagaatagggaagatttgaacaactggctggaagaagaggggaattgtggaaagaaaacgaaatgcttgagtcagtggtttcacaggtggagtagcttccgtgatgaaaaagaccagtggagagcattgcatatgttctcactcttccaatttgaacaccttcccctggtggagataagtagatatgctttctatgttttattaactttacaacaccttccccaagctggtgaaaggaagctctcacttccttattcattagcctgatgaaacagagcaaaatgtatcttttttggttctgttttgaattttagtaactctagtcttcatctgcctgttggacttcctgtctctttttcatctatctttgggtacacatttcttcttacgggtccttttaaacaccgagctcctgagaaaggtcaccattctaccactttgattctgtaaatgtcttttgctcataggtgtcagaataggctgggttatactgtggtaacaacccccaaatctcgcaatcccaggaggtacatgggtactaagaattattcacattttacaaatgaccaaactgggccccagagtattggtaaaatgtgcagagcccatcagctggtgaaaccctaaggaacacaacacttagaatttcacaaaggctagactttatgaaatgtgctgcgtggatgcagtagtatctccaacccccctggaccgctctgccacgtacaatcttctatctttcagtccggaactcagtaacacccactccagggctgatgggggcgctggatgtatagtggcgagtgtttatctgcctaggatagcgatggctaggcaggggacataaaacagaagaggcagtgaccttctccgggtggggtctatggccctttactgggtacattctgtacacacaggcccctcctttgcctgaagtcattgatgaagacttcattacggagggtttggggaaaggtgggggtctggctgggtaagccggcgtcccagccccgctacagccccgcccagatctggcagagccgtgggcgaacccaggcgggcagaaaggcggggcgggcggctgccaagccggccaataggcggctctccggctgctaagccgagagggcaggggcgccgtcagtagcaccaccgccttccaagtttccccttgtggatgcgcggccccgcggctctgctcctcccggcgcagaggggccgggagaggccacaggagcggacctggcacgggatttctgaggaacgggagaagactggcgcccgacccgctctggagggtcggtgaacgatgaagggccggcggcggcgacgcc

SEQ ID NO: 43681 - DNA, 2300 bp, Homo sapien
cctcaaaaaaaaaaaaaaaatacagttgaatgatttttattctcctctttcctttttatctacaataaagtccattttgattttatggtcatccatgggctttggaagtttgaaaaatgctaaacaacctatccaaacccatgagccctcagggtcaactaggctagtgaaggacttaagaataagacctacaccccacagccagagaaagagctttcatagcccctggaagggaagttcttatatcctggggtgaggttgcagacagcagctaccaggcctggcagaggcctgtattatatgtgtgctggagtccagaaccagcacaggattttttatttagcagagttatcttagtaatgaccagtcatgccatataaatctaaaaggcaagacttgttttgttttcatttttgtttttgttttgcagagatggagagataggctgcttgggtctttggttgggtctttataaagctttgcttatcttatattgcttacttaattttggagggaaaaaactaacagacacaccctggtgatggttctttgttcacctcaaggctttgttgttgtgttgttgttgtttgttttttgttttgttttgttttgtttttagatggagtctcgctctatcccccaggctggagtgcagtggcatgacctcggctcactgcaatctccacctcctgggttcaagcgattctcctacctcagcctcccgagtagctgggattacaggcacatgccaccacacccagctaatttttttatatttttagtagagacagagtttcaccatgttgggcaggatggtctcgatctgctgacctcgtgatccacccgcctctgcctcccaaagtgctgggattacaggcgtgagccaccgcccctggccattattttgagttttttttagaaagcttttacaagattacaagaaatgactctcttagggaagaaaaataaccacccagtttcccttcctagtcttagttcaattcatagagtgttgtgtttatccccaaagggtcttgtagtcttcactgcaaacatttgattctgatctactcacatacaaggaaatgtagattgccaagaccaaaactagaggggtgggcttcccatcagggttttcctgtgtggagatgacaggggaaacagggaggaaatcctaattatggcttgtcctcttccctgaattgctgtctacgacagtgtagttccaatgtaaacaaggtgggttggggatggtttgtatagggcaggaggcccacccagaagtcctacccagggaagagagggcccagaatctagttgcagcatttgcccagtaaccctaccccggcctttctttgtgtgttaggaagctggaaatgcaggctggtctccctttcttgcctttgtcactaaccccgagctgtcagccatttggaatcagaactgctttccagtgttctaagtccttatttgattacaaatatttggtgaatcaaagtaaggcactttggtcctaatttttgacctttggtcctaatttttgtttgtaagatgtggagaataaccctgaccttaccaggggtcctgggaatgtgaatccattcgtcaagtggttccacatctagaagaattttgcctatgccatgtcaggcatcattcaacacaaggccaactatctgctgccagtctggcataagatcagattgaaactgctaagtaatggtacatccaaataaacaaagttcttccaagagagtaaacccaagtccatcttatacacgtatttgttctgggttggtggggacgacagttcagccgagtccgatgttctagagcagaggttctcaaccctggctgtgaattaggatcatctggccagtttttgtttttaaatcagtgcaagggccctcccctcagagattcagattcagtagcttcaggtgggacctggaatccatgctttgtttggaacctcaggagtgttcttgatgtgcagccaggattgacaagagcctttagtctagagctcgcagcagacctctagactatttggaatctgattttaaagaatggcccagcagatgaaggtgtttttttaaattgttagtcatgtgaaacgaactgagtattgatcagtaatacagacagggcagctgtgagagagtttgatgctaatctttgcagaactcaagaacatactccataaagtacagctgaaaagatcacgaaaaccttggagccttcgaggaaagagaagggtgacttggggtatgtatggggagaactaaaaacctgtcatc

SEQ ID NO: 43682 - DNA, 2300 bp, Homo sapien
gtattttcagcccactagaaagctctgtcttctataagcttaagagtccgagtgtctttacaccactgagtgccatgcagagaagggtcattttccttgtatctggggaggctgctgcaccagcttaacatgtgggtgtgatttgaaagttaggttttcagtttggattctttctggatgagctgttctgtctgcccacacctgtagtgctgaaatacagaaagacctctcgggaaaagtttgagtttctcttaatgtctctgtgcttcagtgctagcttatttttggcaacccaatttctaaaaaatgctttcaataacgtgggcttttctttttttctttctttcctttttttttttttttttgagatggagtctcgctgtgtcacccaggctggagtgcagtggcgcgatctcggcttactgcaacctccgcctcccgggttcaagcgattctcttgcctccgcctcctgagtagctgggattacaggcacgcgccaccacgcctggctaattttttgtattttttagtagagacggggtttcaccatactggccagtttttcttatgatggaagacaaaatattgtgtcccagtctagtccacccgtagtgaaatcagtcatttaatcttctcaattcgcatgtttaatgcttaatttttaaataagacattgcttcacaactttgtgtttgaattgataatttgtgcaaatcaggaaaatacgtatttaattaggttgagccatatgagtttgctgatattcgaccattttgtaaaaacaggagtggcaatttcatatggttcaataaaataaaattgagaccgggcacagtggcttatgcctgtaatcccaacactttgggaggctgaggcaggaggatcacttgagctcaggagttcaagaccagactgggcaacatggcaaaaccctgtctctacagaaatacaaaaatgagccaggcatgatggcacatgcctgtagttctagctacttgggaggctgaggtgggaggattgcttgagcccaagaggcagaggttgcgatgagctgagatcatgccactgcaatccagtctgggcaacagaatgagaccctgcctcaaaaaaaaaaaaaaaatacagttgaatgatttttattctcctctttcctttttatctacaataaagtccattttgattttatggtcatccatgggctttggaagtttgaaaaatgctaaacaacctatccaaacccatgagccctcagggtcaactaggctagtgaaggacttaagaataagacctacaccccacagccagagaaagagctttcatagcccctggaagggaagttcttatatcctggggtgaggttgcagacagcagctaccaggcctggcagaggcctgtattatatgtgtgctggagtccagaaccagcacaggattttttatttagcagagttatcttagtaatgaccagtcatgccatataaatctaaaaggcaagacttgttttgttttcatttttgtttttgttttgcagagatggagagataggctgcttgggtctttggttgggtctttataaagctttgcttatcttatattgcttacttaattttggagggaaaaaactaacagacacaccctggtgatggttctttgttcacctcaaggctttgttgttgtgttgttgttgtttgttttttgttttgttttgttttgtttttagatggagtctcgctctatcccccaggctggagtgcagtggcatgacctcggctcactgcaatctccacctcctgggttcaagcgattctcctacctcagcctcccgagtagctgggattacaggcacatgccaccacacccagctaatttttttatatttttagtagagacagagtttcaccatgttgggcaggatggtctcgatctgctgacctcgtgatccacccgcctctgcctcccaaagtgctgggattacaggcgtgagccaccgcccctggccattattttgagttttttttagaaagcttttacaagattacaagaaatgactctcttagggaagaaaaataaccacccagtttcccttcctagtcttagttcaattcatagagtgttgtgtttatccccaaagggtcttgtagtcttcactgcaaacatttgattctgatctactcacatacaaggaaatgtagattgccaagaccaaaactagaggggtgggcttcccatcagggttttcctgtgtggagatgacaggggaaacagggaggaaatcctaattatggcttgtcctcttccct

SEQ ID NO: 43683 - DNA, 2300 bp, Homo sapien
gcttaatgaatcttcaggggaagaagaagatcttgttgtcttagaatttgagtccaagcattttcatttaatgttggggtagcaacatagtccacatgaaaaagcattatacatcttgcatgggtaatttccaggataagcaagagatctgtattaattgatgtatactccattaccttatagaccagggtttatcagaaggaagccttctgtatagcggtcttgggagatccaggttgtggggagcccattttaatacagcacaaggctaaggtatgtgaaggctgacagtgaaaggcagagtgtagcctgtgctccagaaattaaattattgttgtttttggaatctaccctaatccttaaggaaaattattctctacctggagcattaaacatgaccatcttttctgtgtccctaatggcagcactctttgctctcaactcttcataagaaagcatggggttttcataaacattctgaaattcagcgcaactgagaatgaaatccaatgtaaataccacacttaatggctgtttggaaatggcagcttgagcccttcatattggataagatgggggaaaagggaaatgataccaacacatttccatctttcaggtcataatagaagatgaagctgacttttgctctcttatctttagaaacctgtttatttaaatcccctctgtttaaaattttgctgcacaaagcaaaggtgggagaacaaacaaggccaggatgattgttgctagttgagggaaaagagacatgttgacatagcttggttgataagaagagcattggactgagtgtcagaaaacccttgtgctagtttgtacattattgggtttggtggcatccagcaattttcactgcctttgggcccagtgtcctcatattgggtaggtactgtccaaggctccttctcattctgacattccctgctttgcagaacactcttatctttaacaagaagagagaataaagcatcatttgaaagaacctacttttattaggctgattaacacctccagtttctaaacaaataagttaacatttaataactagaatgaaggtttaaaaataattgaaacacaagccaaataatctaccagcgtgaacaaattctttaaaaagattagcatgtttatagcatgcttaatttttttctggatatgataaaactttgttctctaaaagtttcagagtaatttgattaatttccctgtatcaaacctacaagaaatttcagttcctttaaagttgcccaatttatgctgatgttcaggagccactaacatcactggtgactttgatttaggctacatcaagtgtcacagaaggctggtcactcaaaagagacttaaattcagcacaattttgtctataaaggattctgtgaggggatccaggaagttaataaagaatcacgacggcatcttttactgcagttgagtctttataaacgtgtgatgaaaatcaagatttttttttttttttttgagatggagtctcgctctgttgctcaggctggagtgcagtggtgcgatctcagctcactgcaacctccgcctcctgggttcaagcgattctcctgcctcagcctcccaagtagctgggattacaggcatctgtcaccacacctggctaatttttgtatttttagtagagatggggtttcaccatattggccaggctggtctcgaactcctgaccttgtgatccacccgcctcggcctcccaaagtgctaggattacaggcatgagccaccgtgcctggccaagatgtttttatgaaaaacactggccagaagctttctgtgagttctcaaaattgcatgaaactgttgtgtcttattatgttttaaaacagcacaagcaagatcataagagcaaaagtgttatggggagaagagcatgccagtccatggggagtcatagcttctcctctgggataagtccatgatttttcacatttatgttgtttgctctaaatattcaaactttagtcaatggcttcaaatattaagcagatattatagcatgaattggagttaaataaaaaattggcttttttttctttttaaactttcaggtaacattcgatccagaagtatttttcaacattcttctgcctccaattatttttcatgctggatacagcttaaagaaggtaagatgtttttgccagtatttctgaaatcatgtgaatctctgtgttaatttacctgcataattttctagttatttttcttctcccagattgcttattactttgttctgcacccactcagagactata

SEQ ID NO: 43684 - DNA, 2300 bp, Homo sapien
aaaaagttgggtctcctgtggcatctacctctattgctacatggtctctctacatggtttcttcagtatgtcagcttccaggtagctagatttctttgtctgtttgtttgtttttttgtttttggaggcagggtctcactctgtcactcaggctggagtgcagtggtgcaatcttggctcactgcaacctctgcctcccaggttcaagtgattctcgtgccaccacctcccaagtagctgggattacaggcacacaccaccacacccggctaatttttgtatttttagtggagacagggttttgccatgttggtcaggctggtcttgaactcctgacctcaggtgatccgcccgccttggcctcccaaagtgctgggattacaggcgtgagccaccgtgcccagcctagctagagtggaaagtgacagaatgaaacaggcaggagctagattaccttttatgacctagcctcacaaatcacataatctccattaccacattatattctttgagggagtcacaaaggtccactgaggttcaaggggagggaacatagatgccccttcttgatgggggatggtaaggttctgggattggaaatatgattgtggccatctttttaaaaaatacaatccgccacaaatactaagaagtctgtacttttaaggtagctcctgagttgcccttttctaaagagagaaattctgtccttgagtactgggcacccaaaggggcataatattatgaccaacacagtgcccatccaggttttaagtatttgcaattttattggaaacctgtgtggaacttcaaggtatacggatgtttgcaggggctgagtgactgcctagaggagttgggaaaggggctagctaaaatgtagatgaagagatttccctgctttaaagaaaccactaaacagctttggcagagtgctcacctacaggggaaccaggaaggctgcagtactccaaagagttttcttacctaatgctacctctaccctattatttcatttggttaagcatcaccttcttcaatgaatcctcttaaaaatgcaaactcccctgggagcgaaaacatgggcagttttggtagagatttcagagtggttcaataaacacatgagtacagtgctaagcactgggaactcagtgattaatctgatcttgtttcttccttgaccagaggagcaaggtggattgaagattctagttttcctgagaatttgttccaagaggcttcatccttcagagtccacgccataattttgttcagagctgggtttggtcttaagagtcattaaaagactctctgagctaccaggtgagcaacataaaagaaagggtcatcagggtaacccccaccccccaccaccaccttaggaccagctactgctcatctaccaggaatggcaagcgttcagttccttctggttcaaccctattccccaaggggattagtagcacagcgcagacgaagtctattccctcaagtgaggaaggagatacttcaatgccctcccccgattccaactccttatcagtcctcacatttgagtctgatgagaacagaggtttgaatgaaacctagcagattctggggctggaagggcaacctgagagatgaggaaagagaggtgtaggggctaacgtggcttcggggctgctcggttcactgacagcccccactttactgggcccagggcggctgcacactggcctgagattaaacacttcgccgtggcgccagagacgggactcgagaccgcaaggctagtcactccaagccgatgctcccgctaggcgccggcgacctctggcgtcccctttcggaagtgcggcggcggctgcccatgaactggccccacgaccccagactgcctgggcaggtgcgccaggacggggtgagaagcgcagagaggcaagcagccggcggccggcccgcagacccgagggcaacacccggccccgcctgggtggctcggttggcccgcggggcggtgcggcgtggcgcggccgggggacgaacaggtgcgcgggcggggggcggtgcttggggatcctgcgcactgcgcgcgcccctcccccgcgcggccccgggcgcagccccggcccggcgcgagtaggaggaggagctgcagcggccacggccactccggcaggtccgcggtgctgccagaacccgccgacggcgcgggctgctggtccccgctcggaggaggcgcggggggccccgggaccatggagcctggtgacgcggcgcgccctggctcgggtcgggctaccggggcgccgccg

SEQ ID NO: 43685 - DNA, 2300 bp, Homo sapien
cattcatttgacaaacgttgtattgagcacctagtatggacttgggccaggtgtaggagattcaaaggtacatccctcccctcagctttcctccccactgcctttttttttttttttttttgagacggagtcttgctctgtcgcccaggctggagtggagtggcgccatctcggctcactgcaacctccgccttctgggttcaagctattctcctgcctcagcctcccgagtaggtgggactacaggcgcccgccaccatgcccggttaatttttgtatttttagtagagatgaggtttcaccatattggccaggctggtctcgaactcctgaccttgtgatccgcccgccttggcttcccaaagtgctgggattacaggcgtgagccaccgtgcccgccccccccggctctggtttttttttttttttttttttttagacagagtctccctctgtcgcccaggctggagtgcagcggcgccatcttggctcactgcaacctccacctcctgggttcaagcaattctcctgcctcagcctcccgagtagctgggactacaggcacacgccactacgcccggctaatttttgtatttttagtagagacggggtttcaccagacggggtttcactgtgttgagcaggatggtctcgatctcctgacctcatgatcctaccgcctcggcctcccaaagtgctgggatgacagccgtgagccaccgcgcccggccctgcatgccctttatgacataccttttaggccaggcgcggtggctcatgcctgtcatcccagcactttgggaggccgaggcgggcagatcacctgaggtcaggagatcgagaccagcctgcccaacatggtgaaaccccgtctctactaaaaatacaaaaattagccgggcgtagtggcaggcgcctgcagtcccagctactctggaggctgaggcaggataatcacttgaacccgggaggcggaggttgcagtgagccgagatggcactgctgcactccagcctgggcgacaagagcaaaaactccatcaaaaaaaaaaaaaaaaaaaaaagatatacctttttgatctcaagaaagtcacagttcaaatagggaaacaatacacaattaactattttactaagtacttgtgcaattttagagccatatgtgaaagtcttaagaaaacacagaagcagcctggggtgcggtgggtcctgcctgtaatcccagcaccttgagaggctgaggcaggatgatcgcttgggcccaggagttcaagaccagcctgggcgacatagcaagaccccatttctacaaaagtaaaaaaaaaaaaaaataggtgggcatggtggtgcttgcttgtagttccagctactcaggaaggaggctgaggcaggaggatcgcttgagcccaggaagtcaaggttgcaaagttgcaaggttgcagtgagttatgattgtgccactgcagcctgagtgacatagcgagaccctgtgaaagaaaaagaaagaaagaaagaaagaaagaaagaaagaaagaaagaaagaaagaaagaaagaaagaaagagcacagaagaggattgggaggttatggggtacaattcttgagggggtgaccctggccaggcgatgagagggcggtaggaagggtgatgaggggagaagaggatttagaaatacaaatttcagggtcttcttgtgtcagcgggaatttctgtccctcacaactttcatcataagataaatctaatgttcaactagagatctctcccgcgccttgaacttgcaaatttatgaatcaggggcaaaaaaaacccggataccgagcctggcctcccaccagctagagaacccaccaagttccaggaggggcggggccgagggcggtccgtgccacagctgtgggcggggttgtccgtgcttgcgccagagccggcccgccccgccgccaggggctgtcgcaggagccaggcgtggattggtatgtgggtatgtcggcctctcttcataggccgcgcaggattgctcgagaggctttgattggctcaacaggcgctgagcgttcattggctgcgctgggtcgtcagggcgacgaaaaaggggaaggggtgctgggcctggcgggcaaactaaggctgcggaccgttgggcggttccgcggggcgttgtccggagagctgcgaggccggggttcccagggttcacgccacactctaggaagtgcctgagctagtgagctggccaacgagctccgcgggctgggaccatgggctgcttcttctccaagagacggaaggctgacaag

SEQ ID NO: 43686 - DNA, 2300 bp, Homo sapien
aaacaaaaacaatgtgtgcatttgccaagacatgtgagtctgatattgaacagaatttaagatatgcttttttctcaatcaaaaattatttcacactcttgaaaactagtgacacctaatatttgctcagaatttcaccaccatgactccgaagaacattttcagataaaattaggaaaattgctgatttttcaaataaaaagcaattgtaaactccagcaactttatctgtatttattgttgaagtgataacatgtaaaaatggtctccctatgcacataagtaaatacaaagccacctacagtgaatctttatagtcaatttgataaattaatgagcactggaaacctcacttgattcttcgctacacagtgatatccaaaatagtgctgctagatagaatctgcaaaaaaattggagaggacttttaactcataggacttcacttatgaagtctgtattcatagaaggaggcaaaaaaaatcaatatttgtggaacatctactgtgtttcaagtgtctaacttatgttttctcatctaatccttcccaagccctcaagacaataatcattatttcccattttacaggtaagcaaactaaggctcagagagaaaataacttgtccaacattattactggacagtaggcacacttcaaaataaaatgctttctgctcttgtgtaggttcaagtatttcaaagcacctaccatttctaactcaagggagagtggattcattaaacatttgtgacatgagaaaatgatttctacaaatgaaatacacatctgttctttgaaatccttctcaggtgttaacttcaattgaattgaataactaactttttaaatcaatgaacggaaaacagtttagtggaattaggtaatagcatacacccaatgagtgagttataatcagtatagcttccttttaccagatggctaatgaccttcatagaccaaatacatgttacaactgatgccatggatccgtaatattgacactctctccatagaagcctatcttagcttgtgatttattttcacaaagaacaaaatgttcactgatggaagttaaaatcaaaatgaaacaccaaacatcactgtagtggtcagttttgttttttgttttgttttgttttgagacggagtcttactctgttgcctaggctggagtatggtggtgtgatctcggctcactgcaacctccacttgctggattcaagtgattctcctgcctcagcctctcaagtagctgggattacaggcactcaccaccacgtctggctaatttttgtattattagtagagacgaggtttcaccagccttgaggccaggctggtctcgaactcctggtctcaagtgacccgcccgcttcagcctcccaaagtgctggggttataggcatgagccactgtgcacctggcctgtaatggtcagttttatgtgttaacatagctaggctatagtccctagtttataactggctaacataagccagttattccattaaaatctaatctaggtggtgctgagaggtattttgtagatgtgaatcaagtctataatcagttgactttatgtaaacaagattatcctagataatctggtgggcctgaatcaatcagttaaaggccttaatagcagaatggaggctttcctgaagaagaaattctgcccatagacagcagcattggcttgtgctcgagaactcctgcctgtcctttctgatggcctgctctaaggatttcagatttcaggcttgcctagctagccaccacaatcacataagccagttcatctatatctatacctatatctatatctatatctacatgtgtctcctaatggttctgtttctctgttagaatcctgactgatacaatcactatctttattttatatataaatccataacttatatgcacttaagaaaaaaaaactaattttccctggatttcatattctttctttggattggatttttctccatcagaaatttcaaaagggattaagaaagtgtctgactccagagaatgctcagcttcagagactatccataattttctttctttcttttctttcttttttttagatgaagtcttgctctgtcgcccagactagagtgcggtggtgcgatctcagctcactgcaacctctgcctcctggattcaagcaattctcctgcctcagcctcccaggtgcacgccaccatgcctggctaatttttgtagagacagggttttgccatgttggccaggctggtcttgaactcctgacctcaagtgatctgcccgcct

SEQ ID NO: 43687 - DNA, 2300 bp, Homo sapien
gattccatttatgtaatactcttgaaatgacaaatttatagagatggagaacgtgttaggggttgccagaaattagaggaggagaaagcggtgactgtgactacaaagtgtagcaggaggaatctttgtggtggagaaaaagttgattgtggtgattacacaaatttaaatgtgttaaaattgcacagaactatatacacagactcagaaatcagtgcatgaaaattgatgaaatctggataaggtctgtggactgtattaatgttaatatctatattgtattatagttatctattaccattgggggaaactgggcaaagggtacatgggaccactctgtacatttttttttacaacttctgatgaatctataattatttttaaataagtataataaagtgagataagtctgaaggactacgaatattttagaactcacgcatttccatattatggaatataactagatctttaacatggaaaacagacaaaatacaaaagagcctacattattgttcatcctagaaatgtaaacgaaaatagcccaggacagtagctcatgcctgtaatcctagcactttgggaggcccaggcaggcagatagcttgagcttaggaattcaagaccagcctgagcaacatggtgaaactgtctctaccaaataaataaataaataaataagttgggccatggtggcatgtgcctgtagtcccagctacttgggaggctgaggtgggagaatcacttcagccccggaggtggaggttgaagggagccaagaggttgcagtgagccaagagatctcaccactgcattctagcctgggtgacagggagcccagaggttgcagtgagccgagatcgagccactgcattccagcctggcgacagagtgagaccctgactcaaaaaaaaaaggaaaagaaaaaagaaagagaatgagttcatcatagttgcatatagcacatttccaaacccagagaggtaagccaaaaaggtttgttgcttaaacatctatattaggattcaaccaaaggatcagaaccagtaggaaattatatatatatatatatatatacacacacacacatatatatatacacacacacatatatatatacatacacacacacatacatatatatatacacacacacacacatacacccacggtgcccagcctgccagaagaatgcgtggtgggaatatacgtatatatactccctgttcattcatttcttcgaagctattgtcttagacgattatggtggccaagtaaatccaaaatctgtagggcatacagtcaggaagggaagatcaggagcaggctggaaccaatggacataggccaaaggtgtcatccataggggaaattctctttctctgacgtactcagcaccctcagccctgattgaaaggctttccaactgattccgtcaggcccacctagattatccaggattatctccctaactttaagtcaactgattaggagctttaattacatcagcaaaatacctccagagcaacacctggattggcattcgatcaaataactgtgggcgatagcctaaccagtggacacatcgaaaaagccacacaacatcacaaaccacctgtgctggcaactgaataaatgaattatgttaatagccaccttggctttattattacaggtaattcaagcacaagcgacataaatcaatagcggccaccgagttgatgtatgagagtcccactttggaacttcagagttggaaggggccatgaaaagcttagtttgtatttcaacacagccgaggcatctgcacctcgtcctctctagcgctcggcggggctggggcgtctcgggcagtggcgcacccagctggacgggaggggagcccacctggaacgcggcgccgcgggtgcgggagcggcgagtgggcggggcgtcgaggcggcgggtggcgacggcgcccagcccgccagaagaacgcgcggcgggcagacggctgggagccgctccggtagggcgagcgcggccggcggtgggtgggaggagaggttgggggaggaaggaaagggaagaggcggagcgtgggagcgcacagtgtcaggaatacaatagtgctccgcgccgcctcagccgccgccgccgcccaaccgcctgcccagcgctgaggcctgacgggccgggcggacgagggccgagggcgggagctgaggcgcggggggcggccccggcggggggcgggggcgaggaggggattaaggggcaggtgcgagggagggaagagaagaaagcgagcggttaggggg

SEQ ID NO: 43688 - DNA, 2300 bp, Homo sapien
ggtaatcatgaattttttctattattcttgcagcttttctgtaaaactgaaatttttttctaaataaaggtacccctctcagcaaaaaaaaagaaaaagaaaaaaaagcatatagtttttgttgttgttgttttgtttttagagacaggatcccacatcccactctgtcacccaggctgaagtgcagtgtcgctatcacggctcactgcaagcttgatctcccaggctcaagcgatgttcccacctcagcctcctcagtaactgggatcacagccaccacgcctggctattttttttttaatagagatgagatctttctgtgttgcccaggctggtgtcaaactcctggcctcaagtggtcctcctgcctcagccccccaaagtgctgggattacaggggtgagccacggtgcccagcctgaaaagcatatagttgaacaacctctatgtgtcagcactgtggcaggacccagggaggtgagggtgaataagatacatcccctcccctgcaagactcacggtctagcaggtcattttggcagcagatccacagggatgagatgaggcctccgggaagattaaaacaatctaggcaagaaatggggaaagcctgaatgaattaaggcagtgccaacatagaaggacattaaagggacaattctatgacctggtgactaactggacttgagttagggaccaagaggaggctcgcgaggtgtcagggcttcttgcacagccagttggctgcaccacagcccatttcccaggacagagtgctcaggaggttggtgggaaatgatgtgattggtttgggtcagctcagttaagctgctggcctgtatcctgggggcgacatctgggctgagataaggttagggagacatcagcactgaggaagtagaggaagagagttatttttgtttgtttgtttttgagacagtctcactctgtcacccaggctggagtgcagtggcataaactcagctcactgtagcttcaacctcctggactcaagtgatcctcttgcctcagcctcctgagtagccggaactataggcatgcaccaccacacccagaaatacatatatatgtttgagaagtagtttcactcttgttgcccaggctggagtgcaatggcacaatttcagctcactgcaacctccgcctcccggattcaagcaattctcctgtctcagcctcccgagtagctgggattacaggcatgtgccaccacgcccggctaattttgtatttttagtagagacggggtttcaccatgttggtcaggctggtctcaaactcctgaccttaggtgatctgcctgcctcagcctcccaaaatgctgggattacaggcatgagccaccacacttggccagttttgttttgttttgttttgttttgttgttttttgggtttttttaaatttttagtagagacgaagtctcactttgttgccaggttcatctcaaactcctgggctcaagcgatccaccctcctcggcctcccaaagcactgagattataggcctgagccactgtgccggccctggccatttttttttttaatatgggttatttggagaaagcccagactgtcagatggcaggaccaggaatacatttaggctgagaatggggttgtggagctgtgttgttgaggaatgtgttttccatatgatttgaaaatgaaatcgagcctttcctcttcccccaccaaaaacgtttttgcaagagttggccttcagccaccagggtcttctccactaggatggagaggagctttgttctttcctttttaacctgtttgggtttaaccgtcccagtctctctctgttcggcatttaacaacttttcttggttgaagtaagaggtaaactagctattcgtccaaactccaaagctcaggttcactgggccgtaagcctgtacccaccatccccgggcctgccaggggcggctttgcaggattcttccagccgcgggggacggggacggggacggggcggggtcccaggcccatgccatccacctgccaagccgccgggtcccgggaggcgtttcccctcccctcggcccgctgcctgaccttcgagccgcctgagaaatctccatcctggcgagtgcccgagccaggccggcctccccgccccctccctggaaaggaaaggccccggcgacaacagagccagacccgctcatcccgatctcccagaaggcgactgacagctgactgccagaaggagatcgcgccaggagactgactgctctgtgcccacccggggacccgggcccgttcagc

SEQ ID NO: 43689 - DNA, 2300 bp, Homo sapien
attctctatccacttatcttgcttaactttgtcttcacatcctctcttccttctgtctctttctagtctatgtttacctaagtagcatactttccccattctctgtatatcatacattctcatgttatattatctattatactactttgtattattgttttctaatattttactgtttattttctgtcttccccactatcatgtaagctctatgagagcatgggctttgtctgatttccacactgctgtatccccagggccctgaactgagcctggcatacagcaggccctcaatacatatttacagaatgaacaagcatcctatatatccaagccccttaaccagaggttagtattgatgaagtacttattatgtgccagtcttttcacatagaaacacctcacaatatctcagtgaggtgaaacatggcaataataaacacattctagtgctgagtacatacttacgaagtgccagctgctgttctgaccatttttactcatttaattacatgaggcaggtggggtgtcctattttttagaaggtgtcctattactgttcccatcttacagacaaagaaactgaggcaccaagggtttatgctaccaagatcacacgggtgggtaaccgtcagtgctgcctgatttcacagcgtctgctattaatacagcacagcagacctggtagccctaaattcaaataccagttccacctccaccatgtattcagttatgtgagctagggcaatccacttaacatctctgtgcctcagtttcctcatctgtaggatgagtataataatagagcccacctcgaaatggggtttgtttcgagtataagatgagctaatgcatgtcaagtgtttagaacacagacggggcccggagcggtggctcatgcctgtaatcccagcaccttgggaggccgaggcgagaggatcgcttgagccaggagttcgagaccagcctgggcaacatagcgagatctcgtccctataaaaaaaaaaaaaagaatgcagacggcaacgagcaagtgccatatcggtgtttagtattatcgttgtactatactgcttctaacgtgttttgagcgctgtccacttgaggtgtgatttctgtctgcaaaataaaaccaatcctgcctctggccctggaacgaagataccgagagacaaaggaggaacacaaggtaggcaaaattcccaagtcttctaggctttcgccggccgcgcagtcctctactgcctaagaacgtcctctacagcgccccatctgccgatcccggactgaccccttcggggttccgtccccactacccccccccccccccccgcctctcaccttctcatacaagttttcgtcctcgggttctgggtcctcttgccacggtgtggtcggttctgggggccgctttcccgccacagcggacggggcgaccacagtcctggagaagctagattcccagcggacgcgggcggccgggagccctcgcgtcgccgctgccgccaaaagacggcgagcgctcaaaccaaacagcccagccgccatgacagatggtgctgcagggtctcaggggcggggaaagaaatgcgactgtgcgcagctgcagtgggtgcgagcgcgacaatcatcgccccgcctccgccacgctatataggtcccagatctgatttggttttccaatgaggcggggcgttgagcaaccctctttgcctccagttgtcgtggcttcgtggggccaaccattttcggccaggctgagaaatttcttattgatgggtctgctcatttcctgcataggaagaaatcggtgacatttgggtggatacagttcccagccaatcgccccgagttccctcgcccactggggaaagaggcagagcttccgctagtctttcatcttcaaaggaaatcaagcttctaaaaagcgggccctgccgaattggctaatagctactccttttctccactaggggagcgttcgcaaggggtgtggggaggtggccagcgcttgccaatcagaggaggccagggctgtcccctagcgggcggtgaccaatcgccggggccggccagagcgcgcttccttagtaggtggatggtggtcggagcgccgactcccttctcgtcgtcgccattttgagctggtgactgtggccggctgggagtaggcggcagtgagtttccctgggagggcagcgcgcttggcgcttctcccctccccccgatctgcctccagtctcggacttggttgttgcgcgctccggctccggctgagctgggagagttggaggaggtgg

SEQ ID NO: 43690 - DNA, 2300 bp, Homo sapien
cctccctgggctcctggccaacacagccttggccctcacacagcaactggctcagccctgagccctgtctcttatgtgcagcccggtcctaaggtggttccctccccagggctcaagcccggtttccagaggcaaaaggggcccttttggaggctgttctgaaccactgtgctcttctattgggatggagcagcagccacttcatccaaccctcagggctgtggtgagaactcagggagtcctgagaaccctgtgacccagccagaggtcaggatgaatcccagatcttcaggccccaccctctgaataagaagcaggtaaagccaggcaataatagcacctgctcaacactaggttgctgccacacctttgctctatgctcgtgcacacacatacacagacaaacacactccaattttctcttcctcctcaagccacagggaacccgagttacctgctcccaggtgggcaagagttagaatcacacagaggcactggcgtctgagagcacaaaaaccttcaagagactctggcaaaggggccagagtcacacagtaacatccaccacagccaagggccagtcacagacacgagccccaaataactacgggcccacatcacagaaggaacacacagtaaggaccacaattacacagtgggtcccctttccatggatgagcgtcagtgtcacagatacaaactccccaaaagaaggggcaatgagtcacacacacattccctgcatgccccttcccacccaataagtgggttagggtcaatcaaaagacagtcgtcccccaagccccgccccatggataaggatcagagtcacagaccgccccccctcaaagggtaaagaccagagtcacatcccccctccgatcccccaggaatagagaccagaaccacagaatatttccccatggaccgataaacaccagagtaacacagagcagcatcccctctcctatgcacaaactcaaagtcgcagacaaccgcttccccactgataaacttcgatgtagccgacacagtgatccacagtagcccactcccatccgtccctcccttcccccaacccgcatgcacccatcccatgtcccagtcgcgcacgcgcctttgctcacaccaaaaaaaaaaaaaaaaaaaaaaaaaaccaaaaaaaaaaaaaccctcccgggttgagacattgcaccaacccctccgttccgcgcatctcccccgacccgaagtccgccctcgcgcctcctctacgtccccgccccgggccccttacctccgcccccacgaccagcgtcgacgctcaccttctcggcccgggctgtcaaggaagggctcccagacatcacctctgcccgccgccacctcctccaactctcccagctcagccggagccggagcgcgcaacaaccaagtccgagactggaggcagatcggggggaggggagaagcgccaagcgcgctgccctcccagggaaactcactgccgcctactcccagccggccacagtcaccagctcaaaatggcgacgacgagaagggagtcggcgctccgaccaccatccacctactaaggaagcgcgctctggccggccccggcgattggtcaccgcccgctaggggacagccctggcctcctctgattggcaagcgctggccacctccccacaccccttgcgaacgctcccctagtggagaaaaggagtagctattagccaattcggcagggcccgctttttagaagcttgatttcctttgaagatgaaagactagcggaagctctgcctctttccccagtgggcgagggaactcggggcgattggctgggaactgtatccacccaaatgtcaccgatttcttcctatgcaggaaatgagcagacccatcaataagaaatttctcagcctggccgaaaatggttggccccacgaagccacgacaactggaggcaaagagggttgctcaacgccccgcctcattggaaaaccaaatcagatctgggacctatatagcgtggcggaggcggggcgatgattgtcgcgctcgcacccactgcagctgcgcacagtcgcatttctttccccgcccctgagaccctgcagcaccatctgtcatggcggctgggctgtttggtttgagcgctcgccgtcttttggcggcagcggcgacgcgagggctcccggccgcccgcgtccgctgggaatctagcttctccaggactgtggtcgccccgtccgctgtggcgggaaagcggcccccagaaccgaccacaccgtggcaagaggacccagaacccgagg

SEQ ID NO: 43691 - DNA, 2300 bp, Homo sapien
gagggcctccttgagaaactcttattgtcaaggctctccgctgccccttagcccagggacattgtcttccagctcccagcactcctgtgcatcacagtatgaaggtagcccctacttggcctgctcctccctttccccgcaaacataaggctagagcccactgccctagaaaacagcaaggacttcagcagacagggggcatcttgcagagagacctggcggggccacccacagtgtgatcagggctttgccacctaagacaggtagacaaattcaagcctggggctgcatcccagggtgggggtaggggactctcagggctgaaagtcttgcctgagattcagcacatcagacaagacttcacaacaatgggggccccaggctccttccacaggccccaagggaccatctcatcctcccaacaagctgctggctgtcccctataaggcagcaaaagaccatgaaaggctcttgggggggtgtgtgaaggggcgaacttggcgacgagacagctgccacctccctgggctcctggccaacacagccttggccctcacacagcaactggctcagccctgagccctgtctcttatgtgcagcccggtcctaaggtggttccctccccagggctcaagcccggtttccagaggcaaaaggggcccttttggaggctgttctgaaccactgtgctcttctattgggatggagcagcagccacttcatccaaccctcagggctgtggtgagaactcagggagtcctgagaaccctgtgacccagccagaggtcaggatgaatcccagatcttcaggccccaccctctgaataagaagcaggtaaagccaggcaataatagcacctgctcaacactaggttgctgccacacctttgctctatgctcgtgcacacacatacacagacaaacacactccaattttctcttcctcctcaagccacagggaacccgagttacctgctcccaggtgggcaagagttagaatcacacagaggcactggcgtctgagagcacaaaaaccttcaagagactctggcaaaggggccagagtcacacagtaacatccaccacagccaagggccagtcacagacacgagccccaaataactacgggcccacatcacagaaggaacacacagtaaggaccacaattacacagtgggtcccctttccatggatgagcgtcagtgtcacagatacaaactccccaaaagaaggggcaatgagtcacacacacattccctgcatgccccttcccacccaataagtgggttagggtcaatcaaaagacagtcgtcccccaagccccgccccatggataaggatcagagtcacagaccgccccccctcaaagggtaaagaccagagtcacatcccccctccgatcccccaggaatagagaccagaaccacagaatatttccccatggaccgataaacaccagagtaacacagagcagcatcccctctcctatgcacaaactcaaagtcgcagacaaccgcttccccactgataaacttcgatgtagccgacacagtgatccacagtagcccactcccatccgtccctcccttcccccaacccgcatgcacccatcccatgtcccagtcgcgcacgcgcctttgctcacaccaaaaaaaaaaaaaaaaaaaaaaaaaaccaaaaaaaaaaaaaccctcccgggttgagacattgcaccaacccctccgttccgcgcatctcccccgacccgaagtccgccctcgcgcctcctctacgtccccgccccgggccccttacctccgcccccacgaccagcgtcgacgctcaccttctcggcccgggctgtcaaggaagggctcccagacatcacctctgcccgccgccacctcctccaactctcccagctcagccggagccggagcgcgcaacaaccaagtccgagactggaggcagatcggggggaggggagaagcgccaagcgcgctgccctcccagggaaactcactgccgcctactcccagccggccacagtcaccagctcaaaatggcgacgacgagaagggagtcggcgctccgaccaccatccacctactaaggaagcgcgctctggccggccccggcgattggtcaccgcccgctaggggacagccctggcctcctctgattggcaagcgctggccacctccccacaccccttgcgaacgctcccctagtggagaaaaggagtagctattagccaattcggcagggcccgctttttagaagcttgatttcctttgaagatgaaagactagcggaagctc

SEQ ID NO: 43692 - DNA, 2300 bp, Homo sapien
cggacttggttgttgcgcgctccggctccggctgagctgggagagttggaggaggtggcggcgggcagaggtgatgtctgggagcccttccttgacagcccgggccgagaaggtgagcgtcgacgctggtcgtgggggcggaggtaaggggcccggggcggggacgtagaggaggcgcgagggcggacttcgggtcgggggagatgcgcggaacggaggggttggtgcaatgtctcaacccgggagggtttttttttttttggttttttttttttttttttttttttttggtgtgagcaaaggcgcgtgcgcgactgggacatgggatgggtgcatgcgggttgggggaagggagggacggatgggagtgggctactgtggatcactgtgtcggctacatcgaagtttatcagtggggaagcggttgtctgcgactttgagtttgtgcataggagaggggatgctgctctgtgttactctggtgtttatcggtccatggggaaatattctgtggttctggtctctattcctgggggatcggaggggggatgtgactctggtctttaccctttgagggggggcggtctgtgactctgatccttatccatggggcggggcttgggggacgactgtcttttgattgaccctaacccacttattgggtgggaaggggcatgcagggaatgtgtgtgtgactcattgccccttcttttggggagtttgtatctgtgacactgacgctcatccatggaaaggggacccactgtgtaattgtggtccttactgtgtgttccttctgtgatgtgggcccgtagttatttggggctcgtgtctgtgactggcccttggctgtggtggatgttactgtgtgactctggcccctttgccagagtctcttgaaggtttttgtgctctcagacgccagtgcctctgtgtgattctaactcttgcccacctgggagcaggtaactcgggttccctgtggcttgaggaggaagagaaaattggagtgtgtttgtctgtgtatgtgtgtgcacgagcatagagcaaaggtgtggcagcaacctagtgttgagcaggtgctattattgcctggctttacctgcttcttattcagagggtggggcctgaagatctgggattcatcctgacctctggctgggtcacagggttctcaggactccctgagttctcaccacagccctgagggttggatgaagtggctgctgctccatcccaatagaagagcacagtggttcagaacagcctccaaaagggccccttttgcctctggaaaccgggcttgagccctggggagggaaccaccttaggaccgggctgcacataagagacagggctcagggctgagccagttgctgtgtgagggccaaggctgtgttggccaggagcccagggaggtggcagctgtctcgtcgccaagttcgccccttcacacacccccccaagagcctttcatggtcttttgctgccttataggggacagccagcagcttgttgggaggatgagatggtcccttggggcctgtggaaggagcctggggcccccattgttgtgaagtcttgtctgatgtgctgaatctcaggcaagactttcagccctgagagtcccctacccccaccctgggatgcagccccaggcttgaatttgtctacctgtcttaggtggcaaagccctgatcacactgtgggtggccccgccaggtctctctgcaagatgccccctgtctgctgaagtccttgctgttttctagggcagtgggctctagccttatgtttgcggggaaagggaggagcaggccaagtaggggctaccttcatactgtgatgcacaggagtgctgggagctggaagacaatgtccctgggctaaggggcagcggagagccttgacaataagagtttctcaaggaggccctctcagtcccaacagttttgacccctttcttccctccactctccccagagtccctgcaggaagcatcacccaggctggcagatcatggtagcagcagcgggggtggctgggaagtgaaacggagccagcggctgaggaggggccccagcagcccccgaaggccctatcaggacatggagtatgaaagacggtgagttatctgttctcagcttcccagacagcctaggcttgcgtctatgtgagaattgatccaagaaggtgctaggatggggcttctgggtagaggaaacagcatagcagatgatgggtttcttttcagcagacaggtgtttggcacctgttgtgagccaggacctgtgctaggc

SEQ ID NO: 43693 - DNA, 2300 bp, Homo sapien
ttctgtggcttctggatttggattataggtttccccatttcaagattataaagaaattattcagttattctatattttcttttatgatttcatttcttttttttttttttttttaagacagagtcttactctgtcacccagactggcagtggctcaccgcagcctccgcctcccgggttcaagcgattctcctgcctcagcctcccaagtagctgagattacaggcgtatgccaccacacccagctaatttttgtatttttggtagagatggggtttcaccatgttggccaggctggtctcgaattcctgacctcaagtgatctgcccacctcggcctcccagggtgccacccacgcctggcctatggtttcatttcttatgtttaaatctttgatctatttcaaatatatcctggtatatatgtgaagtatagtcataatatcttgcacatgtctaggtatttaacctttttgatgaattgtacttgggacctttctattttctaaacagtggttacattaatttgtacccagcatccttactgatttattatttataacaagtttttcagttgattctcttaggctttgcaggtatactctcatatcatttacaaataatggtaattttaccttctcctttccagcttttaacctcttttcttccttccctgtttaattgctttagctagtgtctttagaataatgttaagaatgctgttgataacggacattctaatgttgttcccgaccagaattggaatcctgttagtatagtagcattcttctgtggcatctagttttttctattttaaataaacatatattggttgctcttagaatgcttttttagtcattatttgttcaaaataattgttgagcgcctactgagtgctagggaatatggcagtgagctaagggtcccctcatttcctggagcccatattctagtaattttttaactcaccaaagaaacacagattaggccatgcacagtggtggacgcctgtaatcccagcactttggaaggctgaggtgggtggatcacttaagcccaggaatttgagaccagcctggcaatgtggtgaaaccccatctctacaaaaaatacaaaaatgagctgggcgtggtggtgcgtgcctgtggtcccaactactcaggaggctgaggtgggaggatggcttgagcttgggaggttgaggctgcagtgagccctgataatgccactgccctccagcctgggcaacagtgccagatccattctcaaaaaaaaaagaaaagaaatgcagatgaaatcagctttgagatcattattttacagttattgcggtaggagaaattttaatgaaagagctgctagtgtcggcaaggtgacagtgaagcaggggcaggggacgtggtgcaagacagggaggaggagcctcacccccggggatcctgcaagccgaatgagaccttggtgagcattttggtatttgatcctgagactgagggggagccactaaagggagtgagatgggtttgagtggctttgccttagaaagcactcacatttgggatttgggatgtagagactgaactggggaggtccaggtagaagtgaggagaacagccaggccacaaccaaggtgccccatgagggaagccagtggcatggaccagagagtgacatagggatggagagaggcaggttgcacttcagagatgtggagcagggatttaggaatccctgtatgggggcgggcctgagggcttccaaagaatagagtagggggagggaaaaatagaaagtttacagggtgagaaacctggcagacactgccttaaccagatgaccatggttaacatcaccagagctaagtcatggtggtatcatgtacttctttctctgataggatcagaagggcacctcacttctgttgtatgctcctccaaaaaaaccaaaaccctacgagaacacatcacctgggcctcttgcaccttttagaaagggcaaccttctgatccctccccatccttcttcctccactagtggtggtcgtggtgacaggactggccgctatggagccactgaccgctcgcaggatgatggtggggagaaccgcagccgagaccacgactaccgggacatggactaccgttcatatcctcgcgagtatggcagccaggagggcaagcatgactatgacgactcatctgaggagcagagtgcggaggtgaggagggggcgcgctgcgccaggcctggctgggatgggctcccaagggccctctgtgtctggctgcagcaccgtgtgcagg

SEQ ID NO: 43694 - DNA, 2300 bp, Homo sapien
accagatgaccatggttaacatcaccagagctaagtcatggtggtatcatgtacttctttctctgataggatcagaagggcacctcacttctgttgtatgctcctccaaaaaaaccaaaaccctacgagaacacatcacctgggcctcttgcaccttttagaaagggcaaccttctgatccctccccatccttcttcctccactagtggtggtcgtggtgacaggactggccgctatggagccactgaccgctcgcaggatgatggtggggagaaccgcagccgagaccacgactaccgggacatggactaccgttcatatcctcgcgagtatggcagccaggagggcaagcatgactatgacgactcatctgaggagcagagtgcggaggtgaggagggggcgcgctgcgccaggcctggctgggatgggctcccaagggccctctgtgtctggctgcagcaccgtgtgcaggcagctctccactcccgtgccttcagactgtgctcggtggctttgcctcacctggagggcctgttcccactcccctctctgagggctcctctcccaacctgggtctccctggcttccacatgcttggctctgtacttctgagggcccctggccaccactctttccctttctccctgttgttcagttcgggcccatggctcactgtgaaccctgtactgcccgctcccagccaacttgggcacttgaagagcctcttccatgggacccggcgtctggggttgggaggacaacaaggggactgcagaccaccaagctgaggagctctgggaggccagccatgggcattcccagtggtgatagagcccctagacagaagggaaggacccttctggagaagccagtgccatgttgggtagttcaccctagcctgcgggatgaggcgcgatgtttacaccatcagggagcccccacccgaggggaagaaacaggcttgccttaggggaatcccagttggaggggcagtcagggacctggtccatgcgagcaggcagctctcctgtccagcaggctgggaagggagttcttgcaagcccagccctggggggcagtctgtgagctgcccactgccctctggagggtccagggcaaaaacccctttggtggactgccaggcttctccagtggcagctgtcaagctgtgcccagacgtctccaggagcactgggccctggccagggtgggaatggagcaccaagttatctggtgcttccccactgtgggcgggagggctttggccccaggcctgctctgcttagtcctggaatggatggattgggcaacagcccagagcccaacagccataccgttttgagcgtggtgtgtggtggaggactggccaaggctgaggatcagggactgaggagggagtgtctgcagccctcacaccacctccaccagctcctgctgcctggctctggctgagatctgaagctgttcttatgcccccagcttggttgcagggtggaaccgtaggagacatgcagccttcggtggtacagtgaagcaattgagcacaccccctgagctggccagagaggagaggaaaatcaagggtggggtctggtgtgctgaccccaggccatcttgccccaaggaggtttaagctgtgtcttgtcagctacctttgggagttccccccacaccaatactgtcacctacctctccccacccactgaaggcagcccccaaaaggaccccatggagaatttacagtcccagaaagattgcaggccggggcctgcccaccctgcctgcctgagcctttagccggagcccgcacatccctggctttcagagcctgcctgcctcacagagccagcggccagctcctaggcctgcccagactgactgcccgtctggtgtcactcatctcattctgtcggccaggattcctacgaggcctccccgggctccgagactcagcgtaggcggcggcggcggcacaggcacagccccaccggcccgccaggcttcccccgagacggcgactatcgggaccaggactatcggaccgagcaaggggaggaggaggaggaggaggaggatgaggaggaggaggagaaggccagtaacatcgtcatgctgaggatgctgccacaggcagccactgaggatgacgtacgtgccccccatggccccgggcaggaggccaggctgggtctcctccagggccctcaacttctccccacccctccctcacctgcaacctcagcgcctttcatcccttctccccctccagctcctatcccccagcactgatccgtcctc

SEQ ID NO: 43695 - DNA, 2300 bp, Homo sapien
gtaaatggcaccccacccccagcccatttccctccccgagcccctgctggatggtccatgcagaccgacctgcccctcttcatgctgcatctgcccctgtgctattaggccatgagggcagagaccatgttctggccatgtgcagcagggcctggcccaggagtggtgcttagtacctgagtctggaacagagatggagtgtggtagaagctgggtctccagatgctggaacattcaaggaaaatttctcaagcgtagcaggatccaacccagtcctagagctaagaggaggggtgcgggtctggctactgacttctagggctgaaacactgaaaggtttctgaatagaggagcaagtttcagggagaggaacctaataaagggattgaatacctgaggcggggaacagtcctgggagttggtggccttaagaaggcagaggaaggagaggagggagttgttgtaccaaatgggggagttgtttattcctgagctgagtgggttggcacagaggacaaatgagagtctggaaagggaagatgcacagtactgagaacaacatcagaaggttcagaaggcacctgccaccattgcctaggggctttccttcctggggcactgcggggtccctgggagatctcttcatccaagtttggagggtgcagtgggaaatccctgctccctctgacggcctggcctgtgcctcacagtgtggcgtccagaacttcaaacgccgagagaagtgcttcaaatgtggcgtgcccaagtcaggtgaggcccacctacctctcgtgctctccagggcggagcggttggggagaagggaagggtgaggggtctgtgctcagggcttggtatagggaggagggtgaccagtcgtggagccttccccttatcaccagcctgtctcccactgcccctgacagaggcagagcagaagctgcccctcggcacgaggctggatcagcagacactgccactgggtggccgggagctgagccagggcctgcttcccctgccgcagccctaccaggcccagggagtcctggcctcccaagccctgtcacagggctcggagccaagctcagagaacgccaatgacagtgagtcagttgttccttcttcctctgtgccctagggtgtcgggctgggctcaccaagaccagagaaatggcagtgagcaggacctcatcctcatggaatctccacttggtgcggggatagacatttgatgtagggagaacagggggagtggcaacatcccacctgactttgggggtgtgtcgggaaggttctcagcagacaggcagccaggctggcacctggaccgccaagcagagttgatcctggaggaagcagtgagggaagcggcagttgcaaaggcacggagtgagtgggggcagaggaaagggagcagtgggggcattgaagggcagggctggcaagagtgccaggggtgtcctctaacattgggccccttcccacagccatcattttgcgcaacctgaacccacacagcaccatggattccatcctgggggccctggcaccctacgcggtgctgtcctcctccaacgtgcgcgtcataaaggacaagcagacccaactgaaccgcggctttgccttcatccagctctccaccatcgtggtgagggcggcacagttgggggccgggcagccagggtcccggcccccggggtggagacgagggtccttttccccagcctcccaccgcggctgccagcctggaaatcgggcaatggagccgggggcctccccgggcctgacccttctgtccctgcctcccctcctcccacaggaggcagcccagctgctgcagatcctgcaggccctgcacccaccactcactatcgacggcaagaccatcaatgttgagtttgccaagggttctaagaggtcagggccccacctgtgtgccttcccacccttcccctccccaccctcccactcccccctaccgcttggggcctcctatctcactcccagtctctaacatcctcctcagggacatggcctccaatgaaggcagtcgcatcagtgctgcctctgtggccagcactgccattgctgcggcccagtgggccatctcacaggtactcagaccccttgtgcctcccagcgtcctgagacctgggctttctcaaccctcctgcaccctctctgaagcaggaaggctggcttgctatccatggatgcaaaaccctctcccagtagctggcatggctattctaccttgctcctggctctctagaccccctgggacattccccttcatcatc

SEQ ID NO: 43696 - DNA, 2300 bp, Homo sapien
aacaataccacagactgggtaatttataaggaaaagagattgatttggctcacagttctgtaggcagggaagcccagtggtgttggcatctggtgagggccttcttgccgcatcataacatggcaaagggcaagagagcatgcatgagagcaagagaaaattgggccaaactccccctttttatctggaacccactcagtgatggcattaaatggagactcaaaaggtggaggggggccgggagccgtggctcatgcctgtaatcccagcagtttgggaggctggggtgggcagatcacctgaggtcaggagtttgagaccagcctggccaacatggcgaaaccccgtctctactaaaaatacaaaaattagccaggcgtggtggcaggcgcctgtaatcccggctactcaggaagctgaggcaggagaatcacttgaacccaggaggcggaggttgcagtgagctgagatcgtgccattgcactccagcctgggcaacaagaacgagactccttctcaaaatatatatatattatatatatataaaggtggaggagatgggagggggtgaaggatgaaaaattacttaatgggtatgatgtacattatttggctgatggatgctctaagaaccctgacttcagcactatacaatctgtgcatgtaacaaaagcacttgtttattttatttatttatttattatttttttgagatggagtttcgctcttatcatccaggctggagtgcagtggtgcaatctcggatcactgcagcctccacctcctgggttcaagcaattctcctccctcagcctcccgagtagctgggattacaggcatccgccaccatgcccagctaatttttttgtaattttagtagagacgggttttcgccatgttggccaggctggtctcaaactcctgacctcaggtgatgtgtctgtctcggcctcccaaagtgctgggattataggcatgagctaccgcgcctggctacaaaagcacttgttaccccataaacttatacaatttctttaaaaagcagccgcgatctcttgaggagggcagagcctttgtgacctaatcacctctgaaaggccctgcctgtcaacactgttgcatcagggattaaatttatcttttgagatggagtttcactcttgttgcctgggctggagtgcaatggtgcaatctcagcacactgcagcctccgcctcccgggttcaaggaattctcctgcctcagccttccaagtagctgggattacaggcatccaccaccacgcccagctaattttgtatttttttagtagagctggggtttcactgtgttagccaggctggtctcaaactcctgacctcaagtgatccacccgccttggcctcccaaagtgctgggattacaggtgtgagccactgcactcagccgggataaaggctccacctgtgaacactgttgcattagggattacatttctgacacatgaactttgagggacaaaaaacatagcagagaacacagccagagaggggcttggcaagaagcactggtgactggtgacagaaaataggaacttgcactactgtgtccctcaccttctgattgttctgcctcagcttccactcatctgcctcccagatgggcccgccactctgtccacactgcttctgccacctcaccattgcaaaccagtgggggtgggggcacagggtgtgttcagtgatgaggtcaggagtagccaggtgccaagtgccttgcaggctgtggttgcgagtttgggtttattcttggtgtgatgggaggcgaaggaagggttttaaggacattgtatttgggggtgggagtggcttatacttcatgaaagagcgctctgctgggaaaggtggtcaggagccgtagcccagaggccagatgaagccttctgcagtggttcggactagggatagtggctggcccgtgtttgaggatgcagggcagtgggtcagcagatagagttagtagccccagggtcatgagggttctgggaacctcacctccaccctcacccccagattgccaaggacatggaacgctgggcccgcagtctcaacaaacaaaaagaaaacttcaaaaatagcttccagcctatcagctccctgcgagatgacgagaggcgggagtcagccactgcagatgctggctatgccatcctcgagaagaaggtgtgttggggccacccccctgcaccctgccccacaatcttgtccttcctttgggccctctgtggagtccctgaatttctgtgtccctccaccccaggg

SEQ ID NO: 43697 - DNA, 2300 bp, Homo sapien
ggaatcatgaaaagtttctatgtcttgattggggtgctggtcacatgggtgtatacctatttaaaagtccaacaagctgtataactaaaatctgagtgttttattgtatgtaaattatacaagaagttggaaaatcaccaccacagcaaacctcaataaataagaaggaaataatgaacagaaattgatgatatagagaacaaaaaatgacagattaatagaaaccaaaagcagaatctgaaaacaaaaattaagaggaaacacttttggcaagactggtcaattgaagaagatagaagatgcaaatgcaacagagcttttaaaaataaagaatgtatctgaaaatctagatgaaatgaatatattcctagagaaatatcaaatgccaaaactgttccatggagaaactgattactcaaatggagcaattagtaatatagaaattgaaatggttgtcaagatcttccctttccccacaaaaaaaaaaaaagggcccagatgatgtgtgtatgtgtgtgttcctttctttctttctttttttttttttagatggagtcttactctgtcacccaggctggagtgcagtggtgcgatctcagtttaccgcaacctccaccttctgggttcaagcaattctcttgcctcagcctcctgagtagctgggattacaggtgtgcaccaccacacccagggaatattttgtattcttagtagagatggggtttcgctatgttggccagctggtcttgaactcctgacctcaggtgatccaccctccttggcctcccaaagtgctgtgattacaggcatgagccacctcgcctggcccagatggtttttataagagcattctaccaaactcccaaggattcctttcttattaaagttaattcctttcttattaaagttgttctagatattagaaaaaagaaaagatgtctattttaacaggctagtgttagctgaagctgcgaaggaagaggcactctcatacatcgctggaggcaatgcaaaatagtacaaccctctcttccaccctccctctccctctcctttgtctattttcctgcctccacagggctcactgtgggaccacagatgcaccccactatgcccagctaattctttgattttttgtggagaccaggtggtggtggtggggtgtgtgtgtgtgtatgttggggcgtgggggggtctcactttgttgcccaggctggtcttgaactcctgggctcaagcaatcatcctgcctcagcctgccaaagtgatgggattataggcgtgagccgccgcgcccggccaagactccatttattaaaaggctaaagaattttgccaggcgcggcggctcgcgcctatagtcccagcactttgggaggccgagcgggcggtatcgcctgagctcaggagctctagtccagtctggctaacgtggcgaaatcccgtctccactatggtaacatgtaaacatagaaaagataacagtaaaattttttctgtgttataggaccgttgaccaaaatgttatgcagcacatgattgtatatccataatttatattactgtatatagtcacagatatctattataatacgggtttgtatgtgaaactataattttacttattgttatgtttatggtctgtgtatcttgctagaatgtcagctccatgagcccaaggaagaatttccagcacctggcccatgtcaaatgaacttttttggccacctgagtctcggtctccccatctgtaggatgggtgtgcctttccatgtggaggcacccacacgttccgtttcctcttcccaccctacagagcacggctccggcaattccacagctcaggcttacattttcccatattctggacgctggtgcccaccacgtgcaccaggcactggccagacagaactaccacccccagcatgccgcgcgcatttgggccgtaccacaacctgtagggtcatctgggtctgaaacgggcaccagcgacgcgggagcagggactgacgcccctctagcaaagcatctgtggtacatcccagacccggggctctccaaggccccgcgcttccgagctccgcgcaaactctggcttctcttgtacgacagaggtggtttgctcttccgttgccccgtggcttcagctcatctttggcaggaaggcgaggcttccgcccggcacagggggtgagctggagcaccgtgcccccaagcctctggacagcatttggaggagggtgcttccctaatcccaacttcggggaaacccctcatgggcgtatttggagcctccgggc

SEQ ID NO: 43698 - DNA, 2300 bp, Homo sapien
caccctgagttttcagtggcttttctaggggttccgtgcttaattcatgaggagcgtggcttttgcagctttgtctgcgtgatccgcggttagctttcccttgcaggtaccagagttaaaacctggcgtctagcaaagggatgaggcctcctacattgttcatttcttatggcctggtaatcccagataatcagccggctctggattcaaatcccatcgatcctttccagttgtgtgatctttggcaaatcgttttgtaagcctgaataatgggtatgaggataacgataagattagcttacactcgtttagctacttagcgcatttaatcttcacgacaatcctaggaggtaggtcattattacccccactttatagataaggaaactgggacacaggaaggctaagtaatttgcctaaggtcacacaatcagtgagtggctgggccgggattcaaattggggtctagttccgcaatctgtagtcttaaccagatgccataatgtctcccctccccattcccctgcgccgccatttgatagtactactactactaatataacacttagcatgtgccaggcactggtctaagccctttctacttatttcttcatttaaactccatcgcaaggtaagttgctgttattcctattttatggatggggaagcagtggcccaagttgggggtttctctagtggctgagtattcataactaattttatattaatgtaaatatatatttacatatcttaacatattacttttatattaatatataatattttaaaaatttaacagtgccttgtgccagcaatgttctaaggctcatcccataatttatattctctgattttcttttgtttgagacggagtttctctcttgtcgcccaagctggagtgcaatggcgcgatctcggctgactgcaacctctgcttcccgagttcaagcgattctcctgcctcagcctccccagtagctgggattacaggcgcccgccaacatgcccagctaatttttgtatttttagtagagacagggtttcaccatcttggccaggctggtctccaattcctgacctcaggtgatccacccgcctcggcctcctaaagtgctgggattacaggcgtcatctgattttcataataacacattactatcctcattttacagttgtggaaactgaggcacctgccaaagacatgtagtgagtttgggtttgattggaccaaggcagcccttgttcctgaggcggggagaatggagggaggcgtggagaggggaggtgggggcagggagtacacgtcccctgggttttctggtggcactgcagtgacatctttcattattcatgaacaggaaggcgtgctcactttgccttggctatagcatcgtaatccctatttgctgggcagggcagtcttgggtgtttcttcgccttatgcataattcataaattgggtggaacctttcttgacctctctgagtttccaggttgagctactgcagcagcataattcattattcaggacctgggagagtgtgttttccctgcagcagccccatttccctgcttacagtgtattagatgcagcaataggcgggcgtgccccttttattccaacccactgggcctcatgcattattcatgagtaagttgtggcctgggtctccttggcttccgggcccctgcaagatcatcattattcatgaatgggggtgtgtggcttccatgttttaacatctgctttctggttgctggttgttagtctaccaaccactcaacttcatgcataacttataatcaggaagcatggccttaacggtttttcttcgcttccttgacagcctggctgcaacaattcattcattagtcgcattccatgaggcgtggcctctgttttacctgttttcgttgttactgccacaatgtccaccaggtggtgctgttccacttctaaccgaatgaatcgcaaccgagtagggaactttatgcatgattcataagtaggcgcggcccgcttgcatccgggtttctgggggtggggcccaaggttttgttccggccccaggctcagcgtccgccatcttgtgtcggcggctcggctgtaaggaggtggcagggacaaccacaaccacaacggccgggggaggagaaggcggcagcggcgattctaggcggcccaggcggcggggaggaggagaaggaggagggtggcggccgggcttggcttcggctccttgaggagttggcggcggcgcgacccggggaaccggcattggtaaaaaaacgtcctttca

SEQ ID NO: 43699 - DNA, 2300 bp, Homo sapien
tccagccagcctgctgcctcccctcatctcccattccttagccctgtggactgggccctgagcccaggggcatttggcaaacagtcccccaccagctgcatgcctctgggcgagtgaatggggttctctaagcctttcttttcccatttgtgatttgggcatagggttatctgggtcatggggattgttaagattagacaaagccctttcctctttgattgacacacagtatgctcttggtagatagtagggagctcttgtcattgtggttggtgctagtgacaagtgccaagatggaatcttaggtacattgggatacttagtgtcataaaagtctcagtgtgggaggacttgtgtgaacagaagactcagtgcctagaggagcacttggggtgaggggaagtgacgctgggtcctcccatctccagcatgtggacccagtcacccccaccaccagatttcacttccacagcaggctttattgttctgtctctgggacctagcaggtgaccctgggcaagttacttctcatttgtccggcaaggacactaaactctgccttgctgggtcagggtcatggaggggatgaaacgtgataacacgaggaagcagcctgggcttcagagtcagcagatcctggtctggtcccagctcagtgtgtgggaaccttggtcaccgaacgtccctgagtgaatttttttccatcactttaaagttgggggtattattgatagcagtccaaaccccacaggagtaccctgaggacagagtgagacgaggtttagagaagtgcttactatggcatctggcacaaggaggactcctgatcaatctaatactcatttatcattgtggttaacctgtttaagggactccgcatgcagatgaggcttgggatgtgtttgttttctatctttttgcaacctcttttattggtctgtgtcggttttcccctcccaaagctgggggcagggttgggctttataaaacttgagcccctctggggactgggttctcagcaagttaccgctcctgccatcatgccaccctgatggatgtccaagcctcacttccctcctgcactccccgctcccgccgccatccctgggattaagggagaggagaatggctgcttgttactgcctacctactctgtgccaggttctatgctctgtgttatttatcatctcgataaccccgtggggaaggtaagtggtattatcacccctgtttcacaggtgagaaaactgaggcctgtggcggttaattattactgttagtgcgtggcaggctcaagatttgaaaccaggtctgtcctgaatccacatccttcccctgacctcgacacaagtacattcttgtcattcctttcactccaggattggagtctctccctcattatgctgggctgggaagaagcaaatggcttagtggtcagcagtgtggatttgcaaatcagaccacctgggttcagatcttaggtctgacagctgtgttaccctgggcaagtcctcacctttctgtgcctgtcccctctttgctgtaaaatgggggtactaatacttaagtcttcccttcccccacagttgctactaacaaacagaaaaacggtacccatgtgctccagggtcacctctgacctttttttcctccagatgtccagctcgccgctgtccaagaaacgtcgcgtgtccgggcctgatccaaagccgggttctaactgctcccctgcccagtccgtgttgtccgaagtgccctcggtgccaaccaacgtgagtgtcctctccgtggagactggcagacgaggtggtgggtgggaaagtcttttgtatcactgtctgtctatccatgctccactcctgtgtgtctccctaaacttgttcttttcctctattcctagggaatggccaagaacggcagtgaagcagacatagacgagggcctttactcccggcagctgtaagtggggccaaggccgggctgaggggtgtggaatgggacattgagaggataaggttgggtggggcaggccctgacctagagtaccccctaacctggcaggtatgtgttgggccatgaggcaatgaagcggctccagacatccagtgtcctggtatcaggcctgcggggcctgggcgtggagatcgctaagaacatcatccttggtggggtcaaggctgttaccctacatgaccagggcactgcccagtgggctgatctttcctcccaggtacctcttcctagcacccttccccctttcccccttcccgaggcaccactgttcccggtgccacagccat

SEQ ID NO: 43700 - DNA, 2300 bp, Homo sapien
acgggtggggagaggcaggattggggtgggccaggttcctccatgactctgtcacttgctctctgtctgtgtcaggcccctgttaaccactgaccaccccctctctcccttcccctctccaggcctgctccgggaagttcatgcccatcatgcagtggctatactttgatgcccttgagtgtctccctgaggacaaagaggtcctcacagaggacaagtgcctccaggtatgtgggtgggacctgtggggagggcatcattggggacatttctggggaggcctctctaaccctcctccctttgcattccttagcgccagaaccgttatgacgggcaagtggctgtgtttggctcagacctgcaagagaagctgggcaagcagaagtatttcctggtaagtggtccccttggatgtctgctcccctcatcttggcctctggccatcacccctggggcttccttcggcatctcaatgcaaccggtggcgcattctctttgccattctccttatcttgaagggaagcccagtgcatccctcgtttccccttctggtgcctccttcctcacatgactgcgtgtcatttcttagagtcctgcaacctgaagatgtggtgttagcccctctccccgtctctcaggggagtgaggggtgatgggtagcttcacactaacctgcatcaccctgaccagcctctgcctgtcttcttggttgcttcttaggtgggtgcgggggccattggctgtgagctgctcaagaactttgccatgattgggctgggctgcggggagggtggagaaatcatcgttacagacatggacaccattgagaagtcaaatctgaatcgacagtttcttttccggccctgggatgtcacggtgagtagggtaggaggttggggctttgtcgtctcactttcctcctttttctttttttttttttttttgagacggagtttcgctcttgttgcccaggctgtagtgcagtggcgtgatctctggcccaccacaacctctgcctcctgggttcaagcgattctcctgcctcagcctcctgagtagctgggactacaggcatgcgccaccacgcccggctgattttgcattttaagtagagacagggtttctccatgttggtcaggctggtctcgaattcccgacctcaggtgatctgcctgcttcagcctcccaaagtgttggtattacaggcgtgagccaccacacctcacccctcctttttcttgttcccattctttctgtcagagatctttctgcctctgccagaagcccttctttttggcctttctttccctcagcttctgttttttttttttttttttttttttttttgccttaacctctttttagtgctggttgggacagtgtgtctggggtcctcaaaactactctcaagctcaattcacctagagtacttacaggactcagcatatagtcgtgcttgtggctacaatttattacagcaaaaggatacagaccaaaatcagcaaagggaaaaggctggtgcaagtttctaggagtcttctcccagcgggagttaaacaaggcggcctttatttccccagtagcaacagtaactacagaaataacagcaacaaggtgtaacaagacatgaaatgttgccaaccagggaagcttgttagactcagcaccacctcttttacttggggctggtcatgtaggcgcccccttcctggcacataacaaaatttccagactcccagaaggaaaggtgttcagcgtaaactgtattgtttgcatgaacggtttaggcacagtgaaccactgataccaggtagggagcggtgggaaccttcctgaattccaagttcccagacaccagccaaggagccgaccttggaagcaggcctttccaagggttgtagtttcagtctcctaggcttacacttctctgcacatatggaaactgggttggttatgcagggttctctgagaagctttctgtaaggagcagtgtcgtttttgcttacccaggatttattccccctttcatttatttcatttattcaccagatagttttagtactgttttaggtattggggatataccaaggaataaaacaagattcctggagggagaggggaacggacagcaaacaatagacacaatacgatcgtgaggtatatagttaatgttggtgatgagtgctcctcaaaggaaacaactaaaaccagacaagggaagtcggggtgtcagggagaatggtttgtagtattgatgacaatggttaaggaaggcctgagttctgcaaagacctcaagga

SEQ ID NO: 43701 - DNA, 2300 bp, Homo sapien
aagggaaagaggccaggcatctggccaggctgctgcctctccgcccccaggcccttgccttgccttcagatgttgcatgcctaagtgtaagatgtgccttttctccaaacctccctccctcacttcccaccaggcagcctaggtttctagaatgactcattcttttttcacttttattttgatttttttttcaacacatagacaaatattaagaatattatgatgaatactcaaataccattcctcacctaaatttaacaattcttaatgttttgccacattttcttcttagatttatgtagatttttcttctttgtgcttaaatgtgtcacagacatcacagccctttactccctactatttcagtgcctctgccaagtgaggatatgttgctgtagaacagggtttcttagcttcagcactactgacatttggggctggttatttatttgtcatgggagaggggatgccctgtgcactgtaggatgtttctcagcattcctgacttctgcccactagatgccaatagcactctccctccatcatgacatctcaaaatgtctccagacattgccagatgtccccaggggtgccacatcactcccagttgagaactacttctgtctaacagaaacatcattttcatgctcagcaaaattaacaatcattcttaccatctcttctagttatttatttgtctctaatggtccatattcaggttttccccagctgttactcaaaatgagtttaacagctggtttgtcaggatgattctgtgtgtatggtgcatttatctacagaacagtgcatatattatctagctcggggtgtccaatcatttggcttccctgggccacattggaagaagaattgtctcgggccacacataaaatatactaatactaacgatagctgatgagctgaaaaaataaaagaaaaaaagatccgtgcataaatctcataatgtcttaagaaaatttacaaatttgtgttgggcagcattcaaagtcatcctgggctgcatatgggccacaggttagacaagcttgatctagctgaagttttacaaagtgaacacacaggtgaccaccacctgggccaagaaacagaacctagggattaccattgtgctgtcagaataattcttagtgcagtgtttgaggccaaaccatttagaatagtaggagtatgagggtgggaacaaaatagggaagggaaaaaaaaaacagttccatctgtcactttctcccttctgacactgcagttccagagtgggtatgtttgtatttgtgcaccaaccacagtcttgctaggtcatgtgtaaccttgaacttaacctctctgtgccgcagattcctgttctgtaaaatgggaatgacagcatctacctcacaggactattgtgaaccacttggcatttactgtgtgcctggcactgttttaaccaagctttaaatatatatgtatttgctcatttcttcctagcaaccccatgaaggtaggtatcactgttgtaacacctgttttagagacaaggcacagaggtaaagatgttatcctgtgtgcctgaagtcacaaaactaggtaatacgtggcatagctggaatctgaacctgaatttctaacatctgtacactccaaaccacctcgctaatgactgcgaactgtcctaggaattctcagaggccagaagttctgtcttgtttgctattttattttttgagacaggtctcattctgccattcaggctgaagtgtattggcacaatcatagctcactgcaaccttccaactcctgggaagtgtctgtacgtgtgtgtgtgtgtgtgtgtaagtgtctgtgtgtacgtgtaagtgtgtgtacgtgtgtgtgtgtgtgtgtgcgcacgcacgcgtgcccgttacgttgaccaggctggttgtaaactcctgggctcaagtgatccacctgcctcagcctccaaaagtgctgggattacatgtgtaagcctctgtgtccggcctctgtcttgttttctgccaagtcctcagggcctggatagggatcattgttggtttggtctgagttttttgtgttttaaaaaactgtggtaagatatacctaattgaagtttttattttttatggaggcataacatatctagaataaggtacacagatttttttttttttttttttgaggtggagttttgctcatgttgcccaggttggagtgcagtggcgcagtctcggctcactgcagcctccgcctcccaggttcaagcgattctcctgcctcagccttccaaagtgctgggaata

SEQ ID NO: 43702 - DNA, 2300 bp, Homo sapien
ggcaccaggcacacttttcacatgaatgagtggctgttggggcctcatgttgtttggggtcgggactagttttccatggagaaagtaagattgctctggagcccactcttgaggctgacatgtaatcctatcctctgtcctcttcgattcctgatagagaccccaagtttgtggagcgaacactgcggctggcaggcactcagcccttggaggtgctggaggctgtgcagcgcagcctggtgctgcagcgaccacagacctgggctgactgcgtgacctgggcctgccaccactggcacacccagtactcgaacaacatccggcagctgctgcacaacttccctcctgaccaggtaatgcccagttgttgggtccatttggcagaatgtgtttccctgaaatgggagcctgcagtgtgggtcctcccactgtggagtccagctgtggcaggtgccctgaggcatggggatctgagaagagtgattgatcctgacctgctttttcctcaccctagttcctttgagcaaagaggcttggttgctattgcccttgactgtggtgtgggctgcgtcatacctgattcccagtcagggctgtagggattatgggggagaaattctggagttaagagcacaggaatcaatatgggttcaaatccaaactctacttgaacttaggcaaatcacgtaacttctctctgtacctcagtttcctcgtctgtgaagtagaaataatagtgatctatctcatggggggtttggggaggattaactggtatttattaaaatgaagttagtacaatgcctggtaatccatgagagtttgttaaatgatgggctgtttagcacaaaatggctacccagtgattggtaattgttctctcagccagatctctggttcaacctgtgggaccctacagttgaggtattttgtgattggctccagtccgcatcgagtgcccaacccaagatagtgaattgggggcacatctggggcctaggtgaagcgtgaagattgtcagagaggccttcactctcaggtcctgttctcaaaaatctctccatcccttagctcacaagctcaggagcgccgttctggtctgggcccaaacgctgtccacacccgctcacctttgatgtcaacaatgtaagtctcctttctagggtcttctggggtcaggtggagggtgaataggtgggaaggaggtggcggctccccactcgagggctgatgtgctcacccttccctgccctgccttctcctagcccctgcatctggactatgtgatggctgctgccaacctgtttgcccagacctacgggctgacaggctctcaggaccgagctgctgtggccacattcctgcagtctgtgcaggtccccgaattcacccccaagtctggcgtcaagatccatgtttctgaccaggagctgcagagcgccaatgcctctgttggtgagggtgtttggccagttggccaggagtcaccccacatgtccccggcctagtccagcctccccaccagtcctctacccctggttctgctctgctctgtgaccccaggcctgaggtttacccacaccttcctttgagcctccctttgacatgaagagggtaggttggggcaaattatctccctccctcctcctccttcccactatctggccctcaggagaacttgctgttttactcttgctctgtgtatttcccttagttttgttctttcttctgtttcttcttgatctgttcatctaggaggtatgatctctaccagcagtctctctcccttgatactttcctgccttgtctccttccagatccgcccccatctgtacatctacctgcatgtttctctgtgcatcttcaccctccatagtttggggctgcggtttactgacacccccaccccaccccatctgcatattttttcaccacccctcccttctgtatatgatgcttctgtagctctgtaacgccccctacatttaccttccttatatctcccccgtcttcctctccatagatctcctcccatttccccttccatggtccccatcttccttctgaaatgtctactccttcatgttcctttatgtatgtcttccaatctttccttccatagctctcatcaccttcatatatttcttccatctttctcctcccacctgcctcgccctctgtatatacccccactctcccccttttatatcttctccatctccccccatatctttcctctatgtccacatctgtgtattccccccaacttcccctccatatatcttttttactcccctttt

SEQ ID NO: 43703 - DNA, 2300 bp, Homo sapien
gttcctggtcctgggcacagtatatgcccttgtccacctccttctgatcattttattttcttggcctgctctgcttgggtgaccttatccttccacagtttcttcttccccactaggacgttgaggacagaggcattttccctttggtatctagtggtgatactgtcaaagggaaagtttttcccaccacaggaactttcccattattgctctagagtaccctagacactccacaccgcagtccactggccacaccactacagcagctgaggcttgaacacaactgttgtcttctttctccagtatgccagctcctttgcggatactctatagacaccttgttcactgcacctcccccattacggctccatgtcttccccaccacaactcctggatctccttgacaccttattcgtgcctgacacccttctccatcaaaacaagcttttgagtcatgcatgaatcctggttgcatcttagttgttccccctccacctcattccattttacttctgcggtttgtctaccagtctaccattgttaacaccagccagatgggagatcagggcttagcaggcgggggttgcgtcattgcaccgagccccctgcacccagcagccacaaaggatagggtgggacaaaggtttctcttgtcactgcctggaactatttgcccacctccttctgatcattttattttcttggcctgctctggcaggcattcaacaaacatttgttgtgtgctgtgtgccagtcactttctaggcacgtgagacagcagtggataaaacaaagatccctgtcctcttggggttttacgttctgctaggttgacacccagaatagattataaacacagtaagcaaattgtaccttagaagttgatcagtgctcttcaaaaggcgaggaatagagcccgatctggggatctggaatgatggcagtgcaggtaggaatttttaaatcggaaaggcttcatggagatgactttgaagcaagcacctggaagaagtgagagaatgaggcacgtggatgtgggccagcagcattccaggcaaagggaaccacagcaaatgcaaaacccctgaggctggattgtgcccgtttcactcaaacagctagaaagagcgctagtatggtggcagtgagtcaggggaagaagaggaagagatgaggtcagagaagtgatgagcctgttctatgccaaggcgaggacttttatctttgtcaaatatttccactcccatcatggcccgggaaatctcactaatgtaaaccttactgaaaatcctaactgctgtgatcaaggctgccataaagggaagcccggaagaggcggggaggctgccttggaacagggtagtgtaaggatgtgccagaaggcctgctggaggttgcagccctttgagctggacttggggatagtgtggttttccaggcagaaggaagtgaaggattaggtcggcctggtagtacttggcacacaacatgcgcccaataaataaaatggaaataaaaccgcggagtgttctacttgtgttgactgacatcaaaacaaaacaaaaaaccctcagagtgaggggaggcacgggaggggctgtgccgggcaagagaggtggcaggaaaatccaacgcacggcgcctatgcaaatactcgtgtgaggcagaaaagaggctccgccccgctcgaagttccaagcatgcgcagtagcggctcctgcgcctctaaggatccgcctctttccttctttctcagcctgggttccaccccgggaggcccgctgtatgagatggagggcgggctaaaggcgggacgagactcgattgagcgcaattatgaccaatcaccttgcggaatattcggcctatagcgaaggaggagctcagaacaaaaaggagaccccacccccgccgacggtgaaaacctatgaaacctgggcggaggcgtgcggagtcgggtagagagcgaaatcacgcctcttcagtcagccacgccctttattcttgctcggcctcgccacagagagcaaatcagattggctgggcgacaacctcaaagggcggggctgcacacgttcactacgggaatgaggtagcggtggagggggcagttgggcggggataggccgtcctagctaaggtggtaaaggccaataactcttcaggctgcctctcctcgaaaagtcatcttctcgcgaacctttaaaatgccttcctccccaagcacctcaagggactagaactgagtgcttcatttgtcttttttcctccttgcaaaagtcccgtttgccaccatgggg

SEQ ID NO: 43704 - DNA, 2300 bp, Homo sapien
tgcatgaatcctggttgcatcttagttgttccccctccacctcattccattttacttctgcggtttgtctaccagtctaccattgttaacaccagccagatgggagatcagggcttagcaggcgggggttgcgtcattgcaccgagccccctgcacccagcagccacaaaggatagggtgggacaaaggtttctcttgtcactgcctggaactatttgcccacctccttctgatcattttattttcttggcctgctctggcaggcattcaacaaacatttgttgtgtgctgtgtgccagtcactttctaggcacgtgagacagcagtggataaaacaaagatccctgtcctcttggggttttacgttctgctaggttgacacccagaatagattataaacacagtaagcaaattgtaccttagaagttgatcagtgctcttcaaaaggcgaggaatagagcccgatctggggatctggaatgatggcagtgcaggtaggaatttttaaatcggaaaggcttcatggagatgactttgaagcaagcacctggaagaagtgagagaatgaggcacgtggatgtgggccagcagcattccaggcaaagggaaccacagcaaatgcaaaacccctgaggctggattgtgcccgtttcactcaaacagctagaaagagcgctagtatggtggcagtgagtcaggggaagaagaggaagagatgaggtcagagaagtgatgagcctgttctatgccaaggcgaggacttttatctttgtcaaatatttccactcccatcatggcccgggaaatctcactaatgtaaaccttactgaaaatcctaactgctgtgatcaaggctgccataaagggaagcccggaagaggcggggaggctgccttggaacagggtagtgtaaggatgtgccagaaggcctgctggaggttgcagccctttgagctggacttggggatagtgtggttttccaggcagaaggaagtgaaggattaggtcggcctggtagtacttggcacacaacatgcgcccaataaataaaatggaaataaaaccgcggagtgttctacttgtgttgactgacatcaaaacaaaacaaaaaaccctcagagtgaggggaggcacgggaggggctgtgccgggcaagagaggtggcaggaaaatccaacgcacggcgcctatgcaaatactcgtgtgaggcagaaaagaggctccgccccgctcgaagttccaagcatgcgcagtagcggctcctgcgcctctaaggatccgcctctttccttctttctcagcctgggttccaccccgggaggcccgctgtatgagatggagggcgggctaaaggcgggacgagactcgattgagcgcaattatgaccaatcaccttgcggaatattcggcctatagcgaaggaggagctcagaacaaaaaggagaccccacccccgccgacggtgaaaacctatgaaacctgggcggaggcgtgcggagtcgggtagagagcgaaatcacgcctcttcagtcagccacgccctttattcttgctcggcctcgccacagagagcaaatcagattggctgggcgacaacctcaaagggcggggctgcacacgttcactacgggaatgaggtagcggtggagggggcagttgggcggggataggccgtcctagctaaggtggtaaaggccaataactcttcaggctgcctctcctcgaaaagtcatcttctcgcgaacctttaaaatgccttcctccccaagcacctcaagggactagaactgagtgcttcatttgtcttttttcctccttgcaaaagtcccgtttgccaccatggggatgtaccaagtgagaccgagtagggggaacgagtggtgattgacgcgccaggttactggccactgctcacctaggcgctagcaaacttctgccaagatcggaactgagtactaaacagcctccacagttctccctggtgccgtctccggcttggcgccgcatcctcctctgggctcgcgatggccgcgtcccctcccgctgcggacgggtcctttggtacatgcagtccgaggtgagtcccctcctttccacttcacccttccgagcgcctgcgtgcgcatgcgcggagcgcggcgcgcgcggcggttgggccgttggctgttcggccctgggatccgccgccactccgcgatcagaccgctctgtgccgcgagccgccgtgagcactcggattcaagccggcgccaacgagtccgggggcatcgcccgcagcggccaagctcatggccggctga

SEQ ID NO: 43705 - DNA, 2300 bp, Homo sapien
gtaacactggttagagatctatctgtaaggttcactttatgttaatagcattcagagcagcatgaagaaggtccagtgagtgctaatgtgggtcagctatagagtaccccaagtgcatgttaatagaggtcagaatcatgtagggggaacagtacgttaatgaggggagtcagtactatggagaaggtaacaagcagctaggccagggaggggcccaagaatgtggtggcaagagttacttagaggaggctaagtgtgtgctgacagagttcagggcggtatgttatgtgttagggctttgaatgctgatgggtatatgagataatagcaggtaagatgtagtgaggcctccttgagggtctagcgtgtattaatggggatcaggacatagggtgcgatgaccaagtccttagtggttggtgtgttgagtatccttgagtatgagagtagtctgaggatgggtgtatgtctttggggatcaggaagggtcaggcaggacatgtgccttttttggggtaaggttttatgtccagtttcttgctccctccttttttgaaatctaaaaagctcattcaactgaaatgatatttaaaagtttccttgcgtataaatgttcaattatctctgttcacaggggcatgtctgagacccccatccccctttctgggagtgttatgtgatatacagattttacaccccatcttcctaaaatcccaaaaaactgaactccagagcatgtccagcccttggggtttccagttagaggtcgtggacccatggctcctcctggcttcctccccatcctccattcagccctacttccagtctcccccagcccctccactactccctgtcacaacatgcaaagcaactgggtatctgtgccatatggggacacaaggttgtctttgggagctggccatgctttaccttccttgccttaggcccagtattcagcctcccaggtcaggatgttttgtggttatcctgggttctccatggatggacctcatcctgtatctgaggtctttctgctagggtggcccctacccctcctggggatagtgagttcagccaggtgggggcgagaactgctgggggaagcacctgatttcaaggtagcagatgacccatttctctcctcaaatccagccccagtctcatcctcgacctcctatctagctctacttcccttgggcccagggccatcttaggccctgctgtgagtccagatggttcctgggtcaggtctttccccctccttgctggcccagagcccaagaggaagcagaagacggctggcctaagccttttggtggccccattcccttcagcaatccatctaggtcatcttcctgtcgatgccagcatccctgggctaccttgtttagggttgttcaatgaatagcagggactcatcacctcagcagaggttggtcctaggccctcagccccctgattcacttatttctgccataagcactttttgagcatctactctgtgtcagtcactattccaggtcctcaggatatagccgtgacctaaacacagaaatctaccctggcggagctgatcttctagttgtggcggtgaggagatagacagtaaagactaaagaaaccaataagtaggtggtgtcatttctgaggaggtaatgagtgctggggggataactggcaaggtgagggagttcgggatggttgagattttaaatagggttattcacagaggcctcatgaaaaaggtgacctttgagcaatggcccaaagggagaggggagtgagccatttcgaaatttaggggaagggtgttccaggtaccaggaacagccagtgtaaaggccccgaggtgggactctactgggtgtggttgcagaacagcaactaggaatgatggcgggggggtgtgggggtgggggggggccgtgggcaagaggcaataggggcaaatgaggtaaagaaacacctgtgggccacattgaggactggggcgtgtatttggggtgatgaaaaatgtacattcttgagtagaggagaaatgtgacttggcttgtaaaagtctagattggaccctaggggtcctaacctgatcaaaccgttctggcagccctgagaagagctggtgtacactgagacccccccgccctccacacaatcccacccagtggttgggtctgggcaggacaccctgacacacgctcccctccccccccccacctgggtagatgaatgggatgatgcagtggttgtcatgacgatgagtgctagagaagtcaggaagagggtccctgtggccacag

SEQ ID NO: 43706 - DNA, 2300 bp, Homo sapien
gtggtgtcatttctgaggaggtaatgagtgctggggggataactggcaaggtgagggagttcgggatggttgagattttaaatagggttattcacagaggcctcatgaaaaaggtgacctttgagcaatggcccaaagggagaggggagtgagccatttcgaaatttaggggaagggtgttccaggtaccaggaacagccagtgtaaaggccccgaggtgggactctactgggtgtggttgcagaacagcaactaggaatgatggcgggggggtgtgggggtgggggggggccgtgggcaagaggcaataggggcaaatgaggtaaagaaacacctgtgggccacattgaggactggggcgtgtatttggggtgatgaaaaatgtacattcttgagtagaggagaaatgtgacttggcttgtaaaagtctagattggaccctaggggtcctaacctgatcaaaccgttctggcagccctgagaagagctggtgtacactgagacccccccgccctccacacaatcccacccagtggttgggtctgggcaggacaccctgacacacgctcccctccccccccccacctgggtagatgaatgggatgatgcagtggttgtcatgacgatgagtgctagagaagtcaggaagagggtccctgtggccacagggaatagtctgccttggcctttgagggtggtgctaggggaactatgccactctatggccgtgctcgagaccatgtcacccatccttcaattctgggcacacgccctggccgacccatggctgggcccatcactgcagctgtacctgagaagatctgcaatggagccttctgctcctgcagtggggcttttcccctagatcccaacaatccatcgttagggcccttgccctcaatcagccacctaaatctgagaactcaggtgggctacgtaggagcagggtcccagtggggctggctgtgtgggtgggcaggtactgacaaagatccccatccatgctgggtttccagaactcctgagtggctctggggtccatagtggttgagtgagcactgacaagttcatgtcagtgccccctgctaggctgtgggctttagggaacccatggtgatcaagcaaatgctaataagagacccatttccatccttgtcccttgctcagatcgccatggatcggatgaagaagatcaaacggcagctgtcaatgacactccgaggtggccgaggcatagacaagaccaatggtgcccctgagcagataggcctggatgagagtggtggtggtggcggcagtgaccctggagaggcccccacacgtgctgctcctggggaacttcgttctgcacggggcccactcagctctgcaccaggtgggtccactggctatcccctctcccatatggccccaggctgcttcccaggtgttgcctcctggtcacattcctcattttcctctaaattttctgccctttctctgccccccatgtgctctcttctcccccttccctcccatcttctctcaacaccgtctgtctatctgtccatctgcgctcctcttcttgcctttctgcccaggccccgtggtgggggacagaaggtgccttgcctgtcacagctgccccaaggctccctctgcccttctgccctctatgatggcctcctcagtcctctggtacctgcctgccctgggcctgccttcccaggacccttggcttcccctgccaccacctagctgccggctctgagctcagcttgcccttggaaggaagggttccactaggtgacttttgcttccccaccccccagttcaacctgccctagatgtacctgagcttccctgggctcaggtacatcaccctctccccgagggactccaggtttcctgtgggggccacgtgcacacatgtgtgatgatggaatatgtttcgtgggggatggggtgtcctgtggttcctgaccccacctggcctgccctacccctctccctgccaccagagattgtgcacgaggacttgaagatggggtctgatggggagagtgaccaggcttcagccacgtcctcggatgaggtgcagtctccagtgagagtgcgtatgcgcaaccatcccccacgcaagatctccactgaggtgcttgaccccgtctggatggtggaggaactggaaaagggggttggacctggggaggtggagctcatgatcctgtttctctcttgccttacctgctaggacatcaacaagcgcctatcactaccagctgacatccggctgcctgagggctacctggagaagctga

SEQ ID NO: 43707 - DNA, 2300 bp, Homo sapien
tttgttttttgagacagagtctctgtcgcccaggctggaatgtggcggcacaatcttggctcactgcaacctttgcctcctgggttcaagcgattttcctgcctcagcctcctgagtagctgggattacaggcgtgcacaaccacgcccacctaattttttatttttagtaaagatggggtttcaccatattgaccaggttagtctcgaactcctgacctcaagtgatccacccacctcggcttcccaaagtgctgtgattacaggtgtgagccaccaagcccagcctctaccgtgtctttctaagcactttagtgatgtttcagcttgcagcctcatggtgccatgatgactgccatgtccccagagatggaaaagcaagcagggaagacagaacaccttccttacctgtctgtgttcttttaacggctggaacttccacaagctcctcagcagacttcctgtgccatttcttggctagaatcagatgacatggccacttctggcagcaagggaggatgggaaaaggagggccttgcaaagggggacaggattgccaggctggatttaaaaggtctagaactcacccaactgctctgggaagtggtagggtcactggtgtgggcagaggttggcctctggaaggtggaaaaaaaaaaacggtctagggctgggaaaggaggtctcttggatttacctggctgcccagataaatggggagggggagtctgcagaggggcaatggggagaatcaattcagagaatctgacaagattcaactgggcttgaagagcagctatctgccatgtgtctgactcaactcaaatgccactttctttggggacccttaagtgaaaggcctgctccctttcctcacccagagcttacacaactgagtttgtgacccctcatctatgccaggtctgggctgggggctggaatcacagtaataaagacacaatccctgccccgcagagattaactgaaaataggtaaattatgaaattgtgagggggaagggaggttcgaaattaaagtcatcatcaacggggctggcagccccagcagaggaaagaatagcatagcctagagcagtggttctcaaccagagacatttttcccccaaaggacatttggtaatgtctggagatacttggttgtcctgaggggtactacttggtatctagtaggtagaggccagggatgctgctacatatcctgcaatgcccacaacaaagaaatgacagtgctgaggttgagagaccctggcctagtccaagggttctcaaactttgggtctcgggattcctttatgttcttaaaagtttaagatattcaaaagagtttttgcttatgtcatatagcctctggattcagaagcctctggataatcacactgtacacccctgagagaatgagagtgaaaaagtattgtgaaaatagttttcattttgtgaaaccccaagaggatttttggaccggtagacaggctgggaccactgggaccacacggttggagaatgtttggcctggtgtttaaggtcacagctctgaaaccagatttctcaagtctaaactgcagctccaccactaattagctgagggacgtttctggtactcagcgtccccattgttacccatgggtgacaaggacagtacctgctgcctgaggctactattttagtccaataaagcacttaaactgggcggacagctagtttagttatgattgctatgactccaacaaacatagggcctggggctaacttgtcttcaacaccttgtctagtgaataaatctagttcaggaagagaaacaacagcccgcaggcctcggtgggtctctggaggtggaaacctcttttgcattgggttttgatggtacaatgaagggcattctgatcaggctaacaaaaacactgctcccagggtaggagtcctagcccacctcgggaacctcagcctccactttccatgccacctgtgccctaagtctacagggcgttaggaccccacaaggcacttttgtctttcttggttcccactgaagattttaccccacctagcccttcgacgcgtctgtgcacggggccatttccaatatggcagtagccccgcgactgtttggggggctctgcttccgtttccgggaccagaatccggaagtggctgttgaggggcgtcttccaatctcgcacagctgcgttggctgtagaagagaacggacggcgatggcgacggtcgcagcaaatccagctgctgctgcggcggctgtggcggcggcagcggcggtgactgagga

SEQ ID NO: 43708 - DNA, 2300 bp, Homo sapien
gttttgttttgttttgtttttggggtggagtcttgctctgtcacccaggctgaagtgcagtggcgtgatctcggctcactgcagtctctgcctcccgagttcaagcaattttcctgcctcagcctcctgagtagctgggattacaggtgtgtgccaccatgtccagctaatttttgtgtttttagtagacacggggtttcaccatcgtcttgaactcctgacctgctgacctcaggtgatcagcctgccttggcctaccaaagtgctgggattacaggcgtgagccgcctcctctggcctcttttttttttctttaatagaaacaaagtgtcactctgtcatccaggctggagtgtagtggagtgatctcaatgcactgcaactctgtgtgtgtgtttttgtttgtttgtttgttttttaaggatactgggttttgccatgttgtccaggttagttttgaacacctgggctcaagggatcctcttgctttggcctcccaaagtgttgggattaaagccgtgagccactgcacctggcctgattatttatttcttttctcttcttttctcctttcttccctccttccttccttccttccttccatccttccttcctctctttctttctttctttctttctttctttctttctttctttctttctttctttctttctttctctctttctctctttctttttctttctcttttagagacaaagtcttgctctgtcacccaggctggagtgcagtggcgccatcagaggtcactgcagcctcaacctctcaggcttcttaagctatccttctgcttcagcttccttagtagctggcactacaggtgtggaccaccacactcggattattttatttcttgtaaagacagcgtctcactttgttgccaaggctggtttcgaactcctggactcaagcaaccctcctgtcttggcctcccaaagttctgagattacaggcatgagccactgtgcccagcccactctatttcatcttctcttgtgtgagctagagcccacaaaacaattttgggttatagcagacagtactaattttgtggcaatagcttcatcattttactttttagcatggtgtttcagagttatgtttcataattgatttttgtggcacttaagttatttactttttccatgattttagtttgagcttatattagtaatggctgctgaattgcgttggatgcttttttggtgtaagttaacagcagagtgtttccctctgtaatttgttgatgtaatacataacattaggcctggtgcagtggctcacacctgtaatcccagcactttgggaggccaaggcgggaggatcacttgaggtcaggagttcgagaccagcctgaccaacatagtgaaaacccgtctctactaaaaatacaaacattagctgggcgtggtggcgggcgcctgtaatcccagccactagggaggctgaggcaggagaatcccttgaacctgggaggcggaggttgctgtgagctgagatcgcaccattccactgcagcctgggtgacaagagtgaaactccatctcaaaaaaaaaaaaaaaaaaaagaaaaaatacataacattattaagattgaaccatttttttctggaaagaagaggctaaaagcttcccagtaaaagaatttaagagggatatttcatctaagagtggaaaaaaacaaaagacggcagaagaaaggaccagccgatttcctttcatttagattatcagctttccaggtttcctgccctcacagtcacccaccaggtccccttgaacctgcccaccccatgggccttaagcacccttaagcactgccccagttctacttctcctaaacccagatctgccttgaacttgaactgaggtgtaggctggctgagtagcgagtgaagcacctggtagagccactcaagaagggaccccaagctcattaatttggccccaaatttgatcattttgtaatccaccttgactcatgctctggggatgctgaacattgtggcgtgaatgtgggatgacactgatgatatggatactgtccttttaggatttcttggtgtctctgtggagccattgagccttaccccttactggaggctgcaggaccctctacacacagacagctgtccagcacggaaggtgggctgaggcccagggtgaacatgccagctaatgggacatcaccccagagattccctgccctgattccaggagaacctggcagatcttttgaggtaaggaggaggatcctatttttttctatatgttctttattt

SEQ ID NO: 43709 - DNA, 2300 bp, Homo sapien
gacatatctgatcagaggctacatttcactagttacatattacacatacaatttttctttcttttttttttttgagatgaagtcttgctctatcacccaggctggagtgcagtggcccgagctcagctcactgcaatctccacttcccaagttcaagcgattctcctgcctcaacctcccgagtagctgggattacaagcgcccaacaccatgcccggcaatttttttttttttttttagttgagataccacgcctggctatttttttttttatttttagtagagatgggtgctgggattactgtgcccagcccatataaaatttttctaattgcacatttaaaaaaacataaaatgcaaaagacaaaaagagtttagggaaaaatactgcaatgtaactgacagatggttaatatccttaatggacaaagatgttaatatctctaatgtaatatccctaatgtacagtgtaactgacagactgttaatatccctaatgtacaatgtaatttgtacactgtttacaaattgatacgaaaaggaaaaatcaccctaaagaaaactggacaaaggatatgaacatttgcaaaagagaaaagccaaatggccaatagaccaaaacaatcctcaattgcacaaagtagtcagaaaaatacaaaattaaagacagcatcaacatccagcgctggaggggatttgccttaatgaacttaatgattttgctggtaggactaggaaactttataatcttttgggggaaggaatttggctatatctattcagtaatgaaacctgcagttaataataaaacttcaaaacataggaagcaaaaattgaatagcacaaggaaaacctgccagtacagtctctctctctcctctctctctttctccctgccacatcacccccagttgacaagctgaagggaattatcaggaaacacacattttaaaaggcccaacgcacaagcttgaaccaatagagccgcagagtacgataaatccaacaactagaagatacagtgttttcaatcaaggcacaaaaccatttttgaaagctggcctcgtacttgagccttaaggcaagtttcatcaaatttcaaactcaacgttcttgggccacaaggcaaatgggcttagaaatcactaacacagggattaacttcttgttcgtttgcggaaatgcaaaatggtgttaagacctgtaacattttctgcagtccctctaaattccttctttgaataatcgattcctagaacaggacgcgacggaccaagctgggtcaaactgccgacagctccattgggcagcatgtccacccctgatgaccaaatcccaccaaacgtgcagctggcactcggccgcctttgtttccttcccctagaataaaactccgctgctttcccacgttcctggagcagcagccggaataaagcgcccatggccttgccctttgagtctcggaggatgtttgccactccaacaatggacttttaaataattcaggggtcaaaaggcgtgtgtgggggggggagaaaagttacaaatcagcacttgaaaccgaacacaaacaaaaatcaaacaaatccgaactaatataacaaatcaaaactttgatctttagaagaaaacttcaaccttaatgcttccaggaggaaagcagaaaggataatgactgaattgtgaaaacgagccaaaatgttccaccactgatgtcacacacacctatgactccctgcacagatccacggtcccgggcgctgaatccccgcaaccctctgcgcccacagaggttaaactctcgctgctggcgacttccgcttcctggcctaaatctgacacgcacgactccccccgcggcaactgcacaggttcggtgacagccgagacgccgagtgtttcccgcagccggccggggtccaggtcggaaatgtagccagtggggccgccaggtgggctccagacgcggtgggcgcggggtcccggccgccgcgggagaggggtcgccgcgtcccacagagcagtgcggcggcaggggcgggggcgggtgcgtctcgcgacctgctcctgggggtgggggctgggcgatatttaaagaggcggaggctccccggtagggacggcctgaggccgagggcaccctgagggcggaagaggcaaagcgcctcgcccgccggggcctcggaggtgactaactcctagaggctgcggcggaggggagaagcctggtggtacattccatggcccagtgcctcggccactggaaaatcccacaggggtatatcgagtaggggaccgcg

SEQ ID NO: 43710 - DNA, 2300 bp, Homo sapien
gttggggccaggtgtggtggctcaagcctgtaatcccagcactttgggaggccgaggtgggcagatcacttgaggtcaggagtttcagagcagcctggccaacatagtgaaatcccgtctctactaaaaatataaaaattagccaggcatggtcgtgggcgcctgtagtcccagctactcaggaggctgaggcaggagaatcacttgaacccaggaggcggaggttgcagtgagccaagatcttgccactgtactccagcctgggtgacagagcaaggctctgtctcaaaaaaaaaaaaaaaaaaaaaaaagaaagaaaagaaaagaaaagaaaaggggagttgggaaatggaaattatatgggaggccagtaggcagaacttctgtcttccttcttatagacagagaaagccatgtgataaatacagattgaaatatgttgaggccccccctcacctatgaccttcctctgatctttcccattacattgccaaaggatgctaaatctccaaacaggagaatgcagtcacttgaaacacaacaggccattcatggtgttggggaaataattaaaaagagaatctcgtgccaacccaatgaatcctctccacaaagtagacaagaatgaaaagtttttttttgttttttgttttattgagacagggtcactctgtcacccaggctggagtgcaagtggcaagtggcgtgatctcagctcactgcaatctctgtctcctgggttcaagtgattctcctgcctcagcattctaggtagctgggattacaggcgcgcgccaccgcgcccagctgactttttttttttgcatttttagtaaagacggggttttgccatgttggccaggctggtctcgaactcctggcctcaagtgatccgcccgccttggcctcccaaagtgctgggattacaggcatcagtcaccgcacccggcaggaatggaaagttttataactgaataagcattacaccagactgtgatgcacatcacaaacaatctgctaaagaggtttcaaagacagaaagaaatctcatccgtttatgtagcaggcagatacagcccattacaaacatattctcaaacaataacttgtgctcaagaaacttgacggcaccatttggtacacatacttcatcccaaattcacctggtaattagggtggctatctgtgttagttaattgcctttatccaaaggaaaacgaaaactcatatctctatgacaagcaggtaataacttgaagccaggcacgcagatcaaattcccacgaagacagggaaagacaggggtgctattttcattgatgtttacatttcaaagagatggctacaaggctcttaagaaaaacattccggggatgtaaaactggcaagagatttagcttttaaaaggacttacatacatctcaaagggacagagaaaattttacagttacaagttttctaaaggaaatgctctaagagagacgtctttctcttttgacaccagggaaaattcgatctttaaaaatttgtgtttaccccacaatacctccacacattgactggcatcgtgctcccttccaggtccgcacttccctcttcacctggccacctgtgactagtttttcatagtcctaatcaaccccattcctaaaggaagcctcccagacagcaggccgcccctcctaggcccagtcccccagcccccgccacaccagagacccgctgtcctcaaaggctatgaactacagtctcctagagctggtgaacatcgccgatcattggttctgattccaacccatttcaaagatggtaaaaactgagacacgggaaaatcataaaagggtgcttagggcactggcccaaaaagggtacttaaggatttctccgcccagatgccaaagccctaaggtcagccccaaatgacctgtgttctgctttatacgtctatgccactgttggggttaaagccctaggcacgcaggtcttgcctcaactgcgcctgcgcgagtcaggacgagcgcttgccccagatcttgacgtttcaggcggcccctcctaatccggaacacgactcacattccgttggtcttgccttgacagacgtgaccctgacccaataagggtggaaggctgagtcccgcagagccaataacgagagtccgagaggcgacggaggcggactctgtgaggaaacaagaagagaggcccaagatggagacggcggcggctgtagcggcgtgacaggtgagggcgggcccgggagggctcggtttctggagcggctgccgggcacgggcagg

SEQ ID NO: 43711 - DNA, 2300 bp, Homo sapien
gggtttcaccatgttgcccagactggtcttgaactcctgagctcaagcgatctgcctgcctcagcctcccaaagtgctgggattacaggtgtgagccaccatgcccggccaagtgctttcttaaaaaatagatttaggctgggtgccgtagctcacgcatgtaatcgcagcactttgggaggctgaggtgggcggatcacccgaggtcaggagtttgagaccagcctggccaacatggtgaaaccccgtctctactaaaaatacaaaaattagccaggcgtggtggcgtgtgcctgtaaccccagctactgaggaggctgaggcaggagaattgcttgaacccaggaggtggaggttgcagtgagccaagatcttgccattgcactccagcctgggaaacaagatcgaaactctgtctaaaaaaaaaaaaaagatttagaaggccgggtgtggtggctcacgcctgtaatcccaacactttgggaggtcgaggcaggtggatcacctgaagtcaggagttcgagatctgaccaatatggtgaaacccccgtctctactaaaactacaaaaattagctgggggtggtggtggtgtggctgtaatcccagctactcaggaggctgagacaggagaatctcttgaaccccggaggcggaggttgcagtgagctgagatcgcgccactgcactccagcctaggtgacagagcaagactcttgtcaaaaaaaaaaaatagatttagagggtacagctgcagttttgtgacatggatatattacatagtggtgaagtctgggcttttagtgtccccatcaaccaaatagtgtacattgtacccattaggcaatttctcatccctcacattcctcccacccagaatagtgctggatacgcagtaagcactccataagggctgctggtagtttttgttgtgttcttgttattgggctatcatccctgagttaatcaaacttaattagcaagggagtatggtgagtgaatgagataatttatacaaacactttagcacatagtacacagaaagtgctcaataagtggctgccatcatcactacaattattattattgatctatcctcctcgaattaaggatgttaatcagaaccccagggaaggttcctgcattgtcagaaagctggtgggcaaggattgccccaccccaccccccaccaggggtacaggtccatggggagggggcagggcaggatggggtggggattagttttctactgacccactcacttgcttctttcaccatcattcatggccacccccttcccaatgctcattcattcacccgcaccattccctgcttgctaggacggtgccactcctgagttacaaccctggtgccaggtagcctctgtttgaatcccggccatgccctgtgatcttaggaaaattctacagttcctctacgccccatatttcctcatccgtaaaacgggaataagaaccggtacccatctcagagatttgttgtgagctttgagtgagataaactatgctgagtgcctggtatacagtaggtgctgtataaatgccggctatttgcctgtgttatttgagaccctggctttggctcctggccacctgagttccagtctcagttctgccatgtattgactctgtgatcctgggtaagtcacttaaccactccgtgcctcagtttccccattttgtattcctcccctttcacctgccttatctccctccactgctgctacttaatttgtttcctctctgccacccctcaccagcatgtcagacatacaaaacaagggatttttgtgtgcttggcacacagtagatgcacaataaatgttgaagggctgaactaatttgggtttgagtcatagggagcttgggggatgtgggtgattggatagattctggagactttaggggactgggccgggggaaatgcggcctctaagctctccgctgaggcggcttggaaggaatagtgactgacgtggaggtgggggaggtggctggcccgggcgaggcccagggagagggagaggaggcgggtgggagaggaggagggtgtatctcctttcgtcggcccgccccttggcttctgcactgatggtgggtggatgagtaatgcatccaggaagcctggaggcctgtggtttccgcacccgctgccacccccgcccctagcgtggacatttatcctctagcgctcaggccctgccgccatcgccgcagatccagcgcccagagagacaccagaggtaagcagggcccggggtggcccagcagggaccggagc

SEQ ID NO: 43712 - DNA, 2300 bp, Homo sapien
gagctgtcagtagctgccattcaaggtacattgtccctgaagaggaggcctgagcagaccaccacagtatccaactacacttatggtcagaaaagttttagaaacagtgatacaccctcatcatccccactcatcagtttatagatgaaaaatgtgcagggctgagagagattctctctcaacacttctgaggggatagtgtcagcgatggtgtgtgtgtgtgtgtgtgtgtgtgtgtgtgtgtcagagagagagcaaggaaaaagaagtagctgtacttggggtctcttgcatatgtcagtcaagtcaccagggtccatttgtgccgtgtgtgtgtgtgtgtgtgtgtgtgtgtgtgtgtgtctgtccaagaccctgattgtatgtgtgtcagtgaccagtagccctgaaagtgtctctccccctcatcccccttccatgataaacctgattgaggatgagcttccatccctggagcaagcagcctgttggctagaaatcttgagcctgggggaggaggccaccggaaaccaagcccagctggggacgggcccggggacaatgacatagcagttcgtgatgttcctactgctgctcccactccccctccctcctgttgctccctctcctcctcagctgcattcctccctgccccccatcattgccagctacactggcttctctagagccacccagcctgcaccactcaatccactcctccttatcggatgcagctgcccacctatggccattgtgtttctcacagcacacaaccacacatggtgaatgtgctcctccttgcgaaagggccagagagcagagagatgcttcaggccacacagccagacacaggcactgacatatacacaggcactaaaaaatacacaaaaacaggcacgcttcagagaaatgtagtttctttctctccttccttccttccttccccttccttccttccccttccttccttccttccttccttccttccttccttccttccttccttccttccttccttccttcctttctctttatttctttctcttttttgcctaggtcttgctctgttccccaagctggagtgcagtggtgcaatcacggctcactacagcctcgacctcctgggctcaagccattctcctgcctcagcctccccagtagctgggactacaggcatgcaccactatgcctggctagtttttgttttttgggttttttggagatggagtctcgctcttgttgcccaggctggagtgtaatagcaccattttggctcactgcaacttccgcctcctgggtccaagtgattctcctgcctcagcctcccaagtagctgggaatacaggcatgcaccactacacctggctaattttgtattttagtagagaaggggtttcaccatgttggtcaggctggtctcgaactcttgacctcaggtgatccacccgccttggcctctcaaagttgtgggattatagacgtgagccacagccctcggcttttgttttttttttttttttttcaattttttttgtagagatgggggtctctctatattgtccagggtggtctccaacccttggcctgaagcaatcctcctacctccagcctcccaaagtgctgagattacaggcgtaagccaccgtacctggccagataggtgttttctaaggttctttgctgtttaccggtctccatgcaatttcaaagtatgttctaatttacatagtgctgctaattttgtgaagtttttttaaaaaatttacaatgacaatgtgatgagcagactaaattttgggaaatacctgctctctgcagtgtaaggccacattttacagtttgcaatgtcctttaatatttttgcaactccatgaggattacaacagacattattcacaaagcactcttgattttttcaaaatatttcaataattataaggcactttgtggtttctttagtagcattgaaggggcaaaagggtcaagggcctgtgttttgtcttcccttctgagatttcatcattgacagatgtgttgtttttcctctccagggcaaaatacttcaaagggaaaaagatccatggagaaattgacattaaagtagaacaggtaagttgggacatttggacctgggggtcagttgtccatactgcaaactgagtggccatttttgtgtgatgtaggtgaatcaccagtttttttctccttcccaggccgaattctctgatctcaaccttgtggcccatgccaatggtggattctctgtggatatggaagttcttcggaatggggtgaaggtc

SEQ ID NO: 43713 - DNA, 2300 bp, Homo sapien
gaggtgggactgaagctggctgggttggaggagggagtagaggatggtttgggaagtgtttgacttgggtactgtggaagcctaggggaggaggggatagaatctgagacctgggggtgaggggttcctgcagacagtggccaaaggcagccctcgagagagaaggagaggacattcctggcagaagttacaacacatgcaaaggtacagaggttgcccccttcctacccctctccttagaggtgggttagagatgtatcctttttacagatgaggaaaccaaatctcagaaagattaagtcactttcccaagtgtatggtggaggccccacttgaacccaggcactgtgtctccagaccccacactattactgccttgtttaaaccagccaatgatttaatgaataaaggatgaacaaatgaataagtggatgagtcacctgaaaattctgcaggcaaaagagactccatatctacttacttcttgcctatcttctgccacctctcctagtccaccatcactgctcactatggtcaaggtcctacccaatctggcccctgctaccacaacccccttcagcttgttccagccacattggcactggatgtttcctcttcctggcacattcttaaaaaaatgtgttgatcataaagtgaacatgaccctttgggaattaactggagttcttgtattccctcatctgtaaaatagacattatattatccaccccactggattgttgtgagggttggatgaaatgatgcatgtaaacagcttagttaagagttgggtacaatcagtgaacaaatgattatgaattagtgcttttattgtagtcagaatcataaagatttgacaggttcccatatcccacctctgcttggactacctcatttgctcatatgcaaacattatttggtacctactgtgtgtgcaccatgggatgggcctgcctctgtggaaagttcttgggtgcagggggagacagccatgggcactgatgacatcaggtagttatcgtgagttttggcggtgtccagagcaaagggatggtggcgtatataccaagtgtgttctggtgtgggggtggacacgcaccagggctagggctgcagagaatgtctgtgttgcagatctaggtttctccatgatcatcggtgggaatgtgttttgtctgcaagtgtatgctcatatgagtttccctgggtctctgtgtgtcagtgtgttacctgtgtgtgtgggggtatgggtgtatgcatgcatgtatgtaacatgcccatgtgtgttactctggacttgtatgtctgtatgtatacctagattggcgtgtgttctgtctgtacatgccctcgtatgtttcctcacttttgtgtgtgtttatatgtgtgtcatttcttgtgtgcctccaggccccccttgccaccttgggcaagggtgtgtacaccacccaagtgtccacctccgcttgtctgatgctgtctgtgacgcccccgctctctgcctagctgagcctgtgtggatgtgggagactaatctccccgcgggcactgcgtgtgacctcacccccctctgtgagggggttatttctctactttcgtgtctctgagtgtgcttccagtgcccccctccccccaaaaaatgccttctgagttgaatatcaacactacaaaccgagtatctgcagagggccctgcgtatgagtgcaagtgggttttaggaccaggatgaggcggggtgggggtgcctacctgacgaccgaccccgacccactggacaagcacccaacccccattccccaaattgcgcatcccctatcagagagggggaggggaaacaggatgcggcgaggcgcgtgcgcactgccagcttcagcaccgcggacagtgccttcgcccccgcctggcggcgcgcgccaccgccgcctcagcactgaaggcgcgctgacgtcactcgccggtcccccgcaaactccccttcccggccaccttggtcgcgtccgcgccgccgccggcccagccggaccgcaccacgcgaggcgcgagataggggggcacgggcgcgaccatctgcgctgcggcgccggcgactcagcgctgcctcagtctgcggtgggcagcggaggagtcgtgtcgtgcctgagagcgcagctgtgctcctgggcaccgcgcagtccgcccccgcggctcctggccagaccacccctaggaccccctgccccaagtcgcagccatgaactacctgcggcgccgcctgtcggacagcaactttatggccaatctgccaaatgggtacatgacag

SEQ ID NO: 43714 - DNA, 2300 bp, Homo sapien
agagtgctgacagtcctcttccacagggaatcctatgagtatttatacagtttagaaacaaaggaaatattgttaatattattaccagggcaacaggtggttaaataaagaagccagccagaatttcaggtttctttctttttttttttttttttttttgggacagagtctcactctgtcgcccaggctggagtgcagtggcacgatctcagctcactagagcctctgcctcccgagttcaagcgattctcctgcctcagcctcccaagtagctgggattacaggcatccgccaccacgcctggctaatttttgtatttttagtagagacggcgtttcaccatgttgaccaggctggtctcgaactcctgacgtcaggtgatccacctgcctcaatctcccaaagtgttgggattacaggcgtgagccaccatgcctggccagtttcaggtctcttggagagtgttttcacaggataacacagcaatgattgtcttgaagtcgtagaatcttaataagactcctttgttcaaagcacattttcaaggatagccttatgttatcagagaacagagtatgtctgtaatggatacagatattaacacatactttactgcccataaaacaagtgttcctgaagaacttctgttttaacagctgaccaaattattacatttgaatttgcagaattcctctgcctccctgagagcagaggaaattaggcattgccttcctatctttcttgtgcttctttttgttaattaaaagcaaaataaaaattttaaagtgggccctggagtttcattagggtttataaaaaaaaaataaaaaaataaaaaaaaaagaagggctggtgtgatggctcatgcctgtaatcccagcactttgggaggctgaggttgggagaaaatattgaagccaggagtttgagaccagcctgggcaacacaacgagaccccatctatacagaaaataaaaacattagttgtgtggtggtgtgtgcctgtagtcccagctacttggggacgctaaggtgggaaaatcacttgagcccaggagtttgaggctgcaatgagctatgatcagaccactgcactccagcccaggtgacagcaagactctgtctctttaaaacaaaacaaacaaaaaaacaggtttggaagctactgggctagagagtgacagggatgccagacaagggtatggggaaggcctctgtgaggaggggcaacatttgttatccatcttctcgagggccaggatttttgtctgtcctattctctgctctaatgctaagaaccgcatctggcatccagtaggtgctcaataaatgttgaataaatttatcaaacacagagcacctactatatgccaggcactgttctaaagactttccaaaagcttaactcctggccgggcacggtgactcacgcctgtaatcctagcactttgggaggccaaggcaggtggataacctgaggtcaggagttcgagaccagcctggccaacatggtgaaaccctgtctccactaaaaatacaaaaattagctggacatggtggtacacggctgtaatcccagctactcaggaggctgaggcaggagaattggttgaaatcgggaggcagaggttgcagtgagccgagatcgtgacactgcacgccagcctgggcgacggagtgagactccatctcgacaaaacaaacaaaagcttaactcgcaatctttgcaacacaccctacctatgttgtaggtgctgtctgtgagcacattttacagaggggaaacaggctccagaaggggggtgttatctgcctgagggttctctgatggaatatggcccagcttattccctcctaatcaccccagaccctggtgttgtccccagctgggcccatggaacaatggatagaccccattcccctcctgaatccctccccaggctcctgccacttccctttctcacttcccttgtgctgacctccccgaccacaagctgaccacagggaacctctcaggaaaggagggccgaggttaagggagggtggaaggtggagcaactgactcgatgctccctccacccccacgagcaggaacatactgagcaccgcacactcacttcaccctggttcaacacccccacgaggttgaccccgtcattatgttagagattatgcattttccacatagggaaactgaggctcaggggtgttaagtgactcacccaaggtcacacggctaggaagttgctgcacgctcctatgctccatttcctctgggtgagaatttgtcctaggagctt

SEQ ID NO: 43715 - DNA, 2300 bp, Homo sapien
aaccctccagaacaatattagtaatgaggctatctcactctgccctctgggaacactaggtcatctctgagacccaccagacctgaaaaaccccaaacatgctctgtgacccagcaaagccagccttgatataggccccctcccaatatttataccagtatttttaatattcttgtctaattgctgttagttacttcattttcttaccattttagcttcaacctccacagtggtattaataatgaggcctcctcaccctctcctctgcagtgaccttgccctgttccacttctgtatcattagcttcaaataatcctctgtattaataattcatcaccccatccatctacattaatttactttcttccaacatttatatcagttacttcattttcttgtcttattgcatttgctagtctccaaaactgtgtcctgacagtcacccacaaggcctggccctgtgaacctctggttcttggagccaggaagaagacctgctcccacacctactgcccttcatgggccccattgtgaagaggagctacagtgtggagggagtgggaaaatcagatagacggacctggagagtgacaaagggaggcttggaaaggggtggatgggaaggggcttaaagaaaaaattattgtggagagaagagagaaaggggaggaactggggagggatatagataaggggaatctggcgggagaggaaagaggtagaaaccaatgggagaggaaatgggctgagagagaaacttacagaggagggacgggaaagccggagaggagcaagtgggaagaaagccactaggagaagagaaatgccactccacccccctcctcccccctgacaccctgcctccagcctgcccctttcctctaaggccctctgttcctctcctcccttcctagaacatcatccgcaaggtgagcggccagaagttcgtctacaagtttgtgtcctaccctgaggtcgcagggtgctccactgaggactgcccgccccagccagaggtgtctgttacctccaccatgccaaatgtggcccctgctgctatacatgccgccccaggggacactgtctctggaaagccaggcacacccaagggtgcaggaatggcaggcccaggcggtttggcacgcagcagccggaacgagtacatgcgctcgggcctctattccaccttcaccatccagtctctgcagccgcagccaccccctcatcctcggcctgctgtggtgctccccagtgcagctcctgcaggggcagcagcgcccccctcggggagcaggagcaccagtccaagccccttggaggcctgtctggaggctgaagaggccggcttgcctctgcaggtaaggactggaatatagaaattcagtaagaggaggcagtaaagaggagggatgtgtaatccccggatgacgagggaggctggtagaagagacatagctgtcccgttaaaggagataatggtggaaggaagacatcctcttagaaggaggggtggggcagagagctacacaaatcctgagacagaaaggggagaatactgtgctacagttagtagctgccgaacatgtaggtgcctggaatatgtttaatgcactggttctcgcactctagtgctcatcagaatcacctgtaggtcttgttaaaccacagattgccaggcacacccccagagtttctgaatttgtggggctggggaggggcccaataatttgcatttttaacttgttaccaaatgaggcagatattgctggtccagaggaaggtaaatttttgagaaccactgttttaatgaatgaggatggtatccctcagattcctacccgcttcaggttgtctcaccccaagtcccctgtcccataggaggacctgccccagaggaagccctacttccttgacgaagtcctatgtcctgttggaggacttgctctgatgtgcagtcatgccctgagtaccaagtgccaccttcccggggaaatcactgggtggcccacaggagaatcctgtggtcccaacaatccttacacaccctctttgtgcctgctcctctaccaggtcatcctgaccccgcccgaggccccaaacctgaaatcggaagagcttaatgtggagccgggtttgggccgggctttgcccccagaagtgaaagtagaagggcccaaggaagagttggaagttgcgggggagagagggtttgtgccagaaaccaccaaggccgagccagaagtccctccacaggagggcgtgccagcccggctgcccgcggttgttatggacaccgcagg

SEQ ID NO: 43716 - DNA, 2300 bp, Homo sapien
gtaatcggctgtgttcatatttctgcagcaaaatgtatgaacactcgcaataagtgagattcaataaagaccagaaagggccttgtttcatttcaaatcaggttttgccaccaaaagagttaaaagaagctttctgcccttagagcattttggatgttggaatggcagataagggactatgaacaaatcagaaactaatatttagagcttatcatacacctcaggcatataatatttaatctgtacaatatctctgtgaactaggtattgttatccccattttactaatgggcatatcattatccctgttttacacatgagaaaattgaggtacaaagaggttaaagaatatcagccaagcgtggtgcctcatgcctgtaatcctagcactttaggaggccagggagagaggattgcttgagcccaggagttcaagaacagcctgggcaacatagtgagaccccatttcttaaaaaaagaaaaagaatatgcccagggtcacacagctaataagtggcagaaccaggattcaaacactggcaatctggccctagtgcctgggcagttgtccagcaggccatattgcctctctgcttagaagagtgcctgatgtgtattaagctctcaatagatgttaattattgctgtcatcaagaaagagaatattcagggccgagcacggtatctcacacctgtaatcctagcactttgggaagccaaggtgggaggtgggtggatcacttgaggtcaggagttcaagaccagtctggccaacatggtgaaaccatgtctctactaaaaatacaaaaattagccgggcgtggtcgtgggtacctgtaatcccagctatgcgggaggctgaggcatgagaatcgcttgaacctgggaggcagaggttgcagtgagtcaagattgtgccactatactgcgctccagcctgggcaacagagagagactccatctcaaaaaaaaagaaaaaaaaaaaaagaacgagaacattcagggacagtaacaggacagagagatcaggcattcattcagttttaggacggcttcataaaggaaaggacctttgggctgggacttgaaagataagaaagactgctaggcgaaagaaggaagccccacgtggagtgagcagcctttgcaagggtctggcaaaaaaaaaacctcctgaaaaacttgacattgatatggtagaagatacagataatattcaaatgaggaggatggaactagttttctattcttgctgtaacaaataatcacaaatttagctgcttaaaacaacacatttgttatcttacagttctgtaggtcagaagtcccacactggtctcagctgaaatcaaggtattggcagggttgcgttccttctggaggctctaggggaaaatccatttcctgctcattcaagttgttggcagaatccaattccttgagattgtaggactgaagtccctgtttccttactgtctgtcagctgacagccattcccagctttaagaggctgcccacagtccttgattctgagcctccttcctccatcttcaaagccaacaatggcaggttgagtccctctcacattttgaatctcccctgcctcttctgtcatcacatctctgagctacctttctttctccatcatctgcttttcagagctcatatgattagattgaatttcatcaaataatccagaaataatctccctgtcttagggtttgtaaccttaatttcatctgcaaagttcctttctgctatgtagtgtaaataacatacaggttccgaggattaggatgcggagcagggttggcatcatttggcctaccacagtctgccctctgacccccacagattcacatttgtttcacattcaaaatacattcacaccatcctaagatacccatgagttgtatcccatcacagggagcatcccaagcaagactggggagctagaagttagtctgggaaggtttagggaatgatggtagggtttgaagacagagatggagaaaagatgacaaaaaaaggaatcctcctcccgctgacctctgcccctcctatgtccacagcctctcaactcagctgtttgctctccaggtacccctgggatggcgtgagcactcccccagcgatggacccatctgtgacgctgtggcagtttctgctgcagctgctgagagagcaaggcaatggccacatcatctcctggacttcacgggatggtggtgaattcaagctggtggatgcagaggaggtggcccggctgtgggggctacgcaagaacaagaccaacatga

SEQ ID NO: 43717 - DNA, 2300 bp, Homo sapien
ttcacttattcttctccagccagagtggcctctttgctgcacctcaaacatgccaggcacactcccacctcagtgcctttgtgtttgctgccccttgtgtgtggaacacatcctccatatagccacactactcaaaattcactgtctttaagtctttactcaaatgcttctccgtgaagccatccctgagccctctttaaaattgcagccccccactcctgtactccttattgtctctcatttttaatttttgttattgtagttagaaccatctgacacatagcttttattccattggttttttgttatgtctttctttacaagaatttgaagtccatcaggccgggagttttgtttgttgtgtttgctgctatctcccagtgcctaaaattgcctggcatacagtaggcatttaataatctttgaatcagtgaaaaccagatggtggcttggcatttccacataggaatgagccaggtggaaatcatccaggatataagtagatcttgaagtgataaggaagggtcatcataatcatgtggggcccattttgccctttcttgtttcttttctctaggctcagcaacagcctcaccaaggactccatgaatatcaaagcccatatccacatgttgctagaggtgagagcagctcaccccactaccagactctgtgtttagggtggtgacctgaagaaggaagagagcgaaagaagggaaggaccatctttccctctaaactggagtcaagggagggaggtcagagcaagcctgggggcgtaacccagacccagtctttgttcaatctcttctgtcctctttttcaggggcttagagaactacaaggcctgcagaatttcccagagaagcctcaccattgacttcttccccccatcctcagacattaaagagcctgaatgcctttgagtcacatggcccttctttttccccataaaccctgctagttgccacgggggcctgttcctagggcacaaagttactgagagacccagagatccagtctctctgtggaacctccaaaatgccccagcagtcctgcctccagcctgttgcctggcagtatttgccagttgaccttatgcactgccctctcttctgtcatcttggcaacctgggccccccacctcaccctttcttccattccttttcctagacgccaccctttgaattgccatagagaatgggccaattcatggtggaggtttgttcattcccacaacaatcaaagggccctaaggtttacgctttcacacacccaatcattccccaggtaccccaaattacacccaaaccctaactcagccctaccttgtcttagcccctgcttgtaagtgttccagcttccaatgggcacagacctggatcccgctctccctagtcgggcccctattctaggttgagtccagccaccgccaatcaatgcagagccaggttcctcccctttttaactctggccgcagttcaaccctgccctctgaaagcatttcgtttctgccactcaatgctctttcgtgtgcctgacagccatcctgccctcctacctccgctgtgttctaaattcgtctttacccagctctatggtcttgtctaaccgtagagctgccctgcccgcctacgcggagcccagtccgacccactcccgccggctgctacgcccatttctatacaagccctgcttccgctgagcagcatggcgtgcgacaccgcccccttggtgttttggcaggggtctagaagtccctcgtccgccaatcagagaaaaacagggccacccacccccgtccttgggggctgtcttccatcaatcccatgtaagccaatcagtgtgaggcagacccccgcccccccgacacaggccccgagccttttcagttgctcacagtccgtcagtccttgagccaatcggcgtggagcaccgtgaaggccgaacgcgcctcctcgggactccaggggccgtgagcgttccatcatttccccttacgccaatcacggcacagctctgtagggaagggcccgtcccccaacccctcgaggccttgcggccgattaatagcgctttggccaatcagcgagcggcgggacattgggctcctcctcctcgggcccacgtgagctgtagggaaacgcaggggcggcttctaggtgctgccgccgccaccgccaccaccacctccaccgccgcctcggaacccaggcctggggggcggtggggccgcgtatggagcccccgccccccggagctgccaacattgccaacgccaccgccacgctacacacagg

SEQ ID NO: 43718 - DNA, 2300 bp, Homo sapien
atctgaggccatccaaagaatggaatgctatgcagccatgtcaacaattatcctatggtctggaaagaaagcaaatgtgatcaaatattaacaacgagtgaatccaggccgggcatggtggctcacgcctgtaatcccagcaccctgggaggccgagttaggcgaactgattgagctcaggcattcgagaccagcctgggcaacatggtgaaaccccatttctacaaaaaattagctgggcatggtggctcatgcctgtagtcccagctatgcaggaggcttaggcgggaggattgcttgagcccggtggcagaggttgcagtgaaccgagatcacaccactgcattctagcctaggcaagagagcaagaccctgcctctaaaaaaattttaaaaattcaaaataaaacaactggcgaacttaagtgcagggtatatgagtgttcactgtcaacttttctgtaggtttgaaatgtaaaaataaagttggaaatacatttttaagtaaaaaattcttttttgtgaaatataagttaatagacttacacagactcatctccagcccatcagaattgtgttctctgttaaataaatatgtgtcttcttttctctcttttcacaggaaagtggtatagattaactagataatatttttctacctagtatctattccaatcacactcaatgtaatttaaactatatgtaacatgagatttacagaccaaaaaaactaatctcaatgttttcattttacaattatctcgttctaagggcaaagaaaagcttaacttggccaggtgtgctggctcatgcctataatctcggcattttgggaggccgaggtgggcaaatcacttaagcctaggagtttgagaccagcctgggcaacatagtgagactctgtctctacaaaaacttttttaaaaattagatgggcgtggtggtgtatgccagtagtcccaggtactccagaggctgaagcgggaggatcacttgagcctgggaggttgaggctgcaatgagtcatgatcataccactgcactccagcctaggggacacagaccctgtctaaaaaagaaaaaaaagaaagaaagagagagagagagaaagaaagagagagagagagaaaagaaaggaaggaaggaaggaaggaagggcttaacttgcttgggttttgagcatttgaaaaaaaaaacttgcttttacatatgaaacacaaattatctgggaagacttccttggtaggggtgggtgctctaggctctacagatggaaatagcatttggggattcatcccatggtctggattcttctccaggcaaaggcccattcttgctgggttataagttcttgtttgaaaatctaacctgaaaaataaattcactcagtcactctagtgcataagaataaattcacaaaaaccttaccatttaaataaaaacatgggaactatgcctaactacaagatggccaatcttcggcagaggacttcagccaccctctccatttgactatcaaacgaggtgattagacagagagtgttgtcaatttccacttgagcctcacttatgggttgcgagtgcagagctggagttatcaaagatgaattttagaaaacctgtctctgtttaaaaccttttaaatgcttatactcagtcccattgccaggagtgaaatccaaacctcccgtgtgaaaaatcaatatccaggccgacagatcacacgggatcttccttatagaccagaaccatagtcaatttttaggtccttttaaatattaaactcttcacttcctctacctccacctgtgcgtcgcgcctaccttagaacccgccaaatcccattaaatcccacccccaccagccacacacggtctccataggctccaggcgccgcttttgcagtcccccattggccggtttattgccagacggcccctgctcgcacgccctagtcttctttgatctcctcggattccgtgaagccctgcccttctcttctcccctttggcccgtcttcttccactcaggcccgcccctccccaactggctatttggttggccagcgcgcttgccacttacgtcattcacccgcgccacccggaagccgcggttcctaccaaccgttcttattgctggcggcctgaggtaaaggccgcgcttgggtgtccctgggtggtcgggtccccgagttgggaggggcggaaggctgaacctccagcttgagccggacaagccgattcccagcgttgagagggtagagatgaactgtgtgtgaggccaaactggatcggtcaacat

SEQ ID NO: 43719 - DNA, 2300 bp, Homo sapien
gaaaacgtttatcaaaattaggtaagccaagagcagggggtagggcaatgctaattttgaggcttcaaaagaagttaatgcctctgaaggccagagaatggtctctggagtggtatctggaaggagggcatatagtgggttggcaatagccacaaaattaggactccatggtggtcaatagccagctgcccctagaaatttacacagctgctttttcattttagggagaggaatggataaaactgactcgaggcattttggggtgaacttctgagtgccctgaggtatttcatgttctaagtaagtaacagttgtttgcactaactgaagtttagatctagaggctttatggcttcagtcagctagtgcctttaggagagtgagggagcgtctttaagggtatcctatttagtttggttacaaagcaaaagggcaaggtcatcaatatattgcacaagaatggagtcttgggtgaaggctacagaattcaagtaggctttaaggattagagagaattttgagagtgacttacaatatccctgaagcatgcgagtccatgttaattgcctccctctaaatgtaaatgcaaagagaaactgagtcagggtacaacggaaaggaaaagaaagctgagcagaggtcaactacatcaccaggaattgaggtagggatagtagctgcattggggataacagggtggcagggaattacaaatcttgtacaacttacaaatcttgtacaaatagatttgatttccattggaagcaaattttctttctttctgtactggtaagattggggtgttacagggtgaagtggtgaaaatgagtacaccttgctgcaaaagggagtctatgataggttcaattcctctctctgcatcttgtgagaaggggtactgagctactactgatgggaaatgtttgttcctttttcatgcaatgtgtaccggttctgtactcagtagtagtccaatctcacttgcacattaagcccagagacaagctgggacatcttttaagattgcatcctctttagaggaatttaaatcaaggggggtttccatgagagagcgtgttaactttaatactaaggttaatagaaagtttgaagtttgggctgaaggcagagacataaaaacgccttccttattacattgtatggcagcattaaacctacataataaatccctacctaaaaggtttgctaagtgaggagtcagaaactagaaaggcatggcaggtgttaagagggcaaaggatgttggggtgtcctgagatatgggcgatgaaataggttgcccagagttttcaatagcttgaatagaggcagaggtaacaggtagagataattcttctgagtgaatagtagaggaagtcctatcagtgtcaattaaatccggttcttaatcctctactttaagttcaatggtgggctttgaggtgcaactgaggatcagctgaccccatcaatcaatgtagtattgtcccaaaggaggggaataatgagccttctaaaggtgttggattctagggagagtttcttcctttttttttttttttttttttgtacaggacagcaatttttccaatgcctctgccttttgcaatatctgcaaatttcagaagacaaactagaaaaatcttgtggctgaccaaagatatgaaagaactttgagtcattcttagaggcacgcctttgtttctgtaacaattcaagccgcaagatgacttgattttagttctttttttccctttattttcttgcaagctattttcaaataattgagtgcctgcttccattataatgcttacagactgaccagcccaaccactatactagtttggatttgcctttttgtatcaagaagatttccggccagagcagaaactggaatatttctatgctctggagcttcaggatgtaatgctgcatgcctttgaaaaccttgtatacgtctcttgacaaaagccttggggtgctctccctcgttctgaatacataattcaacattagacaaatttaccttgggaggagagcctctaatattgtccctatcaggcccctgaatatcagcaactagttgggcctatctcctcatttgcaggagggccaggaaggggttccggccatctgttcactctgtggagggagttttccccaggaggccgtctggcctgtctaataactgcagtatgatcatgagagggaaatacaccccttagcagccagtcaaggtctctacgtatggggttacagatggccaatgatctctccaactattctctgaacttggtaag

SEQ ID NO: 43720 - DNA, 2300 bp, Homo sapien
tctttgttcatacacttgcttgccctcttgtcctctgccatggaataatgcagcaataaggccctcaccagatgctggcaccaagttggacttcccaatctccagaactatgagccaaataagcttattttctttataaattacccaatctgtgatattctgttacagtagcagaaaatggacaaagataccaactctctaaaaaaattaaaatgaaaatcggactataaaaatctgccttgctattcatcaggatggaagaacagacacatataaagccaaatgcaaaattcacaggaaacattatttcttctaaggacaggctgcagttgtaatgccataaagaacccctactttaagtgcctattgctttcttggtcaatgagaaactttgttctctacaatcatagactatcagaaactttgctgtttgaaatgatatcagtaagagggaaacatctgattctcatgggagattctaagtcacttccagacagagaagcaagattcaattttcaacccaggtgcaaagctttaggcaagagttatctggggacacaaaattctacatctaaattgtttccaaggaaacagcactctgggttcacttcacagtccagacctgacaattaccctttacatacagccctgctttcctttgagcccactaaaacactgcttcatttaatttcatctgaactccactattcctcaaaatcctataagaactctatcttttcctttgcttagtgagctgcccatggtgcccctggtgtgcagtctcccttattgattgctggatctgtcagactaaaaattagtttgaggctaattggactaggacacctctaaccttcgagattgttaaaccgagggccagaggggataagactggattgagagcccccagcaagtccacacttcagcctacaccaggtcctctcaaaatatttttttcacctgaggattcagaaaggctttcaggagggcacacaggcttctagctctgtcaggattctctggaggaggagatatttgaacttgattttgaaggatgaataggcattcttaggtgaaggactgcacgacttcttccccttctgctccagtgacatctcccagagggcaggggcatctccagaatttacacattggaggtgatatggagcagcaaactggttgaagggtagaagcagagccttgtattaaagctacatttccaaagtaagggcaccatgaccacatatattttacttcatgaggaaataaaaataataaagtttcctaaagatttttattgacatattgcattggactaaggacacattaaaaattattagtattggtactacgtagtccctttttagctggggtagatggagtgggagataaggtaaattgctgcagcattcaaacctcgcatccaagccccacaggcacagcaggaggggaacccagcactctgagttctccctttttcccacctcatggcatatcctaggagggcttgcataaccatgatttctcctcctcctcctccccttgtggtatgtcctaggagaagcctgtaaccagcctgacatctccccgcttctcatcctgtggtatctgccaggagatagccgcggccgcccctgattctttccaagaggcccttcagtttctcggagcggtatcacacagatccatagactacaggtccaaagaccccctcctccagttagcccgcccagagaaacgtccccacccgtgctccctgccaccagcgggacagctccacctgagtttagagcagacagctctaaactcacagcctgctctgtgagttcagaggtgtcctcatcctcaatacggatggacactcctccaacatggtgtatcccatggggaagcgcgacgtgggcgcggccatgttccccacctgaccacgccgccgaggggtaccgaacgtcccaaagcacccacttccgtaacttctccatgttgactcctggctaacagcagcttcaaaggtggttttgcgcacgcgcggaacctccgcttccctcattcatgtgaagtcccaaaccccgaaaaagggcggtgctaggggtagtgaccggaagcggctgcggttctcgccggttctcagccggggtttgatagttgtcaggaggattcgacgttcagtgcccagggatgtggaggtgatggggggccggggagggtgagtgctgggcgattctgtgtggccagtgatggaatcgtttatctaacttgagttggatgattcactcatcattttgcaggcttttctcttt

SEQ ID NO: 43721 - DNA, 2300 bp, Homo sapien
aatcacttgaggctgggaggtcaaggctgcagtaagccatggtcacaccactgcattccagcctgaggaacagagtgagagcctgtctcaaaaataaaaaataaaaccagacaaagatagtataaaaaagaaaactatagacaaatatttcccatgaacttagatgcaaaaatcctcaaaaaagcattagctaatcaattccttcaatatatccaaagaattatacatcacaaccaagtagggtttattccaggaatgtaagactagttcaatattcaaaaatcaatcagcataaccctccatactgacaagctaaaaaagaaaaaaaatcacaagatcatcaaaattcagagtgttgatgaaattcaacacccattcacgataaaaactacttttgaaattaaaaatagaggggaacttcctcaaccaaaaaagagggtccaaaaaaagaaagccctacagctaaaatcatacttaatggtaaaaggttgaatattttccccctaagactgaaaacaatgcaaagatgtccactctcttattcaacatagtactggaacttcttgccagtgtaataagggaagaaaagcagaggtataaagattggaaagaaagaaataaaactatccctgtttgtatatgacatgattgctcatgcagaaaatccaaggaatctgccaaaaaaggtgtaaaacctaataattgagctcagcaagattgcaggatacaagaccaacagacaaaactcaattgtattcctatatataagcaacaatttaaaagataacaccatttatgaccactccaaaacaattaaatacttaggtataaattgaataagacatgtacagaacttgggtgatgaaaattaaaatacaccatttatagaaattttaaaagatctaaataaatagagagacatactatgtatatggattggaagacttggcacagttaagacttaacttcttcccgagttggtatacaggtttaatgcaattcctatcaaaatccaagcaagatgctttgtagatagagacaagattttctaaaatgcatataggaaaggcaagggaaccagaggcattaaaacaattttgaaaaagaataaagtgagaggaatcactctatccaattcaagacagcaaggtagtactggcagagggatagacacatagacaatgaactgaatagcaaacccagaaagagcccacacacaagtatggccaacttatttttgacaatggtgaaagacaagtcaatggaggaaagatagtcttttcaacaaatggtgcttcagtctggacatccataagcaaattaatgcacctcgacctaagtctcatactttatacaaaaagtaactcacagaggatcacagacagcagtaaggagacacagacaaatcaccatcacagtggagaatttctctctcctcgaagtaatagaagaagcagacaaaaaaggatagattttctatgacacaattgacgactaaataattaaatattattttcaagttatatatagaacgtttctaaaaattcaccacggactaggccataagtctccttatatttcaaggaatgagcttcacgtagatatttttctaacacagaaaactaaggttagagatccattacagagataaacttttgcacactgaaaccccacttttgaataactcccgggtaaaagacaaatgaatacaagttaacactcttaaaaaacataatgctccaaacccaatggggcttagaatgaactttaagaccttaacggtgatgttagaaaagagaaaagcctgcaaaatgatgagtgaatcatccaactcaagttagataaacgattccatcactggccacacagaatcgcccagcactcaccctccccggccccccatcacctccacatccctgggcactgaacgtcgaatcctcctgacaactatcaaaccccggctgagaaccggcgagaaccgcagccgcttccggtcactacccctagcaccgccctttttcggggtttgggacttcacatgaatgagggaagcggaggttccgcgcgtgcgcaaaaccacctttgaagctgctgttagccaggagtcaacatggagaagttacggaagtgggtgctttgggacgttcggtacccctcggcggcgtggtcaggtggggaacatggccgcgcccacgtcgcgcttccccatgggatacaccatgttggaggagtgtccatccgtattgaggatgaggacacctctgaactcacagagcaggctgtgagtttagagctgtctg

SEQ ID NO: 43722 - DNA, 2300 bp, Homo sapien
ctgcactatccacatgaagacccagcaaagaaatacctttaaacacaattccaggcaaccttgacttcccatgaaggctgtgtgctctctcctgatgagtaaggtgagccaaggtactggttatgtttccctttggctaccagaaggctcaaagagaaactgacagcccaacatcaatatctgttacaccctgagtcctgcacacctctacattctaatttggccttgatctgttgtctcttattttgcctgatccaatccttatttacaaatactttcctattttatggcagggatttccacatatttcgtcacatccacagtaaaatagaggaatgaagaaacagacaacatacttacctggggtttggccatttcctgctcttcttgggaaaaagcagagatgtgtgacggccgagctggaacaagtggagaagagtacagcagatgaggagaccccatcagactttcagtgcccagaattagctgcctagcaatcccctcacatcagctggccatcagactgctctctggaagagtctgggcaaccatgtgattttaacaatctgtgtattattcactcttcatgtgaacattgaacacaaaaggttttatatacacatatattaaattgtgtactgacccataaagtgtatttgtaggtattttccttaaggaaataatttatcataatgtatcataatttctctgcacgtacccacgtctcagcattgatttcaataatgccaaacttaaacgatcctctatgacccataagggattaataataacaaaatataaaagataaaatgctacaaagctgttaaaagcgttatatggaactgtacagtatctatgcactttgtggtatatgtatctcaactaaacgtttttaaaaggtgtacaaaaaaatcctaaggtgaattacaaagtaggttttaaaactgcgggaatccattttaaagttatatgttaaatgtttaaaaggcatacccctatacacaccaaaaatgtctaaaaacggacatttaaatgtgtgggggaagaattagttcctgttgattttctttttctctatttcagaattaatctatatattcaaatgttatttattaaatgccaaaaaaaactacactctaaaactattatcccaattacattttacccccatctccctcagaccccgcacctacccctcctcccacgcccccaacttgggcgaggcccggggtcaggtgagacctcgcaggtgcctctccttccttctgctcacctcaccggggccgccttgcccagaagccggaaagaggccttcgggtgcgggggtgcaggttcacttcggccggagcattcacaccaggcccccacctcggggcttgggcaaggggagagggcagagggagaagcggggcgcgtctaaagaggggtctgagggatgcgcatgaacctttaggggcaggtcactgtgctggaaaacgtgtaaaagtcaaagtttaataagccccatttaatcctgcttagcccccataactttgttcaccagtgagcccctagaacctcgtccactgacctctcggtcccccatcactcaacccccaactcccacttcactcatcccacagaactccccatcactcagcccacgacccctagcacttgccccctcaacctcactctctctcgataacagattttctgctcgctgctcaggagaccgttacaaagcctggccccaacaagcacttccgcttcgggaccgactctttggcaccgcagcctaaagggctgcaggggtcggttctgcgcacgctcagtggcgcctttgagaccccgtccgccaatagtcaacatggggccgcagcgcaggcgcagagggaaggtagccttgccggtgacgtcactgctccaggccagatggcgtgcccaccgtgtccttttgctgctggggctgcgtcgcaaagcggttgtttacttagttatgcagaggcaggcactcctaagacttcagacaccaattttcttacggcagggcggggaggggaagtgcccaactaaggaaaagattctagcaggcggcaatttcgcactttgaacttggagggcagcaacagagttgcaggtgtaaaataacgggaaggcgggatgcgtggctaaattgctctgcgtgcacaaagagtaggaggtagggaaaagccactggcttcatccagtggccaggactgggagtttacgttgtagcgtttgaaggacggtgggtcggtatgcagacaaacaagctgaaaaataaacggcgatgtggg

SEQ ID NO: 43723 - DNA, 2300 bp, Homo sapien
tcacctccattccattgccctttgcctctccttgctctcatttactcccaatttgcccttcagtcaccattattcatgcccctcacccaccagtcccatgtatctcctgttcactgacactcacattggccaacacagaagcatctgatggattgctcaggatttgatctggctgcacgcaccaaccccaccacaaacaccagtggcttcaagaggagggaagcagattcctcttttggaggcaggtaatccagggctagtgtggtagctccaaggtcaccagagacctggctccttctgtgctgttgctctgtcagcctcacctgctgcttctggtccaaaatgaccgctcacaattggcaaggtttttgtggtcttgataaaatgtatcataagagcaattgtaatgatgactcgccagccacgtgggggcttctctcattgtctttgggtgggaatgtcatatcatgcagactctgtggtgggaccagccacctgtcagcttctcactctccttcacctagccacctgctgcttaggttactgtatgaggaggtcacacctgtagggaatgatggtagaggatacccaggacagagagtgggagtcctcgctctgcagcagcaaagttagcctcacatagcttgtgcatgcacactgtgggccctcggatagtttctgaggggctgtatcactggctcctctgccccccaactcccaccaaccctaaaagatttcctcctttgtgtaggtgtgtgtgtacaaggtggttggagatgacgtttaggtgctagaaggggcgacacttgatgggccctaaaggaccagccctttctattttctacctcctaatgcattgagagagtggataaattgtatacccaggaggtgctgatgtgtcagggagcaacagatgtgagttccttttttactttctttctttctttgtcttgtctactgggaagctccattccttttgttgttgttgttgtttgtttgttttttgtttttgagatggagtctcactgtgttgcccaggctggagtgcagtggtgtgatcttggctcactgcaacctctgcctcccgggttcaagtgattctcctgcctcagcctccagagtagctgggatcacaggcgtgctaccaagcccggctaatttttggtgtttttagtagagacggggtttcaccatgttggccaggctggtcttgaactcctgacctcaggtgatccgcctaccttggcgtcccaaagtgctgagattacaggcgcacgccaccgtacccagcccaatatatgtgtatttttaacgttactatataatgctagattgcttcagactggtctttacagatcggatccttcttatggtttcccatatgtccagaatgaaatatgagctccctggccaaggaggccctacagcacctggccccagcctacaccccctacactcccaacacactgacactgtctactcatccagaaaaagcaacctgttagccaccacttaatataccccttcacccccggtgtgtgtgtcccacatcgccgtttatttttcagcttgtttgtctgcataccgacccaccgtccttcaaacgctacaacgtaaactcccagtcctggccactggatgaagccagtggcttttccctacctcctactctttgtgcacgcagagcaatttagccacgcatcccgccttcccgttattttacacctgcaactctgttgctgccctccaagttcaaagtgcgaaattgccgcctgctagaatcttttccttagttgggcacttcccctccccgccctgccgtaagaaaattggtgtctgaagtcttaggagtgcctgcctctgcataactaagtaaacaaccgctttgcgacgcagccccagcagcaaaaggacacggtgggcacgccatctggcctggagcagtgacgtcaccggcaaggctaccttccctctgcgcctgcgctgcggccccatgttgactattggcggacggggtctcaaaggcgccactgagcgtgcgcagaaccgacccctgcagccctttaggctgcggtgccaaagagtcggtcccgaagcggaagtgcttgttggggccaggctttgtaacggtctcctgagcagcgagcagaaaatctgttatcgagagagagtgaggttgagggggcaagtgctaggggtcgtgggctgagtgatggggagttctgtgggatgagtgaagtgggagttgggggttgagtgatgggggaccgagaggtcagtggacgaggttctaggggctc

SEQ ID NO: 43724 - DNA, 2300 bp, Homo sapien
tagatcttccttgttgcctgcctgcctgccttccttccttccttcctccctccctccctccctccctctctctctctctctctctctttctttctttctttttgagacagggtttcaccccagttgcccaggctagagtgcagtggcactatcttgcctcactgcagtcttgacctcccaggctcaggtaatcctctcacctcagcctccctagtagctgggactataggtgtgtgccaccacacccggctaattttttgtagagacagggttttgccatgttgcccaggctggttgtttgtttgtttttgagacagagtctcagtctgtcgcccaggcttgagtgcagtggcacagtctcggctcactgcatcctccgcctcctgggttcaagcaagtctcctgcctcagccgcctgagtagctgggactacaggcatgcaccaccatgctcggctaatttttgtatttttagtagagacggggtttcgccatgttggccaggctggtcttgaattcctgacctcaagtgatccacctgcccctgcctccccaagggctgggattacaggcgtgagccaccacatctggccccttctttgttgctttttataattgcatatagtattcccttatggagattgtagcattatttattcatccaatctcccatgaggtggtttccattcttttgctattataaatagtactgtagagcagtgtcttcacacatgtcatttgctcacataagtaaatgtttatgtagaataacttctagaaaccaaattgcgagtcagaggatgtatacattataaatttggatagatattgccaaattaattgccttcaaaatataccatacaccacagacaatttgagtatgcctgcttcttgacatcttcactaacttaccctaagtcactgtgacttatccctagtcatagcatttgaccagtgacttatcaaacacccatctttgataatatgtaagggaaaaatgctgtcttgtcttagtttgcatttatcttcatgtgagtgaagttgagcatctttttacatgtttaaaaaacatttgcattttattttctgtgaaatgatggtcatgtcccttgaccatcgtattagtctgttctcatgtcactataaagaaatacccaagactgggtaatttataaaggagagaggtttaattgactcacagttccacgggggtggggaagcctcaggaaacttacaatcatggtggaaggggaagcaaggaccttcttcacatggtggcaggagagagaagtgccagcaagggaaatgccagacgcttataataccattagatcttgtgagaactcactcactattatgagaacagcatgggggaaactgcctccatgattcaatcacctccttcacttgacaagtggggattgcaattcaaaatgagatttgggtggggaaacagagtcaaaccatatcaaccattttttaaaaagttattggtctttttcttcttgctttgtaggagctctctctatacatggaggaaattaactctttgtccatcctatctgttatgtgtatattttttccctagttagtcatatcctttgagtttgtttgatatattttgccatgtaatacataaagtagtcacatttatcagtgttttcatttgtggcatctgggttttggggcatgcttagaagagtcttctccactcaaagattattttttaaaacctctcctgtctttattttatagtttctcttttttcatttaaatttttgtcatgaatttatttttgtatatagtgtgaggtagggaatccagttaatttttttctgatagctctccagttttgaatagtctgtttttccattcctgtttaaaatgctacctttattatatattaaatttcccatttttatttgtatctatttctagactgtctgttctgttccactaactattcttgctaatggcagggttttacattgtttctctcataaagtatgctgggcaaagtgcaaagtaggcatcctacatgtactgctatggtaaaaatgaccagaatgagcagattgtacaggaatgtgctgttataggaaccagtgacatttgaggatgtggctgtggacttcacgcaggaagagtggcagcagttgaatcctgctcagaagaccctgcatagggatgtgatgctggagacctataatcacctggtctccgtgggtaagggcagattccctgtgtaccaatgaatcaaatcctcctcatccttcctttagtgctgtcaataccatgacc

SEQ ID NO: 43725 - DNA, 2300 bp, Homo sapien
ggtttggatctagagagagaattcagggctttgagggtggaaaattaataatcctgggtctatgtgttaagcttgagtttctgttcacttttccatcaccagggcaatttacatgtgaatctttttgcatgtctgttaactctttccccattactgcccctcagttcttgctcactgcaacctccacctcccaggttctagtgattctcatgcttcggccacccaagcagctggaattacaggcatgcaccaccacgtctgggtaattttcgtatttttagtagagacaggttttcgccaagttggctatgctgagtcctggcttcaagtgatctgcctgcctccacctcccaaaatgctgggattataggagtgagccactacgctctgcatccctcagatctttacactgactgcaggcctcagttgagtcctctccatctatgatcctttggtatgtacagaaaatcaaggctgtactaactttttagctacttgtgccccttctcctgtatccaccaaccccaatcctcagttaacatttatttttatagagatggagtctcactatgttgcccagactggtcttgatctcctgggctcacatgatcctcccgcctcagcctcccaaagtcctgggattacaggtgtcagccactgtgcccggccctcagttaacatttttttcttatttttattttttgagacagagttttgtctctcccccaggttggagtgcagtgtcacagtcttggcccactgcaacctccacctcccaggttcaagcgattctcatgcctcagcctcccaagcagctgagactacaggcatgtgccaccacatctggctaaattttgtatttttagtagagatagggttttgccatgttggccaggctggtctctaactcctggcctcaagtgatcctcccgccttggcctcccaaagttctgagattgcaagtgttagccactgtgcccagccctcagttaacatttttatcatgaatgccatttggtttgactttgaagtcagaccttgattaattcttccaccatcattacccctttggtataggctgtgaattccggggctctgttaaccacatcacgtgactttaatgggtctctggtcttggctcagatttgggtctaagttaaccttccatttaaggcctctctgaaataactttggaattgggttactattgcaccaccagtgcccctctgatttgatcttcaagcaggatatttgttaatgttttctccatccatacaccctgatagaggtcttgaatcctaggactttcttaactattgtaaccatcagagttcccgttttgtatcgaacatgaacctttgttaactctgcaatcctgttccgggctgacttccaatccagccctttgttaagtcgtctaaaaccaatgtcccttaggttttacctcgaacctctgactctatgaactcttttagttttgatacgggctgcaaaaggccatataagcctacttgaactagggcaggcagaagtccaggctgtaaatgacaggtgaaggtgggcccttccgtgttcaaaggagccaatggaggaccggtgggcagtgagtgacagatgggggcgggtcctgacgccaagcaggaacaataggaaggcggcagggcgccgaggccaggtggggagaagtgggcgggtatgtgtgagccccctgaaaggctgcatgatgtcaaaggtctcttccctttctccagacgttttaggaattcgcttctgcggaggaatctcccggggggtgctctgtccagccttcccactttccccgtttcccaccctgccatgtcgccacgcctttgctcaggccgtgcctcttctggtggccgggaacgcccactcacccggacaagtcgcggcccttccaagcctcacactgctttcgtaggatcaattccgaatacccaaactcggagatatcacgaggactcccccgggcccccaaacgcacctctcctctggctggaatgggagcctccagaagcagtgcgagaccacggccagcgacagaggtcctggcgctggcggaatgacgccatttttgttactggtagagctcggcttcgtggctgtttcggagccaccgaaagataagctccctcgtcaccctgacatctctccgggaagactggaagggaaatggcctttcgggggatgttgaacgcatttgggcaggcggggagccaagcccggcttgagagcagagccggggtgaggggcctggctgagtgctgcgggtctatgtgatc

SEQ ID NO: 43726 - DNA, 2300 bp, Homo sapien
aaacaaacgaaggcaatgaccatggaggtagagattagagtgatgcagccatgtattagtccgttctcacactgctataaagagctgcccgagactgggtaatttataaaggaaagagatttaactgattcacagttccgcatggctggggaggcctcaggaaacaatcatggccaaaggtgaagaggaagcaaagactttcttcacatggtagcaggagacagaagtgcaagcaggggaaatggcagacgcttgtaaaaccatcagacctcatgagaactcactgtcacaaaaacagcatggggaaaaccacccccgtggggatttgtaatctgtggggattacaattcgagatgagacttgggtggggacacagagccaatccatatcaagccacaagccaagaaatgctggcaatcacgggaagctggaagaggcaaggaacaggttctctcctagagcctctggaggtgtacagccctgccgacaacttgatttcaactcagtgaaactgatttcagatttctgggctccagaattgtgagagaataaattgatgttgtttatgccacaaagtttgcggtaatttgttacagcagccagagggaatttggggtgattgtaaggagttatgtaaattatgttaaagaacctttgcagttgtaagatgcattcattcattcaacaaatagtcgaggcaatatagaagagtaattaaaagcaccgactttgaggccgggcgtgggatggttcactcctataatcccagtgttttgggaagccaaggcaggaggattgcttgaggccagcagttccttccagatcagcggggacaacatagcaagaccccatctcttaaaaaattattttaattaaaaataaataaatacataaataaaagcacagactttggactcaattcatcttgggggtgaatcccagctctgtcacccactgactatgtgacctcgagcagactgcttaattctctgagcctcagtctcaacatctgcacactggggatgataatagtatttaactccagagaaggttgtgaaaactaatcggaagatgcacataaagggctttgtgctggactaaagggccattgccctgtccctgccctaagagagcttgctgtcatcctgggaggatcttagagagatcagggctgtagatggaaagcccagagaggaacggggtcatgttggagatactagggatgggggtaggggaaacttcttggacaaattgacttatgagctccctgatgaacacagtgggcccgaattacatactctttttaatactattacgataaacattattaatatcaatgggtaaaatatatttctggttctttggtcttctagaaaaaaacatatatagaagttttttttttttttagtttgaatttcttttttaaattttttttatagagatgggggtctcactatgcatcccagattgttctggaactcctatcctcaagtgatccttccacctcctgcctcagcctctcaaggtgttgggattacaggcatgagccactgggactggctcattgaaatttttctttctttctctttttttttttttctgacaagatctcgctctgtggccgaggtaggcagcagtggctggatcatggtcactgcaacctcgtactcctgggctcaagtgatcctcagcctcctgagtaactgggactacaggcacaccaccccacctcgctaattttatttattttttgtagagataagggacagggtatcgctctgttgtccaggctggggtgcagtggcgtgattgtggctcactgcaacctctgcctcccgggttcaaacgatccaccagctgtggcctcccaatgtgctgggactacaagcatgagccaccgtgcccggcccaaatttctgacgttactacagagttcctaggaaaaatcccatacctgaaaaagttagaaactgacaggaaggatttgagatgacgacctgcttcatatacactacttattaaaactggataacaaatgcaccgcgggggggtggggagggataggaaaaaaatggaaagagaaaatcagcacatgagtactctgattttggaagaatctaaagagaatatcagagcatgcatactctgaacttggagtagccaatcccaggggacgctttaggcgggaaaatcagagtctccacccccactttgagaaggttgtgtccctggagcctcaactgatagaccccacatcaccttcgctcctcccacctactgttctgacttctgattggcca

SEQ ID NO: 43727 - DNA, 2300 bp, Homo sapien
attctactactggtttttctagtccttccctctattccaaatcctcaaaattgtccttttccttattgggataattttcctctgcccagatctgggtcctccaccacacttaacactgtctgcaagtgtgtgaattcccattggctttgggccatacaggacacctctagacagactatactgagaagccatgcttggaacggtgcatggggagaggacaggagagggaatttacatacctggctctcactcctggttcttttacttattggtcaaaatttaccccacaggcacgaactcccccacacttctagattgcatcatctgcccctttggcagctgtctgggaagccagatcccacactttgaagtgtagtgtttcatacaatccaaaagtggtagcagaggccaggcgtggtgtcacatgcctgtaaccccagcactttgagaggccaaggcgggcggatcatgaggtcagaagttcaagactagcctggcgagcatggtgaaaccccgtctccactaaaaatacaaaaattagccgggcatggtcgcacgtgcctataatctcagctacttgggaggctgaggcaggagaatcacttgaccctgggaggcagagcttgcagcgagctgagatcgcaccatgacacttcagcctgggtgacagagcaagactccatctcaaaaacaaaataaagcaaaacaaacaaaaaatcaaaaaggtggtagcagaaaccagaaagtccaggtatgtagctaattggcctagttgtacagcagcagccaagggtgaaaactaaatactcccaggcaagccctaagttcaccaagtaattggagtacccatctgtgttagttaattgcctttatctgaaggaaaaataaaactcatatttctgtgacaagcaggtgcttacagcttggagcaaggcatctaggctaaactcccctggtgacagggagacagtgacatcatcttcctcgatgttcacatttcaaaaagacggctccaaggccctaaagaaagacatttatagggaccgggcatggtggctcacgtttgtaatcccaacacttttggaggctgaggctggaggatcacttgaggcctggagttcaagttcaagacattcctgggttatagggtggccagaggcttacatatcaaaggaggaatttacaagtacaaattttttcgaggaaatgctctaaggaaagtgaagtctcttcttgcccttttggcaacaggaaaatctcaattttatgtttagttacccttacaatttcccccttttgttattcttttatagcaacactgcaatattctaattatctccactgctgtttctttctctgcctagtttacagccacctagatatccaacaagtccatagtaagatgcaaagcaaagcaattgtcaagataataatagaatgatttttttttcatgacggagttttcatctcattgcccaggctagagtgcaatggcacgatgtcagctcactgcaacctctgtctcctgagttcaagtgattctcctgcctcagcctcccaagtagctgggattacaggcatgagccaccaggcccagctaattttgtatttttttgtggagatggggtttcaccatgttagccaggctggacttcaactcctcaccccaggtgatctgcccacctaggcttcccaaagtgttaggattacagatgtgagccaccatgcccggtctagaatgaatttttaaattcagtataataatcaccttgtcagggggtggggcgatctttaaacacatcatattggttaattgtgtcaaagtcaaaataaattatagagacaaatccctaaatcaaatgctctatttgggaatcacaaaattacaattcagggcatacacacagactagggtggtcttcagtatgtgcaatgaacaaacagaagttggaagttttattagaaagaaaaatgttacatattgtttagaaatgaggctcattggcactggagaagctggttcatttgcacaatcagctttcacattccctcttttgatgaagatctttcatcaaagtgtttcgcactttgaacttggagggcagcaacagggttgcaggtgtaaaataacgggaaggcgggatgcgtggctaaattgctctgcgtgcacaaagagtaggaggtagggaaaagccactggcttcatccagtggccaggactgggagtttacgttgtagcgtttgaaggacggtgggtcggtatgcagacaaacaagctgaaaaataaacggcgatgtggg

SEQ ID NO: 43728 - DNA, 2300 bp, Homo sapien
cattaaaccatatactttatacacttttctctgtatgttctgcttcaataaaaggtctgacccaaaacatttttaactaagttagttttccatacaaggttttaaaaaacagtaagagggccgggcacagtggctcatgcctgtaatcccagcactttgggaggctgaggcaggtggatcacatgaggccaggagttcgaaaccagcctggccaacatggtgaaaccccgtctctactaaaaatacaaaaattagcagggcatgatggcacgtacctataatcccagctactcagtagtctgaggcaggagaatggcttgaacccggaggcaaaggttgcagtgagccaagattgcgccactgcactccagcctgggtaacagagcgagactctgtctcaaaaaaaaaaaaaaaaggaaaaaggaaaaaggccaggcgtgaggctcacgtttataatctcagcactttgggaggccaaggcaggtggatcacctgaggtcagaagttcgagaccagcctggccaacgtggtgaaaccccatctctattaaaaatccagaaaatattagctgggtgtggtggagcatgcctgtaaccccagctacttcgtaggctgaggcaggagaatcacttgaacctgggagggggaggttgtagtgagctgagatcgtgccattgcactccagcctgggcaacaagagctaaactccgtctcaaaaaaaaaaaaaaaaaaaaaaagtaagagaaagatttaaaaatcccacaggaaaaagagtagcatttgggaaagaatgattcacaaaagaaatatgaaaagaaaaacgtatgaaaagatactcaatttcattgacaaacacacacaaaagaaatgagatattttcaactatcaaatggcaaggattagctctccctctccctctccctctccatctccctctccctcatccctctccctcatccctctccctctccctctccctctccatctccccctccccctccctctccgtctccctctcccctttgcacggtctccctctgatgcagagccaaggctggactgtactgccgccatctcggctcactgcaacctccctgcctgattctcctgcctcagcctgccgagtgcctgggattgcaggcgcgcaccgccacgcctgactggttttcgtattttttggtggagacggggtttcgccgtgttggccgggctggtctccagctcctaaccgcgagtgatctgccagcctcggcctcccgaggtgccgggattgcagacggagtctcgctcactcagtgctcaatgttgcccaggctggagtgcagtggcgtgatctcggcttgctacaaactccacctcccagctgcctgccttggcctcccaaagtgccgagattgcagcctctgcctggccgccaccccgtctaggaagcgaggagcatctctgcctggccgcccatcgtctgggatgtgaggagcccctctgcctggccgctcagtctgggaagtgaggagcgcctcttcccggccgtcatcccgtctaggaagtgaggagcgtctctgcccggccgcccatcgtctgggatgtggggagcgcctctgccccgccgccccgtctgagatgtgaagagtgcctctgccccgccgcgaccccgtctgggaactgaggagtgtctctgccccgccgccaccccgtctgggaggtgaggagcgtctctgactggccgcccagtatgagaagtgaggagctcctccgcccggcagccgccccatctgggaagtgaggagcatctccgcctggcagccgccccgtccgggagggaggtgggggggtcagcccctgcccagccagccgccctgtccaggaggtgggggggtcagcccctgcgcagccagcagccctgtcagggaggtggggggcagcccccaccaggccgccgccccgtctgggaggtggggggcgcctctgcccggccaccccatctgggaagtgaggagcccctctgcccagccgccaccccgtctgggaggtgtacccaagagctcattgagaacgggccatgatgacgatggcggttttgtcgaatagaaaagggggaaatgtggggaaaagaaagagagatcagattgttactgtgtctgtgtagaaagaagtagacataggagactccattttgttctgtactaagaaaaattcttctgccttgggatgctgttaatctataaccttacccccagccccgtgctctctgaaacatgtgctatgtccagaaacggttaaatggattaagggcggtgcaa

SEQ ID NO: 43729 - DNA, 2300 bp, Homo sapien
gcggaaggattggctaaggtggatgtaaccaataccacaatcacatcccataagtaaatacattttcgtctctccagggctacaggtaaaggatggtaattgtgcacaccacacttagattccctttcaaaactgtaatcagaggttggagggccttggactgtttattcagttgcaacagatatagaagccactgaagaatgaaagccacgactaagtacagcaaagctctgcaaatgtgctagtttggaaaacattgtgtctttcaagtggaaaaatcacagatcaactatttttttcttctcgctgttcagactagaatacagatgtttaacccaagatccagggacagtcttcagagagttcaacatctcctgacggcgcctgaggaccacccactttttgggtgttgcagtggcaacaaagtgtggctggaggaggagacaatattgtgcaatgtcactgcccaaggagatggaccaatcagagcagttagtgaactccatctggccaatcagaagtcagaacagtaggcggaacaagcgaagctgatgtggcgtctgtcagtccaacctccagggacagcaccttctcaaagtgggggtggagactctaattttcccgcctaaagcataccctgggattggctactttaagttcagagtacgcatgctctgactttctctctctctcgatttttccacagagtacgcacgctctgattgtttcgattcttccaaaatcagagtaagcatttgctgattttctttttccattcttcctacccctcccctcctccgtggtgcatttgttatctagttttaataaggagtgtatatgaggcaggtcgccatctcaaatctttcctgtcagtttctaactttttcaagtatgggatttttcctgggaactctgcagtaacttaagaaatttgggcggggcgcggtggctcacacttgtaatcccagcagttttggaggccacagctggtggatcacttgaacctatgaggcggaggttgcagtgaccatgatcacgccagtgcaccccagcctgggcaacagagcaagaccttgtctgaccaaaaaaaaaaaaaaaaactcactcaaatctttcctcctgggctcaagtgatcctgttgcctaggccttgggactacaggtgcacaccatcccacttctgctaagggctaaggtgtttttattttgttttgttttagtagaaattgtttcgctatgttgaccaggctggtctcaagctcctgggctcaagtgatccgcccaccttggcctcccaaagtgctgggatggtacaggcctgctacaccacccccagctaactttttgtattttttgtagacacgagagttttgctatttttcccagcctggtcttgacctcctgggctcaagcgatctgcacgccttggcctcccaatgtgctgggattacaggagtgagccaccgagcctggctgattgtgcatgttgaaacaccccacattctctctaagtgttcccgggctcttgtagtctcagaaattctagctctcttccttctaataatttacaaatcacccagtaatagcttctaaatccgttcatagtagcgatgctcatttctcttcaacagaacagaacccccatccctctgcctgatcagatccatcaccagagagaccatgttatctctgggactcacttcccttcctttattcattgagtgagggtgtcagaacgcccccactgaataaaattacacagtcacatctctgccttcccaacaagggtctgtacatctttcagggtaagcctggcctcagggaaactactaacaacattagccaaccccctccaaagactcaaggctgctttgcccataggaaacatgtcatccccaatcaatacttctcccagagacccctggctccctgttttcatctgacttctccccatggccttactcagggacagataagccacggatggagaaatgcaactcctgattccaggtgactgagtgtggccagacttcactgatttctccctccatgggaccaaaggtcctgcagctggaaagactcagactgtttctcttgtaggacagagtgctcccggtgccatgaacggagacgatgcctttgtacggagacctagggttggttctcaaataccagagaagatgcaaaaggtgaggtgacctgcagggggcatagtagtggcccaggggacagtgtggggtgatcagttttctgaggaggggaggacagaggtactggggacaaggaccagggtctccgggg

SEQ ID NO: 43730 - DNA, 2300 bp, Homo sapien
tatgtcatcgtcccacagcgccaccgacacagagtgtcagcccccagaaagggcctttccaaggaggactatatcaggtctgacattttcatgatcaacagccagccatctaccagttctggccaatcctatgtgtatttcatcagcaatgaacagaaccaagctgggagcacgagatgggatgagggtaagttaatataccacaaagcttactgtttttacggagattcagctggtttctttctttctttctttctttctttctttctttctttctttctttctttctttctttctttctttccttccttccttccttccttctttctttttctttctttcttttctttcttctttctttcatgtatggatgtatttatctatttgacagtcttgctctgtcgcccaagctggagtgcagtggtgtgatctcagctcaatgcaacctctgcttcccaggttcaaataattgagcgagcccaggatgtcaagaccagcctggaaaacatagcaaaaggcagggtggtgcatgcctgtagtcccaaggccaaggcaggagaatcgcttgagcccaggaggtagagaccaacctggacaacatagcagaactgtttctactagaaaaattaaaaatattagtgggggctgggtggtgtgatcctgtagtcccgaggccgaggcgggaggattgtttgagcccaggtggtcgaagccagcctggccaacatagcgaaaacccatttctactaacaacacagaacaacaaaaaaatagcacgggcagagtggctcacccctgtagttccgaggccaaggtgggaggattgtttgagcccaggaggtcgataccagcctggccaacatagcgaaagcctgtctctcctaaaaaaataaataaacaaaaataaaaataaataaataaataaaataaaaatgagccgggcagaaaggcacatgcctgtagtcctgaggccgaggtgaaagcatcacttgagtccaggagattgaagccagcctgggcaacatatcgacacctggttcctactaaaaaaaaaaaaaggaaaaaaaatagtgtgggcagggtggtgcatgcctgtagtcccgaggccgaggtgggaggatcccttcagcccagcagcttgacgccggcctggccaacataacaaaacctggtttccactaaaaaataaaaataaaaaaaaatttaaaaaagcgtcggcagggtggtgcatgcctgtagtcccagggctgcggcgggaggatcgcttgagcccaggatgatgagaccagcctggccaatacagcaaaaccgtctctattaaaaaatcaaaaaacaaaaaatatgagtgggggtggggtggttcctgcctgtagtcccgagactgaggcggaaggattggctaaggtggatgtaaccaataccacaatcacatcccataagtaaatacattttcgtctctccagggctacaggtaaaggatggtaattgtgcacaccacacttagattccctttcaaaactgtaatcagaggttggagggccttggactgtttattcagttgcaacagatatagaagccactgaagaatgaaagccacgactaagtacagcaaagctctgcaaatgtgctagtttggaaaacattgtgtctttcaagtggaaaaatcacagatcaactatttttttcttctcgctgttcagactagaatacagatgtttaacccaagatccagggacagtcttcagagagttcaacatctcctgacggcgcctgaggaccacccactttttgggtgttgcagtggcaacaaagtgtggctggaggaggagacaatattgtgcaatgtcactgcccaaggagatggaccaatcagagcagttagtgaactccatctggccaatcagaagtcagaacagtaggcggaacaagcgaagctgatgtggcgtctgtcagtccaacctccagggacagcaccttctcaaagtgggggtggagactctaattttcccgcctaaagcataccctgggattggctactttaagttcagagtacgcatgctctgactttctctctctctcgatttttccacagagtacgcacgctctgattgtttcgattcttccaaaatcagagtaagcatttgctgattttctttttccattcttcctacccctcccctcctccgtggtgcatttgttatctagttttaataaggagtgtatatgaggcaggtcgccatctcaaatctttcctgtcagtttctaactttttcaagtatgggatttttcctgggaactct

SEQ ID NO: 43731 - DNA, 2300 bp, Homo sapien
tactgtagtcccaagattgaggcaggaggattggccaatgtgctgggattacaggcgtgaaccaccgctcctggctgattgctgcatcttgaaacgccccatattctctctaagtgttgatggactcttgtagtctcagaaattctagctcacttccttctaatgatttacaaatcatccagtaatagcctctaaatccgttcacagtagccatgcacatttctcttcaacagagcagaatcccccaaccctctgcctgatcagatccatcaccggagagaccatgttatctctgggactcacttcccttcctttttttattgagtgagggtgtcagaatgccctcactcaatacaattacatagtcatgtccctgcctccccaacaagggtctgtacatctttcagggtaagcctagctccagggaaactactaacaagagtagccaaccccctcccaaagactcaaggctgctttgcccataggaaacctgttatcccctatcaatacttctcccagagatccctggttccctgttttcatctgatttctccccatatctttactcagggacagataagccccggatggagaaatgcagcacctgattccaggtgactgagtgtagccggccttcactgatttctccctccacaagaccaaaggtcctgcggctggaaagtctcaatctgtttcacttgcaggtcagactactcccggtgccatgaacggagacaacaactgtgcaaagagagctggggatgatgctcaaataccagagaagatacaaaaggtgaggtgaggagaaactctgtctgtactaaaatacaaaaattagctaggtgaggtggtgggtgcctgtagtcctagctacatgggaggctgagacaggagaatcacttgaacctgggaggcagaggttgcagtgagccgagatcgtgtcactgcattccagcctagatgacagactgagaattcctcttgggaaaaaaaaaaggtacagaacctttccatcaccacaatgctatcccttgtgctagtcatttttagtaatactctcctcccatccaccatccctaacccctggcaaccactaatctgtttttcatttccacaattttgtcttttctagaatgctgtacaaatgaaatcttatagtatataacattttaagggcttatttcactcagcataattccctggagatttacccaagatattaatatttgtggatcaatagttcattgttgctgttgttgttgttgtgacagcgtctcgctctgtcgcccaggctggagtgcggtggcagatctcggctcactgcaacctctgcctctcgggttcaagtgattttcctacctcagcctcccaagtagctgtgactacaggcacgcatcaccactcccaggtaatttttgtattagtagtagagatggggtttcaacatattggcaaggctggtctcgaactcctgacgttgtgatccgccctccttgacctcccaaagtgttgggattacatgcatgagccactgggcccagtcaatagttcatttttattactgagtagtattccatggtatggatgtacctcagttcgaccattcacttattgtaggacatattgattatttccagcttttggctattacaagtaaagctgctatgaacaattatgtacaagtttctggatgggcatacattttgatttctctgaagtgtaattgttgaattgtatggtaattgcatgtttagctttataagaaactaccaaactgctttccagagtggctttaagattttaccttcccagcagcacttaatgaggtgtccagtttctctgtatccttgtcaccatttggtgttgtcactatgtcttttattttagctattgtaataagtgtatagtgatacctcttcgtggtcttaatttgcatctagtgaagcaaattagtgtcgaacatcttttcatgtgcttatttgcttatttgctcttcagtgaaatgtatgttcatatcttttcatgattttctaattggattatttgtattttttaccattgaggtttttttaattattttttttgagacagagtctcgctctgttacccaggctggagtgcagtggcacgatcttggctcactccaacctccgcctcccaggttcaagcaattctcatgcctcagccccctgagtagctgggattacgggcatgcatcatcatgcctgtctaatttttgtatttttagtagagatgggtttttgtcacatttcccaggctgttcttgaactcctggcctc

SEQ ID NO: 43732 - DNA, 2300 bp, Homo sapien
ggaaaaccacccccgtggggatttgtaatctgtggggattacaattcgagatgagatttgggtggggacacagagccaatccatatcaagccacaagccaagaaatgctggcaatcacgggaagctggaagaggcaaggaacaggttctctcctagagcctctggaggactacagccctgctgacaacttgatttcaactcagtgaaactgatttcagatttctgggctccagaattgtgagagaataaattgatgttgtttatgccacaaagtttgcggtaatttgttacagcagtcagagggaatatggggtgattgtaaggagttatgtaaattatgttaaagaacctttgcagttgtaagatgcattcattcattcaacaagtagtcgaggcaatatagaagagtaattaaaagcaccgactttgaggccgggcgtgggatggttcactcctgtaatcccagtgctttgggaagccaaggcaggaggattgcttgaggccagcagttccttccagatcagcagggacaacatagcaagaccccatctctaaaaaaaaattattttaattaaaaataaataaatacataaataaaagcacagactttggactcaattctatcttgggggtgaatcccagctctgtcacccactgactatgtgactttgagcagactgcttaattctcttgagcctcagtctcaacatctgcatactggggatgataatagtatttaactccagagaaggttgtgaaaattaatgggaagatgcacataaaaggctttgtgctgggctcaagggccattgctctgttcctgccctaagagagcttgctgtaatcctgggaggatcttagagagatcagggctgtaggtggaaagcccagagaggaatggggacttgttggaggtactagggatgggggtaggggaaacttcttagacaaattgacttatgagctccctgatgaacacagtgggccctaattacatactctttttaatactattattataaatattattaatatcaatgggtaaaatatatttctgcttctttggtcttttagaaaaaaacatatatggaagtgtagaagtgtttttttttgtttaaatttcttttttaaaaattttttatagagatgggggtctcactatgtatcccagattgttctggaactcctggcctcaagtgatccttccacctcctgcctcagcctctcaaagtgttgggattacaggcatgagccactgggactggctcattgaaatttttctttctttctctttctctctctctctctttttaaagacaagatctcgctctgtggcccaggtaggcaggagtagccagatcatggctcactgcaacctcgtactcctgggctcaagctatcctcctacctcagcctcctgagtaacggactacaggcacaccaccccacctcgctaattttatttattttttttgtagagaaaagagacagggtattgctctgttgcccagggtggggtgcagtggcatgatcatggctcactgcaacctctgcctcccaggttcaagtgatcctccagctgtggcctccctaagtgctgggattacaaccgtgagccgccgcaccggcccaaatttcttacgtcactacagagttcctaggaaaaaatcccatacctgaaaaagatagaaactgacaggaaggatttgagatgatgacctgcttcatatacactccttattaaaactggataacaatgcaccaccgaggaggtggggagggataggaaaaatgaaaagagaaaatcagcgcatgcgtactctgatttgggaagactccaaagagaaaatcagagcatgcgtactctgaacttggagtagccaatcccaggggatgctttaggcgggaaagtcagagtttctgcctccattttgagaaggttctgtccctagagcctagactgatagaccccacatcagcttggcttgtcccgcctactgttctgacttctgattggccagatggagttcactaactgccctgattggtccatcatcctggagcaatgacattgcagaatattttctcctcctccagccacactttgtcaccaactgctgccaactcgccaccactgctgccgacctcgcaaccactgctttgtctctgaagtaggttctctttaagggacaccctagatgggctaatcggggcagatagaaaaggaggaagcctctgtagggccgtcaagtgcttggggttccgaaaatcttgaggactgaaagacaactaatgccttt

SEQ ID NO: 43733 - DNA, 2300 bp, Homo sapien
tcccacagcactgcagacacagagtatcagccctcagaaaaggcctttccaaggaggactatatcaggtctgacattttcatgatcaatagctagccatctaccagttctggccaatcctatgtgtatttcatcagcaatgaacagaaccaagctgggagcacgagatgggatgagggtaagttaatataccacaaagcttactgtttttacggagattcagctggtttctttctttctttctttctttctttctttctttctttctttctttctttctttctttctttctttccttccttccttccttccttccttccttccttccttctttctttctctttctttcttttctttcttctttctttcatgtatggatgtatttatctatttgacagtcttgctctgtcgcccaagctggagtgcagtggtgtgatctcagctcaatgcaacctcggcttcccaggttcaaatcattgagtgagcccagaaggtcaagaccagcctgggaaaaatagcaaaaggcagggtggtgcatgcctgtagtcccaaggccgaagcgggagcatcgcttgagcccaggaggtagggaccagccaggacaacatagcaaaactgtctctactagaaaaattaaaaatattagtggtggtggggtggtgtgagcctgtagtcaccaggctgaggcgggaggattgcttgagcctgggaggtcgaggccagcctggccaacatagcgaaaccccatttctactaacaacaagaacaacaaaaaaattgcgtgggtgggatggctcacccctgtagttccgaggccaaggtgggaggactgcttgagcccaggaggtcaataccagcctggccaacaaagcgaaagcctgtctttcctataaataagtaaataaaattaaaatgagcaggaagaatggcacactcctgtattcctgaggccgaggtgaaagcatcatttgagcccagcagattgaggccagcctgggcaacatagcgaaacccggtttctactaaagaaagaaacaaacaaagaagcaaaaaaaaaaaaaaaaaaaatagggtgggcagggtggtgcatgcttgtagtccccaggccaaggcgggaggatcccttgagcccaggccaacatagcgaaacctggtttccactaaaaaataaataaataaataaagcgtgggccgggtggtgcatgcctgaagtcccgaggctgtggtggaaggatcccttgagcccaggaggttgaggccagtctggtcaacatagcgaaacatggtttctacttaaaaaaaaaaaaagcctgggcaaggtggtgcatgcctgtagtcccgaggctgaggcgggaggatcgcttgagcccaggacgtggagaccagcctgaccaacatagcgaaactgtctcttttaaaaaatcaaaaaacgaaaaatatgagtgggggtggggtggttcccgcctgtagtcacgagaccgaggcgggaagattggccaaggcggatgtaaccaataccacaatcacatcccgttaagtaaatacattttcgtctctccagggctacaggtaaggatgctaattgtgcacaccacacttagattccctttcaaaaatgtaatcagcggttggagggccttggactgttttttcagtggcaacagatatagaagccactgaagaatgaaagccacgactaagtacagcaaagctctgcaaatgtgctagtctggaaaacattgtgtctttcaagtagaaaaatcacagatccgactatttttttcttctcgctgttcagactagaatccagatttttaacccgagatccaggcatggtcttcagagagttcaaaatctgacggcgcctgaggaccacccactttgtcccagtggcaacaaagtgttgctggaggaggagacaatattgtgcaatgtcactgcgcaaggatgatggaccaatcagggcagtcggtgaactccatctggccaatcagaagtcagaacagtaggcgggataagcaaagctgatgtggcgtctatcagtccagcctccagggacagaactttctaactgggggtggagaccctgattttcccgcctaaagcatcccccgggattggctactttaagttcagagtatgcatgctctgactttctctctctttcgattcttccatactcagagtacgcacggtctgattttctctttcgattcttccaaaatcagagtaagcatgcgctgattttctttttccattcttcctacccctcccctcctccgcggtgcatttgttatctag

SEQ ID NO: 43734 - DNA, 2300 bp, Homo sapien
gcttaatgctcagcattaagccatcatcccacagcactgcagacacagagtatcaacctccagaaagggcctttccaaggaggactatatcaggtctgacattttcatgatcaacagccagccatctaccagttctggccaatcctatctgtatttcatcagcaatgaacagaaccaagctgggagcacgagatgggacaagggtaagttaaaataccacaaagctccctgttcttacggagattccgctgatctctctcttgctctttctttcttttttttttttttttcagtcttgctctgtcgctcaagctggagtgcagtggtgtgatctcagctcaatgcaacctcggcttcccaggttcaaatcattgagtgagcccaggaggtcaagaccaacctgggaaacatagcaaaaggcagggtagtgcatgcctgtagtcccaaggccgaggcgggagaatcacttgagtcccggaggtagagaccagcctggacaacatagcgaaactgtctctagtagaaaaattaaaaatattagtgggggcggggtggtgtgaacctgtagtcccgaggccaaggcaggacgattgcttgagcctaggaggttgaggccagcctggccaacatagtgaaaccccatttctactaacaacaagaacaacaaaaaaatagcgtgggtggggtggctcactcctgtagttttgaggccaaggtgggaggattgcttgagcccaggaggttgataccagcctggccaacaaagcgatagcctgcctctcctaaaataaataaataaataaataaataaataaatgaaaataaaaatgagcagggcagaatggcacacgcctatagtcctgaggccaagatgaaagcatcatctgagcctaagagattgaggccagcctgggcaacatatcgaaacctggtttctactaaaacgaaacaaaacaaaacaaaaaatagcttgggcagggtggtgcgtggctgcggtcctgaggcaggaggatcccttgagcccaggagcttgatgccggcctggccaacatagggaaacatggtttctactaaaaaaaaaaaaaaaaaaaaaaaaaaaatcgtaggcagggtagtgcatgcctgtagtctcgaggccatggtggaagaatgccttgagcccaggacgatgagaccaacctggccaatgagaccagcctggccaacatagcaaaacctggtttctacttaaaaaaaaaaaaaaaaaaaaaagcgtaggcagggtggtgaatgcctgtagtcccgaggccgaggtgggaggatcgcttgagcccaggacgtcaagaccagcctggccaacacagcaaaaccttctctattaaaaaatcaaaaaataaaaaatattagtgggggtggggtggtttgcgcctgtagtcccgagacagaggcgggaggattggccaaggcagatgtaaccaataccacaatcacatcccataagtaaatacattttcctctctccagggctacaggtaaaggatggtaattctgcacaccacacttagattccctttcaaaaatgtaagcagaggttggagggccttggactgttttttcagtggcaacagatatagaagccactgaagaatgaactccacgactaattatagcaaacctccgcaaatgtgctagtttggaaaacattgtggctttcaagtagaaaaatcacagattgactatttttttcttcccacagttcagactagaatccagatttttaacccaagatccaggaacagtcttcagagagatcaaaatctgacggcgcctgaggaccacccactttttcgcagtggcgacaaggtgtggctggaggaggagacattattctgcaatgtcgctgcccaaggatgatggaccaatcagggcagttagtgaactccatctggccaattagaagtcagaacagtaggcggaacaagcgaagcggatgtggcttctatcagtcccggctccagggacacaaccttctcaaagtgggggtggagactctaattttcccgcctaaagcatcccctgggattcgctactttaagttcagagtacgcatgctctgattttctctctctttcgattcttccatactcaagagtacgcacggtctgattttctctttggattcttccaaaatcagagtaagaatacactgattttctttttccattcttcctacccctcccctcctccgtggtgcatttgctatctagttttaataaggagtgtatatgaggcaggccgccatcttaaatctttcctgtcag

SEQ ID NO: 43735 - DNA, 2300 bp, Homo sapien
tcccttcccttcccttcccttctcctttcccttcccttcccttcccttcccttcccttcccttctcctttcccttcccttctcccttcccttctcccatcccttctcccttcccttccttttcttttcgacagtttttctctgtcacccaggctggagtgcagtggtgggatctcagctcaatgcaacctccccttcccgggttcaaatcattgagtgaacccaggaggttgagaccagcctgggaaacatagcaaaaggcagggtggtgcaggcctgcagtcccgaggccgaggcaggaggatcacttgaacccaggaggtagagaccagcctggacaacatagcgaaactgtctctactagaaaaattaaagatattagtgggggctgggtggtgtgtgccagtggtcccgaggccgaggcaggaggattgcttgagcccaggaggtcaaggccagcctggccaacatagtgaaaccccatttctactaataagaagaacaaccaaaaatagcatgggcggggtggctcacccctgtagttcccaggctgaggtgggaggattgcttgagcccagaaggtcgataccagcctggtcaacatagcgaaagcctgtctctcctaaaaaaaattatcagggcagaatggcacacgcctatggtcccgaggctgaggtggaagcattgcttgagcccaggaggttgaggccagtctgtgcaacatagcaaaacccggtttctactgaaaaacaaaaaaaataccgtgggcagggtggtgcatgcctgtggtccccaggctgaggaggtgggaggatcccttgagccctggaggttgaggccagcctggcctacatagagaaacccagtttcaactaaaaaataataataataataacaaaaacaaacctgggcagggtggtgcatgcctgtagtcccgagaatgagatgggaggattgaccaaggcggatgtaaccaataccacaatcacatcccataagtaaatacattttcctctctccagggctacaggtaaaggatggtaattgtgcgcaccacacttacattcccttccaaaaatgcggcactattcacaatagcaaagacttggaaccaacccaaatgtccaacaatgatagactggattaagaaaatgtggcacatatacaccatggaatactatgcagccataaaaattgatgagttcatgtcctttgtagggacatggatgaaattggaaatcatcattctcagtaaactatcgcaagaacaaaaaaccaaacaccgcatattctcactcataggtgggaattgaacaatgagatcacatggacacaggaaggggaacatcacactctggggactgttgtggggtggggggaggggggagggatagcattgggagatatacccaatgctagatgacgagttagtgggtgcagcgcaccagcgtggcacatgtatacatatgtaactaacctgcacaatgtgcacatgtaccctaaaacttaaagtataataataaaagaaaaaaaaaagaaaactacaaaaaaaaaaaaaaaagaaaaaaaaataagaataaaagaggttggagggccttggactgtttttttagttccaacagatgtagaagccactgaagaatgaactccacgactaagtacagcaaacctccgcaaatgtgctagtttggaaaacattgtgtctttcaaatagaaaaatcacagatcgactattttttcttcccacggttcagactagaatccagatgtttaacccaagatccagggacggtcttcagagagttcaaaatctcctgatggcgcctgaggaccacccactttgtcgcacaaagtgtggctggaggaggcgacaacattctgcaatgtcactgcccaaggatgatggaccaatcagggcagttagtgaactccatctggccaattagaagtcagaacagtaggcggaacaagcgaagctgatgtggcgtctgtcagtccaggctctagggacagaaccttcccaaggcgggggggaggggagactctgattttcccgccgaaagcgtccccttggattggctactttaaattcagagtacgcacacgccgatttgcccttttgattcttccacaatcagggtaagcatgcgctgattttctctttccattcttcctacccctcccctccgccgtggtgcacttcttatctaattttaataatgtatttatgtgaggcaggtcgccatctcaaattcttcctgtcagtttctaactttttcaggtatgggatttttcctagga

SEQ ID NO: 43736 - DNA, 2300 bp, Homo sapien
tttcccttcccttcccttcccttcccttcccttcccttcccttcccttcccttcccttcccttctcctttcccttcccttctcccttcccttctcccatcccttctcccttcccttccttttcttttcgacagtttttctctgtcacccaggctggagtgcagtggtgggatctcagctcaatgcaacctccccttcccgggttcaaatcattgagtgaacccaggaggttgagaccagcctgggaaacatagcaaaaggcagggtggtgcaggcctgcagtcccgaggccgaggcaggaggatcacttgaacccaggaggtagagaccagcctggacaacatagcgaaactgtctctactagaaaaattaaagatattagtgggggctgggtggtgtgtgccagtggtcccgaggctgaggcaggaggattgcttgagcccaggaggtcaaggccagcctggccaacatagtgaaaccccatttctactaataagaagaacaaccaaaaatagcatgggcggggtggctcacccctgtagttcccaggctgaggtgggaggattgcttgagcccagaaggtcgataccagcctggtcaacatagcgaaagcctgtctctcctaaaaaaaattatcagggcagaatggcacacgcctatggtcccgaggctgaggtggaagcattgcttgagcccaggaggttgaggccagtctgtgcaacatagcaaaacccggtttctactgaaaaacaaaaaaaataccgtgggcagggtggtgcatgcctgtggtccccaggctgaggaggcgggaggatcccttgagccctggaggttgaggccagcctggcctacatagagaaacccagtttcaactaaaaaataataataataataacaaaaacaaacctgggcagggtggtgcatgcctgtagtcccgagaatgagatgggaggattgaccaaggcggatgtaaccaataccacaatcacatcccataagtaaatacattttcctctctccagggctacaggtaaaggatggtaattgtgcgcaccacacttacattcccttccaaaaatgcggcactattcacaatagcaaagacttggaaccaacccaaatgtccaacaatgatagactggattaagaaaatgtggcacatatacaccatggaatactatgcagccataaaaattgatgagttcatgtcctttgtagggacatggatgaaattggaaatcatcattctcagtaaactatcgcaagaacaaaaaaccaaacaccgaatattctcactcataggtgggaattgaacaatgagatcacatggacacaggaaggggaacatcacactctggggactgttgtggggtggggggaggggggagggatagcattgggagatatacccaatgctagatgacgagttagtgggtgcagcgcaccagcgtggcacatgtatacatatgtaactaacctgcacaatgtgcacatgtaccctaaaacttaaagtataataataaaagaaaaaaaaaagaaaactacaaaaaaaaaaaaaaaagaaaaaaaaataagaataaaagaggttggagggccttggactgtttttttagttccaacagatgtagaagccactgaagaatgaactccacgactaagtacagcaaacctccgcaaatgtgctagtttggaaaacattgtgtctttcaaatagaaaaatcacagatcgactattttttcttcccacggttcagactagaatccagatgtttaacccaagatccagggacggtcttcagagagttcaaaatctcctgatggcgcctgaggaccacccactttgtcgcacaaagtgtggctggaggaggcgacaacattctgcaatgtcactgcccaaggatgatggaccaatcagggcagttagtgaactccatctggccaattagaagtcagaacagtaggcggaacaagggaagctgatgtggcgtctgtcagtccaggctctagggacagaaccttcccaaggcgggggggaggggagactctgattttcccgccgaaagcgtccccttggattggctactttaaattcagagtacgcacacgccgatttgcccttttgattcttccacaatcagggtaagcatgcgctgattttctctttccattcttcctacccctcccctccgccgtggtgcacttcttatctaattttaataatgtatttatgtgaggcaggtcgccatctcaaattcttcctgtcagtttctaactttttcaggtatgggatttttcctagga

SEQ ID NO: 43737 - DNA, 2300 bp, Homo sapien
gctccaggctcgggtggggattgcagagacacccccaccccaggaaactcggtaggccacgggagggggtctttgatgaaggtctcagaaatagctcttcctccggaggggaaatgagggctcgggccaggttcctgagacaccccacaccccacacctaggaagtttctcaagtctggcagtgtctccaaattgacttctgccagaagatgagtgtttaagacttgctaggggccctggaaaagacctctaggccctagaattggggtcaaatgggagtccctgggtcatttctgtccctgggaaggggctcggttcgggcacttgtctttggcttctagtgaggatattcagagtcgtggcagagagcagtttgcagcgtctggggcaggggtctccgagtctgtccccaaccctcagctcactcaacaggttgcattagctctggtctcgggcttgggggcccaggcgggaaggaggggggtgagggcattaggaggggtggggcagccaggccgacacgtgtccctgcaaggagtgagccgcctggccacgcggtgagggtggagggaaggagagggggtggcgcgggggaccggggaatgaaagacacagatggcaagagagacagcgtgagtctggggtctgggaggagaggctatcccttctccacgtggtcggctcatctgcgctggggtccggctctctctgtagctttctgtctctctcttccccactatttctctctcactggctctctctgtgtctctctgagtaactaactgttggcttctctccttctctgatttttgttcttctctctctctcatctctttctctgtcagtctgcctccatttctatccctgtctgttcctgctcccctgccttgtctctttctccgtctttccatcggtctctatgggactcccctccccccttcttcagctcccctcactttgaagcatgctcgttccatctctgatccccccaccccatttctttgcccacaggatggaactgcaggatccaaagatgaatggagccctcccttcggatgctgtggggtgagtcaggggtccaaggaggtgggctcagggatcaggggttaggatttccctcttatcggcccctatttccctgccctatccagctacaggcaagaacgtgagggcttcctgcccagtcgtggtcctgctcctgggagcaagccggtccagttcatggatgtgagtggccccacaggatctgtcctggtggcaccttccccagctaatctcctcccgcactgctccctcttccccactcctcctcctccctgctgttcccctgcccagctatctccccagcacagctacacactacttggtcgctcccctctccagatactcctcttccccagatatgccctttccagctctctccctggccttgtttctccccacccgctcttcggcccagtgactgccctccctggctgctcccctcccggcctgcctttctcctccagctgttcttcctcctccagcactccccatcctcagcctatccccacccgcagcgtctcccctccccagctgttttacctctggtggctgcttcaccctcccccggtcctctccacttccagctgctccctccaaagtttgtcctagtttcccccttcccagctctccccattcgcagcctcttccatcttcaactcttcttccctgctagcctcttccctcctccgatggtctctccttggcttctctccaccccgcttgcttcttctctagtctttccctggccctggcattagtctccttaccctgtgccctgtcccaatgtgtgcccgggctttgctccttgcgtgcagttcgaggggaagacatcgtttggaatgtcagtgttcaacctcagcaacgccatcatgggcagcggcatcctggggctggcctatgccatggcccacacgggggtcatcttcttcctgtgagtccataggtggcctgcggggccaggggtgttgtggggcaggtgggaggcctggggccaggtctgagctgtgccacctgccgcagggccctgctgctgtgcattgcgcttctgtcgtcctactccatccacctcctgctgacctgtgctggtattgcaggtgagacccagagcctggatcccagtccccactccacccctttggaccccagactctggagccacatccagagctcaacacagaccttggaccccagaccccagacccagctccctgaatgcagaccccagatcccggacccagcaccccagaacccacccc

SEQ ID NO: 43738 - DNA, 2300 bp, Homo sapien
ttcttttctgacttgatttgtgactagctgtgtgtgtacacggctgtgtgcagccatttgctgaaatgcagttgtgtgtgtgtgtgtgtgtgagagagagagagagaggagagagagagagaaggagactatggcttttctgtttgtacaaaaatcatgtcagcctatgagtgcctctctctgtgactggagctgtatgtggttacatgtggtcacaagtgcacattcaagttcacatacacagagatatcattttagggcttgaacctggaagtttgcctccagggtcatctgaacctggattcaggttcagatccagggccatctgaacctggatcgtgtgtgtgggaaagacccaggacccacacacaatgtcatcagctgtgtgtaattgtgtgctctgtgtgtggctgtgaatctgtgtgtgtgatttgcctgttgattgtctttggcatggctgtgggtccacgggcggtgaggttcaggagtctcgagtgtctggaaatcggcacaagcctatccctgtgttagtctgtgctctctgtgagcggctctgagcctgtcggtattgatagctgtaagactatcgtcactctgtgtggccacgtgtgtgactgtcccatgagccattgctcttaacgtgcagtggtgagtctgtgtgtgttcatgtctgtcagtctttattctcttgtgtggctgtgagtctttgtgcacctctgtgagtgatggcgagttggcccccgtatctgagccccttgatggggctgtgatgggtcctgttgtgtagctgcgattcctgagtgtgcaggagtctctctcccgctgtggggaagtaaacgccccatcccttgtcctcctccaactgtgggtggggtgagggcatctaggccagctttgaagccccagccagctcctggcctttccgggaattctgtgttccctgtcgggggtgggcaggcgggcgaggggcccagacagaggcctcttgtccacctgggcttcaagcagcccagtcgaggtggtcccagaccccaagtccaccctgcctgacatcctgtagcggacacgtggcttgcctgggacaggcatgcctgtcatatgcctggaggggagtgaacagacggactcccatagaagacagacggacagacagatagtgggacttctcagggcttggacaagccccaccccacgcttggggtggggtccaggactacagtgcccgcccagtttgcggacagtgtgagttcacagtccacattccccacccagccacaaatgccctccctgcctccctctgggggcccccaagatctagggtcctctcgtgcctaggctgtctgcctgaggtctgcctggaatagcctggctactacccctgcacctgttcccctgctgtccccaggcctctctgcctgaatctgcctctctctgcctcttttctcctgtccctccaggagtctctctgcctcaaccactctctctgccccttcatctctctgagctggtgtgtctggtcctaccctctgtttggggagctgtctggctctgtcccccacctcttggccagcctgtgtctcctgtctatgactgagcccaattgcctgttgcctttctgcaggtgtttccacgagcctatccctacccacctgtttgtttctgagtctgcctgtgtgtccctttctccctgtctctgcctgtcttccaagctcccctagcatcccctcctcccgcccatctgtctttctgtcccttctgtggtctgtctgttcctgtgctgtttctcatgcctgctttctttgtaacttcagttctcctactctctctctgtctcctctctgcacctttttctgccatccatcccatcctgctgtccgtctgctctgtgagtccatcccctctgtctgcctgtcactctctctagctgtgggtctacaccctcaatctttcaggccatttcccccaccatcaacacacaaacaaaccgctgtctccctccaagtgggtccagatagggggcgccccttctccacctcttcccccgcccagggccagaaggagggaaacgaaattaaaattaacatttcttctcaggaaaaaaaaaaaagtaccgctccagagcaggagcctaggcagccgagagggtgcccgaacctgagtctgagttgcggccacttcaggagctgagaggagcaggtaggtgaggagggagcgtgggctgcggggatggtgttcctgggggcctgagatatgagtaggggtcctgggagggggctcggggttccttggagacattttag

SEQ ID NO: 43739 - DNA, 2300 bp, Homo sapien
tggccgcctgccaaacttgtgcttttttttttttttttttttgagatggagtctcactctgtcgcttgggccggagtgcagtggcgcgatcttggctcactgcaacctccgccttccaggttcaagcaattctcttgcctcagcctcccgagtagctgggattacaggaacccgccaccacgcccagctaattttttttgtatttttagtagagacggggtttcgccacgttggccaggctggtctcgaactactgacctcatgattcactcaccttggcctcccaaagtgctgggattacaggcatgaaccactgcacccggcccaactcataccttttttttttttttttttttggcaaccgtgtgcattggtactgtctgtcggtgcagttcatctatatgttgttgtgtgtgtgtgttgcttgggtgtttgtctcctttgtaatggtcgtgggtgacaagtgtgtcagagtacttgtccctcctatatgtgtatctatgcgcacgtatctttctttgtgtgtctgctgctgtatttgtgtctcttcttagcgagtggctgcaggtatgtgtgccctcggggtgtttcttctggtgccatggtatgagtactatctggttctcttgttttttccttgtgtagctttcagtgtggtttctggattttttctttgcaacgatagtaagcgtactctgcattcctgtgctttgtgtttgtgtgcaggtatatgctttccctatatgtttcttttctgacttgatttgtgactagctgtgtgtgtacacggctgtgtgcagccatttgctgaaatgcagttgtgtgtgtgtgtgtgtgtgagagagagagagagaggagagagagagagaaggagactatggcttttctgtttgtacaaaaatcatgtcagcctatgagtgcctctctctgtgactggagctgtatgtggttacatgtggtcacaagtgcacattcaagttcacatacacagagatatcattttagggcttgaacctggaagtttgcctccagggtcatctgaacctggattcaggttcagatccagggccatctgaacctggatcgtgtgtgtgggaaagacccaggacccacacacaatgtcatcagctgtgtgtaattgtgtgctctgtgtgtggctgtgaatctgtgtgtgtgatttgcctgttgattgtctttggcatggctgtgggtccacgggcggtgaggttcaggagtctcgagtgtctggaaatcggcacaagcctatccctgtgttagtctgtgctctctgtgagcggctctgagcctgtcggtattgatagctgtaagactatcgtcactctgtgtggccacgtgtgtgactgtcccatgagccattgctcttaacgtgcagtggtgagtctgtgtgtgttcatgtctgtcagtctttattctcttgtgtggctgtgagtctttgtgcacctctgtgagtgatggcgagttggcccccgtatctgagccccttgatggggctgtgatgggtcctgttgtgtagctgcgattcctgagtgtgcaggagtctctctcccgctgtggggaagtaaacgccccatcccttgtcctcctccaactgtgggtggggtgagggcatctaggccagctttgaagccccagccagctcctggcctttccgggaattctgtgttccctgtcgggggtgggcaggcgggcgaggggcccagacagaggcctcttgtccacctgggcttcaagcagcccagtcgaggtggtcccagaccccaagtccaccctgcctgacatcctgtagcggacacgtggcttgcctgggacaggcatgcctgtcatatgcctggaggggagtgaacagacggactcccatagaagacagacggacagacagatagtgggacttctcagggcttggacaagccccaccccacgcttggggtggggtccaggactacagtgcccgcccagtttgcggacagtgtgagttcacagtccacattccccacccagccacaaatgccctccctgcctccctctgggggcccccaagatctagggtcctctcgtgcctaggctgtctgcctgaggtctgcctggaatagcctggctactacccctgcacctgttcccctgctgtccccaggcctctctgcctgaatctgcctctctctgcctcttttctcctgtccctccaggagtctctctgcctcaaccactctctctgccccttcatctctctgagctggtgtgtctggtcctaccctctgtttggggagctgtctggctctgtc

SEQ ID NO: 43740 - DNA, 2300 bp, Homo sapien
tctgcaggggagtcatgttcccacagtcccacaatgcccttgagttctgctgacaaagctctggcttcttccctggttctcagagtctctacgcctccacccagggctccatagaaatgcaggacgcaccactggggaaaaaattaaggaacgaagcaacaaaaggatgaattcaaccaacatttattgaacaccaactgtgcgccacccctgttccaggcactgggaggcagcagtgaacatgacagaacaggaatccctgcctggtgaagctcgtgtgctaaggaatcaatcattctgttttttttttttttcttgagacagggtctcactctgtcgcccaagctggagtgcagtagcacgatgtcggctcactgcaacctccacctcccaggttcaagtgatcctcccaccttggcctcctgagtagctgggactagaggtgcgcatcaccacgcccagctaatttttgtatttttagtagagacggggttgcactatgttggccaggctggtctccaactcctgacctcaagtgatccccccgcctcgccctcccaaagttctgggattataggcgtgagccactgcatccagcccttttattttttaaagagacatgggttctcgctatgttgcccagactagattcaaacccctgggctccagggatcctcccacctcagcctctggagtagctgggactaaaggcacatgccgccgcccctggctaatactcatatgcatgttgccaggattaaaatgaatgaacaaagggaaggacatgctggagccaacttatacaggttgggaggagctgttcaattttcagaaattttgcaaactggttgttaaacagctggtttaacaactggttttgtttgtttgttgagacagggtctcactctgtcacccacagtggagtgcagtggcaagatcaaggctcactgcagccttgacctcccaggctcatgcaatcctcccacctcagcctcccaagtagctggaactactcgcacacaccaccacgcccggctatttttattatttgtagagacggggatctcaccatattgcccaggctggtcttgaagtcctggactcaagcgatccttccacctcagccccctaaagttaaacagctatggttaaaaatgaaatgatataaacttactcaaaactggtaacttcctaattttaccacattccactattctctatgctcttgaggtcatttacccccattttatctgtatggtaaaaataatacatgatagtgcactactgcatctcttttaaactccctgttcagtgaccacaggtcggtaccttgaaatctaacaagaagattgtacctaagccatggaaattggtaaatgctagaaaccagcctcccttccccccacccctccccgccaccacccccgccccagccagtggttaaccatttaccagcacaccactgagggcatttagagcctagcacatggtaaacactatgataaacgttttcattatttttccgtttgtccactgggtcaggatgtatagtctttttttgtgtctgggatggaatttaaaatatttgaagatcacagaattacaaaagcccagagagtggctaagctacacctatttaaccctcccaataatgctgttaagtctatactattgattatccccactttccagacagggaaactgaagttctgaggcagtaaaactcaggcagcgccatgcattagctgtagtgcgatctgaaattgcagccgagcagcctccgcgcgctcgcgcacttcaagaacgcattttccttactgtcacgtttatgccccgagtggtaatttcgcttcccggcacgcgaaaaatgaatgggcgccatcttgcgcgtggcatcttgggaaatgtagtttacaggctcaataacaagcacggtccaagaagggaggggcgggggagcaaatcgatcttggcctcggaagaaaaagaacaaagaatcgctggcaacttgcgcgtcgcgtcgctgcagccacgcagtgcgtggattcagccgctttggccgtgcccgttgcatgccgggaaacgcagttcgcgagccccggatacgtcgacaatagatgacggggctcacgttgtacgttcacatcaggtcccggcccgccggaacctgggcgatccacgatgccgagtttgccacgctgcgacagcccataggcttgcccccccgggcattcgggtggactacgaacacaaactgaagccctaggacttgtcgcccgtttgcgctctcgccgaggcac

SEQ ID NO: 43741 - DNA, 2300 bp, Homo sapien
ccccgagtggtaatttcgcttcccggcacgcgaaaaatgaatgggcgccatcttgcgcgtggcatcttgggaaatgtagtttacaggctcaataacaagcacggtccaagaagggaggggcgggggagcaaatcgatcttggcctcggaagaaaaagaacaaagaatcgctggcaacttgcgcgtcgcgtcgctgcagccacgcagtgcgtggattcagccgctttggccgtgcccgttgcatgccgggaaacgcagttcgcgagccccggatacgtcgacaatagatgacggggctcacgttgtacgttcacatcaggtcccggcccgccggaacctgggcgatccacgatgccgagtttgccacgctgcgacagcccataggcttgcccccccgggcattcgggtggactacgaacacaaactgaagccctaggacttgtcgcccgtttgcgctctcgccgaggcacaggctgctcgcggaccaccctgctccgaaaactaaggtgggccctggggcgcggaggacaggaatgcgggcggaggctattgaggcacgcctgcactgtcccgcctgcggggaaaggagggaggtccgccctgggcgccgtagctgtgtatggttcgggcggctggcaccgggtgggttctagacccaaggtttgtctgcagaaggggaccagtagacggggtggattcgaggtggggacatgggacgcagcggtcggagccgcctggaggggtacccggtggtcccgatggagctatcatctttgaggtattgatgaggagggacggggagtgtggtcagaaggctgttttgggaggttgggtggagcgtgagggtggggtgttactggggaatcaatgggggctaataagaatattttagtcgaactgttgttcattgattgattaatgaggggatggcagagtaagcaactagaatataacgagtgatggatgggaaaatgatcccccaggtattgatggaggtatgatattcaacgggttaatggaaagtgatggggcatcgtaatggcaaggatgatggtgaggttgtggggggaataatagatggatggaggtcatgatcaaggggccttggtgaaagaaaagataatgagaggctgatggtgttgtagtcagagtcagtagttgggctatggtggcatgaccgtcgaggaattaggggacagagtgagtaaagagagggcaatagtaaactagggttgggggggttaacttctgttgatacatagtaggtgaatagtaaactgttggagtgtgatcatccagtgatggatccatggagagcagggtggacagtgaggggagaatggggaactgatgtgtgatcagttaacgtgtttgttaatgaaagagttacagggcaggaggctagtgctgtgatctatgaagggtctattggagaaaactgagttaatgggggctgataaatcagtaattgaatgcttaatggggagctaatagaccatgattctccaggcattgttagaggttcataaggatgtagtaataaaggggcctaatcatctaagggattaatggcgaatggggtgaaacgagagagatatagggagtgggaggtacaatgaagtagtattaggataaaggtggaaaacaagggattaatgggggctaataggactatatgaatctaggggcaatggggacaactggggatacagtcagtgagattttaatgggcatgacatgagcagagaagggttgatagtggcagttgcagggtttaatgtgtggagtgtgggtgacagtgatgggaggtggacaggttcacaagtgggccatctatgggatgaatgttgggtttatggggtcttttgtgggaactgtggggtaagtgatgggggcgaggagggtctgtgtgataagcagtggagcctgagagttcagtgattgggtccttcaggccctataaggtcagtggggtcagtgccagggcttcagtcagcccatcttctgtgtgagctgtcatgtgggtcagatgagcccagtttagtttgtgtggttctctccgccctacagaggtaggtggtagcccattcatctggttactgatactggccggcatcagtggactgtcggcaggtccttgagcaactggtgtgtgaaatgggacggacgtcaaaggacaagcgggatgtctactaccgcctggccaaggagaatggctggcgtgctcgcagcgccttcaaactgctacaactggataaggaattccaactcttccaaggtccctgactggtgggcaggtca

SEQ ID NO: 43742 - DNA, 2300 bp, Homo sapien
tacttctttgtgacacaggtcaaaagcctagatggaaacaatcaagtccgcaaagcccaggagcacatgtggtaagaatcttccagttttaaatgccaagtcttgcaattgagggaagtatttctggtaggtgctgtgggtcattgttgactcaacttgagtgggtttgacaactgagaaaaaaattaaaatgaaatttaattcataaaatgtatgtcctgtattctgctgttaaggaaaagaattgatatttgtgcatctggtctaagctattattccttatatatacatattcttaccgtattaaatgttttttgtttgtaatacatgaatactaatttatgagctagaactccatttaacttcatgttaaaatagagagaaaatatacatttctcttcaattaccattggtgtttcccagcaaaaacctgccaagcccactcttttgtttaacagaaaaggacaatggagacgggtgagtgaacatgacttgcccagctccatacaggccattgttaatctgattaaaatctgtttcagttggctgcccaggtcagggtggcgtccagtttgacctgggcttccttctcccttccacgtcacagctaagcatgtagtgcagtaagcgcccagtaagtgctcttttggaaaaataggcccttcatcagcctaggtacaaaggggaatgcctagaaactgcagcagtagggtaggtagaaggcgggtgctacataaatctttagtgttggtgcagatagaggtgcggatggggccagtgtaagcgctttcttttttattttatttatttatttatttagagaaggagtttcgctcttgtttatttatttatttattttggagaaggagttttgctcttgtcacccaggctggagtgcaatggcgtgatctcggctcactgcaacctccgtctcctgggctcaagtgattctcctgcctcagcctccggagtagctgggattacaggcgcccagctaaattttttgtatttttagtagagacagggtttcgccatattggccagcctggtctcaaactcatgacctcaggtgatccatccgcctcggccttccaaagtgctgggttacaggtgtgagccaccacgcccagtctttatttatttattttgagacggagtttcgctcttgtagcccacaatgacgcgatcttggctcactgcaacctctgcctcctgattctcctgctttaacctcccgagtagctgggattacaagcgtgcgccaccacgcctggctaatttttgtatttttagtagagacggggtttcgccatgttggccaggctggtctcgaactcctgacctcaagctatcctcctacccttggcctcccgaagtgctgggtttataggcgtgagccaccgagcctggcccttaagagctttataaatgccccccttttaagtgctcggtactagcctccctctagttcacagagaacatttactagtcgctggggtcaccttcgaagcaaagagtctgctggggaattaagcatgcaaatcacttctcaacgacgacacgccaagtgctcacagctcgtccccaggggaagcacaggcgcctaatttgtgttcctaggtgacacagtcattacttataaatgttcctggccggtcccaggaggtgggagggttgggagttacttcggttctctcaaaggttggggaaggagagatctcggtttgttttcccatctgtgaaacggggacaccacggtatttagaggacgtgcgcgggtgactatttgggggtgcagcggcttccctcctccctcccccatctttcccttctcacttccaaggcttggaaatttggagattcggaagtttgttcttggatggccagaaatcctccggaggcagacggtctggggctgaaaccgccacaggccggaaaggtgcgggcgtgaacgtcctgcgcgccgacgtccccccgcgccggtctcccctcaatcctcctgctcccctcctccgcgtccccgtccccgcccccctcctgctctcccattggccgagccggcggccgggccgccccgggatttaaagggcccgctcgccgcgccgctctgggagccgctgctggtcccggccttgcggcctgcgggggaggctgcccggaggaggcagcggcggcggcagcgcgtcctcggtccccaggaccacggcttctttcctgccaggtaggtcgccagtagtgcgcacgcggctccccagctcccatccctgggccggcctccccaggcggatctgtagcgcgag

SEQ ID NO: 43743 - DNA, 2300 bp, Homo sapien
tatttatttatttatttagagaaggagtttcgctcttgtttatttatttatttattttggagaaggagttttgctcttgtcacccaggctggagtgcaatggcgtgatctcggctcactgcaacctccgtctcctgggctcaagtgattctcctgcctcagcctccggagtagctgggattacaggcgcccagctaaattttttgtatttttagtagagacagggtttcgccatattggccagcctggtctcaaactcatgacctcaggtgatccatccgcctcggccttccaaagtgctgggttacaggtgtgagccaccacgcccagtctttatttatttattttgagacggagtttcgctcttgtagcccacaatgacgcgatcttggctcactgcaacctctgcctcctgattctcctgctttaacctcccgagtagctgggattacaagcgtgcgccaccacgcctggctaatttttgtatttttagtagagacggggtttcgccatgttggccaggctggtctcgaactcctgacctcaagctatcctcctacccttggcctcccgaagtgctgggtttataggcgtgagccaccgagcctggcccttaagagctttataaatgccccccttttaagtgctcggtactagcctccctctagttcacagagaacatttactagtcgctggggtcaccttcgaagcaaagagtctgctggggaattaagcatgcaaatcacttctcaacgacgacacgccaagtgctcacagctcgtccccaggggaagcacaggcgcctaatttgtgttcctaggtgacacagtcattacttataaatgttcctggccggtcccaggaggtgggagggttgggagttacttcggttctctcaaaggttggggaaggagagatctcggtttgttttcccatctgtgaaacggggacaccacggtatttagaggacgtgcgcgggtgactatttgggggtgcagcggcttccctcctccctcccccatctttcccttctcacttccaaggcttggaaatttggagattcggaagtttgttcttggatggccagaaatcctccggaggcagacggtctggggctgaaaccgccacaggccggaaaggtgcgggcgtgaacgtcctgcgcgccgacgtccccccgcgccggtctcccctcaatcctcctgctcccctcctccgcgtccccgtccccgcccccctcctgctctcccattggccgagccggcggccgggccgccccgggatttaaagggcccgctcgccgcgccgctctgggagccgctgctggtcccggccttgcggcctgcgggggaggctgcccggaggaggcagcggcggcggcagcgcgtcctcggtccccaggaccacggcttctttcctgccaggtaggtcgccagtagtgcgcacgcggctccccagctcccatccctgggccggcctccccaggcggatctgtagcgcgagtgctaggaccccctccccatcacctttccgactctccctcaggctatgtctcctaccaccacctccttgcagcccccggacctgggcaggactttgttggcggcctctcgccgggtggggatgagatggggggcgcggaggatacaggacaccccccctccccgtgccgccgcatccatacaaggagagatgcacacggcccccaagtgtcacagaatccccctctctgccctccactcagagcgactctaccttggaaaccagggattccccttcccgtcgcccgccccatttgatatatgggcctgaaatgtatgccatcccatcaccatcggactggactgttcacagcactggagagacagaggtccttcattcactccaggtcacaggctgtgcgtgtgcatgccgaacacccacatgcacacagttggtggctcagtctgatgtacctgacttctcacgccttcccccagtcctccagtaccgtgcctctacatgggctgggcagccccaaactgaaatgtgagtgccagagtgcatcctttaagcgaggtctgccccacggacacccgctccctctgtgtccctgctttgacagatctatccatctggccatccatccgtgggggtctgcaatggccacctttagccgccaggaatttttccagcagctactgcaaggctgtctcctgcctactgcccagcagggccttgaccagatctggctgctccttgccatctgcctcgcctgccgcctcctctggaggctcggtaagtgcctgccataccgtgtgccac

SEQ ID NO: 43744 - DNA, 2300 bp, Homo sapien
tgtctaccatgtgcatctcactgaggaaaaaggtgctggtcttggtcccatgacactcatggcctctgagaccatgggggacaggggaagggggtccaaggtgcccagagggttctacctcctcctgtcctacaacagtctcatggtggaaaaattctcccaggctccctcctccagggggagcccatgcccaacctgtcccttacagtcctgtgaaaggacaaatctcccagattcccttctccagggacactccacgtcctacctgttctgtgtctcctcataggcaaatgattctcccagactcccttctttctccggggaatctcaccaccctccctgtcttggacaacttcatatggggcctggggacccacccatgcacttcagccaacagtgtgaggataaggatgcatactcataccccatgagtaggtagatgaggatggtgacggataggaagacgcctcgatgggaggaatgtcggcagaggaacagcacgaggtagcacaggaggctgagcagcacgacccaaaccatgtgcagctggaagaagtggtagaggctgaagaacccgcctgccacggtgcttgcatgcttcaggtaggatggcaaccctttgggtgaaagggagaaagaaagggagagagagaacgagaaagagagagaaagagagggagtgggaggaagggagggagggagggagagagagagggagaacaagaaagagaaggttggtgggctagtaggaaggggaggatgacctgggtagagggcgtagccagggcaaaggccttcaggctggaatgtagtgggattggaggggcccaaagcaggtgttggggagctggagagggtggcagggcctgggtttaaagaaaagaaacatctataaagggcatttgggggaccttggaagaaattcaaatatcaatttatataggataacattattgtatccagattcaatgtcttgtggggtgatggtggaggatgtggttgtgggagatgatgtccttgttctcaggggccacacactgaaggatgtggggtacagtgtcatgatgtcagcaggttattcaggcaattcaggaagatgatagatagatagatggatagatagatagatagatagatggatagatatacagatagatagatagatagacagatagagccagctaacgtggcaagatgttgacagagaatctggtgatgcatacgtgggtgctcactgtactattttttcaacatttcagtagctttgaaaaatttcaaaataataaacctgggaaaaaatagaacatccatttaaaattaaaaaagaaagaaagaaaaaagaaagtgtagaaccttcggatctcagatttccagaaatctccgcctcctataggaatcttggggacttggaatctttcattaagatacaggcctgctatgactgtggaaacatttcagaatcctagaatccagaaatcgcatcatgccctgattatagaaatccacaatgccaacattttagaagtctagaatgtgagaatttcaaattgtcagaatctccaaacgctgtaatcatggtactttgggattccataaccctgtgacatcagcatgccaatgtcttataaccttgggatgtagacatttcagaatcccaagatccaagaatctcagctttctggaatcccagaactcaggaatactgaagggcatggcttggcatggcaggatgtggctcggtgtggcatggcatggggtggctggcatagtaggatgtggtatggtggaatggggtttggcctggtgggatgtggtggggctgaacatgttggggtccagcttggacatgctagggcctggcaggatgtgacagggtaaggtgtggctcgatatggatgaatgtgggaggtctgatatggcctggcatggtggcacacggtatggcaggcacttaccgagcctccagaggaggcggcaggcgaggcagatggcaaggagcagccagatctggtcaaggccctgctgggcagtaggcaggagacagccttgcagtagctgctggaaaaattcctggcggctaaaggtggccattgcagacccccacggatggatggccagatggatagatctgtcaaagcagggacacagagggagcgggtgtccgtggggcagacctcgcttaaaggatgcactctggcactcacatttcagtttggggctgcccagcccatgtagaggcacggtactggaggactgggggaaggcgtgagaagtcaggtacatcagactgagccaccaac

SEQ ID NO: 43745 - DNA, 2300 bp, Homo sapien
tggccgggcggggtggctcatgcctgtaatcccagcactttgggacgcccaggcaggcagatcacttgaggtcaggagttcgagaccagcctgaccaacatggtgaaaccccatctctactaaaagtacaaaaattagctgggcatggtggtgcagcatctgtaatcccagctactcaggaggctgaggcaggagaatctcttgaacctgggaggtagaggttgcagtgagctcagatcgtgccactgcactcaagcctgggtgacagaatgagagcctgtctcaaaaagaaaataaataaaatgaggaagattattaatgaggctgagcatcttttcatatgtttaagagccatttgtttttcctttactggaatgacctattcaccttctctggcaatttttctttccaaaaaattaatttttaggagctctttatatattagggagataacaggtcagagaatgggatcactttgtttttaaaatgatttttaaagaagaagacaaaaactatatctggtcacctttcatatgtacctaggcccttctgcggggcctcgcctagagcagtcacagaaatgtccttgggcaaaggatgggttttcctaagaacttctttgtccttgctaagtgggaccatcacctctttctctcccacagggctacggcatggcatacactgtccacaagtggtcagagctcagctgggccagtcactgggtcacttttggatgctggatcttctaccgtctcataggctgaggcacatctgtggaccctcataaccctcttaagacccctctcagggtgccactgatgggggatgagggaaggccctctctctactccttgaccccctccatccttgacccccaacacctcaacacacacacacacacacacacacaaaatcacaccattttcatgcctgtcaatccccaccccaccacaaggcaggaagggggtggtgcctgctggggcctagagggggatgcttggggaaacagagaaggggagatccagggcctccccgccttccttcttcctttttatatacaatttgttattgtcaaataaaagtaggaaatattcaataggcttcttcttcactgctcagaggggaataggaatgagtgaggaagggagcacagcatggataaaggtttggaagctggaaaccatgaagagagagcagactgtgattggttcatggttagtttatgattgattagatgatgagcctgaagatggcaggatcctggtcctgcttggtttgatcagggcagggacagattgcatagttggatgtgggggaggcctgattggctggaaaactgaaggatccccattctgattggttgctctgagtgggacacagaggagagaaagcaagagagatgaagggttggtgcctatttatccttaggactgagggttgtgggttctaattggatgggaggtctgggatgggtctggattctgattgattgctccatctgggggcccactggtggttaggcgtttgattggctttttagaactggcatatggagattgagggtcttcatgccaattggtcagtaggactgagaggcctgggttctaactagttcttctgacttgaggtcgggagaagagagaatgaccgctgctattaggactgaggagttctgagcactgaagagctggggagggggtggttgcagtgtatagcgtgtgatctgcttgtaacagtttcgttgcattatactaagggttactctacctagaaaagggcggaggtgaaaggatgcaacgcaacgctaatttcaccagcggaagaagcgggtacagaccttaatgagtccccgttttgatcgactgataagggaatggggaaattgaagccaggactcgatgcagattggctacggatccaaaacgcccactaaccttggcgcgtcccagtctccaccccaaacctaactcaggtgaaaatggcgccacgcgcgggggcggggctagaggtacaaagagagtgtctattggttgggagcggcacgggccgccttcttcgcttcaccattggctcgctccgtaaggcaagagaacccactaggggatgagcccgaactagggatgtgacagagcgcgagacccagcctaaagagagcccggagccagcgtgggaggccgctgccgtcgcgcgccttggtgagtgccctccacccggcccctgctccctcccccagctctccccggctacgcggccagccctcggcgtgccagcgcgagaccctttgccacccgcccccccca

SEQ ID NO: 43746 - DNA, 2300 bp, Homo sapien
tttcatatgtttaagagccatttgtttttcctttactggaatgacctattcaccttctctggcaatttttctttccaaaaaattaatttttaggagctctttatatattagggagataacaggtcagagaatgggatcactttgtttttaaaatgatttttaaagaagaagacaaaaactatatctggtcacctttcatatgtacctaggcccttctgcggggcctcgcctagagcagtcacagaaatgtccttgggcaaaggatgggttttcctaagaacttctttgtccttgctaagtgggaccatcacctctttctctcccacagggctacggcatggcatacactgtccacaagtggtcagagctcagctgggccagtcactgggtcacttttggatgctggatcttctaccgtctcataggctgaggcacatctgtggaccctcataaccctcttaagacccctctcagggtgccactgatgggggatgagggaaggccctctctctactccttgaccccctccatccttgacccccaacacctcaacacacacacacacacacacacacaaaatcacaccattttcatgcctgtcaatccccaccccaccacaaggcaggaagggggtggtgcctgctggggcctagagggggatgcttggggaaacagagaaggggagatccagggcctccccgccttccttcttcctttttatatacaatttgttattgtcaaataaaagtaggaaatattcaataggcttcttcttcactgctcagaggggaataggaatgagtgaggaagggagcacagcatggataaaggtttggaagctggaaaccatgaagagagagcagactgtgattggttcatggttagtttatgattgattagatgatgagcctgaagatggcaggatcctggtcctgcttggtttgatcagggcagggacagattgcatagttggatgtgggggaggcctgattggctggaaaactgaaggatccccattctgattggttgctctgagtgggacacagaggagagaaagcaagagagatgaagggttggtgcctatttatccttaggactgagggttgtgggttctaattggatgggaggtctgggatgggtctggattctgattgattgctccatctgggggcccactggtggttaggcgtttgattggctttttagaactggcatatggagattgagggtcttcatgccaattggtcagtaggactgagaggcctgggttctaactagttcttctgacttgaggtcgggagaagagagaatgaccgctgctattaggactgaggagttctgagcactgaagagctggggagggggtggttgcagtgtatagcgtgtgatctgcttgtaacagtttcgttgcattatactaagggttactctacctagaaaagggcggaggtgaaaggatgcaacgcaacgctaatttcaccagcggaagaagcgggtacagaccttaatgagtccccgttttgatcgactgataagggaatggggaaattgaagccaggactcgatgcagattggctacggatccaaaacgcccactaaccttggcgcgtcccagtctccaccccaaacctaactcaggtgaaaatggcgccacgcgcgggggcggggctagaggtacaaagagagtgtctattggttgggagcggcacgggccgccttcttcgcttcaccattggctcgctccgtaaggcaagagaacccactaggggatgagcccgaactagggatgtgacagagcgcgagacccagcctaaagagagcccggagccagcgtgggaggccgctgccgtcgcgcgccttggtgagtgccctccacccggcccctgctccctcccccagctctccccggctacgcggccagccctcggcgtgccagcgcgagaccctttgccacccgccccccccaccgcccttttgcgcctgcgcgagacccccagctaccgcacggttgtccagaggacagaagatccgtcttctcattgggcagcgggactggagggttctggttcggattgaccggctttgtgttccgttctagcgctgcacgccagacaccggcctttcaatatccgtctcttccctgcaggttgacggcgttgcacgctctcgcggggaggctctggctttccaaacgctggcaccgagggttgtagttctgattcgttttctttcctctgtcccccagttgcagttttcaggactacgtgggggagggaatagctttttgttgaacggtttaa

SEQ ID NO: 43747 - DNA, 2300 bp, Homo sapien
gatcacaactccattgcagcctggacctcccaggctcaagtaatcctcccacctcagcctcccgaatagctaggagcacaggtgcgcaccatcagacccagctaattttttttttttaattttgtagggacagggtcttcctatgttgcccaggctggtctcaaactccccggctcaagcgatcttcccacttcggcctcccaaagtgctgggattacaagtgtgagccactgtgcctgactcagtttattttttaaaatttttcttcatttattcttggcttcttccattcattgttttgatcactaactatgtgctcagcacattgctgagccttttgcatgctctgctgggcattccccatttgctcttccggatccattatccaccctgctctgggaccccaaaaagctgatcttttatagatggtatcatttgggccccattgattggttcgtagttgagcctggccacttctctttcaactggtccctggcagtcagtaccaacattttagtcaggtttcaaagaaatctctagaccaagctggacagagggcttttccagtgattcagtgattccccaagatctgagaatgtgaaacttggaaaagggacacaaagaccggggatcctttgagctggttcaataatggcagagctttagagatatgctgctgagctccctgggtctgtctcgctttctgccttctgaaggcttgattgttaacttcttcctgggtttcaattagaagcattagtgtccttcctggagttgaattacctggaaatttgcctcctagatgtgtaaacttgggaaagtatgatctcgtcaagtttcagacaaaggcaaactaaaaagctagaactccagagagcataatagtgttttttgggggcaaattatttaatgaagtataacattcatacaggaagtacaaaaatcatcagtgtacaaaatctccatgaattttcacaatgtgtaaaccattttcctgttttatctgaccttactaagtcagggtataaattattaattttttttgaaacagggccttgctctgtggtgcaggttagggcagtggtgtgatcaccgctcactgcagccttgacttcctgggctcagccatcctgccgcttcagcctcccgagtagctgggactgcaggtgtgcgccaccacgtccagctaattgtttaattttttgttagagacggggtctcgctgtgttgcccaggctggtctagaactcctgggctcaagcgatcagcccgcctcggcctcccaaagtgctgagattataaggcgtgagccactgcaccctgctgagtatatttttaaaaacactttacccgagggctgtggctcacacctgtaatcccaacactttgagaggccgagacgggtggatcacttgaggtcaggagttcgagactagcctgggcaacacagctaaaccctgtttatacaagatatacaaaaattggctgggcgtggtagcacgcgcctgtagtcccagctcttgggaggctgaggcaggaggatcgcttgatcatagctcactttgaggctacagtgagctgtgatcgcgccattgcactccaacctggatgacagagcgagaccctgcctaaaaaaataaaaaaaaaaaggatttttttctgttcagtggattcatttgaagcgagggccactggtatttgaaatagatgacatcatctgccagcagaggcgtgaggcaacttgaggcggggtgtgggcctgacgtcatcacgcagcctcttcctttccccgcccccttctcttggcgaacgaggcgtcagtttaacacctccgtgaatccggaagtatgctgtcaaaacaaccaaaccacggggctgggggaggcggggcctcagtaggcgtctgcacgctagctgaaatagagcaaaatgcccgacttttgggggcggggctcctggcaacagcactctaggcgcaggcgcagaggcgacctccaggcagggccaggtgggagggacggtggggggtagggtcgcgcggcgccctctgcgcctgcgccccggcacgaggtggggcggcgggcgtcagtacagtagagtgtgcgccggggtggggggcaacggtcagccgtcaccctgagacgggcggcggcgggatggcaacagcctccggggcctcggacttgtctggctccggagcgcccccgcccggtgtgggagctcaggcggcggcggccgctgaggaggaggagcgagaggtggtgcgggtccgagtcaaggtgaggctggcggtgagtcgg

SEQ ID NO: 43748 - DNA, 2300 bp, Homo sapien
gacccgaataaaaggagtcagccatgtgcatattagaagggaagagtattctaggcagaaggaatagcaagggcaaagactagaggatgggaatgagcctggcatgttcccgtaggttcctgattgctggagtggagagaatgaggggaagagtggtaggaggtgaatcagagcgctaagacagagacagatcgccaagggcctttggtgtgtatgctgaggaagaacgctgttgccatagttccagtaaacaatgatggtggctccgaccaaccagtggcactggcagtgataagagggtccacacatcacttcagtgtaatagagctctaaggtagaagtttgacattcagaaaaaagatgatgcctgagctgggcgtgaaccacgtgaagaaagtgggagggatgttccagacaggggatcagcacaatcaatggcctggagtcaggatggtttcaaggtaacttctaacagtttggtactactagagtgtaaagttcaaaaaacctggtgagaggctggctggggccccataggcccgcttgctgggactctagggttgccattgaagagattgaagcaggggagtgttgtaggtagatgtgttagattggttacagcaccatagaggactgatttaacaggagccagactggacacggtgattctggcaaccatagttgaagggatatagaagaaggattgggggcctgaactcttgcagtagcctcctcctcactggaccctgtggtccagaacacctgccttgatctggcccctggcacctctctgactttgccttctaccactctgcacctcactcttcagcatggtgatggggcccctggtggcctaccccatgtcttctctccccagaaatgtgagagcttcttgccgccagagttccgctcttttgctgtagatccccagatcacctcgctcgacgtgttgcagcacatcctcatccgagcctttgatttgagtgggtgagtgggaagatgctggggactggccagtgggccaccgacctctacagtggctatctggcctttgtttggtagggtttttgtttattttactactacaaataatcccacagtgaacagccacgtatgcatgtcttggagcacagtagtctacttttgtctgtggttttgctttctgcagtttcagttacccatggtcaacctcagtctgcaaatattacatacaataagatattttgagagagagagagagaccacattcatattacttttattacagtttacagacagtccccaacttacaataactggacttaggatttttcaactttacaatggtgcaaaagcgatacgcatttggtagaaactgtactgcaagtgcccagcgattctgcttttcactttcagtacagtgttcaataaattacatgaaatattcaacactgttgtaaaacagactctgtgttagatgattttcccaactgtaggctaatgtgagcgttctgagcacgtttaaggtaggctaggctaacctgtgatgtttggtaggataaatgtgttaaatgcattttcctttttatttctttttttttttttttttgagatggagtctaactgtcacccaggctgcagtgcagtgacatctcccaggttcaagtgattctcctgtcacagcctcccaagtagctgggactacaggcatgcaccactatgcccggataattttttttttttttttttttgagacggagttttgctcttgtcccccgggctgcagtgcagtggcgcagtctcagctcactgcaacctccgcttcccgggttcaagtgattctcctgcctcagcctcccaagtagctgggattacaggcacgcaccaccacgcctgctaatttttgtatttttattagagacaaggtttcaccatgttggtcaggctagtctcgaacacctgacctcaagttacctgtccacctcggcctcccaaagtgctaggattacaggtgtaagcccccgcacccagtcccagatagttttttgatcttctcttttttttttttttggagacagagtctcactctgtcacttaggttggagtgcagtggtccgatgttggctcattgcagcctttgcctcccgggttcaagtgattctcatgcctcagcctccagagtagctgggattacaggtgtgcaccaccacactcagctaattttcatgaggttggtcaggctggtctcaaactcctgatctcaagtgatccgcccacctcggcctcccaaagtgttaggattacaggcacgtgagcctccg

SEQ ID NO: 43749 - DNA, 2300 bp, Homo sapien
tcaaccaccacatcttatgtgaggtgggaagaaagaatgcggggcaaaatgaaaaagaaagagaaacggtcaggtgcagtggctcacacctgtaatcccaacactttgggaggccaaggcaggaggatctcttgagcccaggagttcaagaccataggcaatatagtaagatcccatctctaccaaaaaaaaaaaaaatcatccacgcatggtggcacacgcctgtaagccccagctactcaggaggttgaggcaagaggatcgtttgagcccaggagtttgaggctgcagtgagctatgatcgcaccactgcactccagccttgggggacagagcaagactgtctcaaaaaaagaaaaaaaagatgcctgtaatcctagcactttgggaggccaaggcgggctgatcacctgaggtcaggagttcgagaccggcctgggcaacatagcgaaacctcatctctactaaaaatacaaaaattaggccaggtgtggtggctcatgcctgtaatcccagtaccttgggaggccgaggcaggtggatcacctgaggtcgggagttcgagaccagcctgaccaacatggagacaccccgtctctactaaaaatataaaattcaccaggcatggtggtacatgcttgtactcccagctactcgggaggctgaggcaggagaatcacttgaacccaggaggtggatgttgcagtgagccgagatcccgtcattgtactccagcctgggcaacaagagtgaaactccgcctcaaaaaaaaaaaaaaaattagctggacctggtggcaggcacctgtaatcccagctacttgggaggcttaggcaggagaactgcttgaacccaaaaggtggagtttgtagtgagccaagattgcaccactgcactccagcctgggcgacagagtgagactccatctcaaaaaaaaaagaaaaaagaggctgggtgcagtggctcacgcctataatcccagcactttgggtaggccaaggcgagtggatcacgtgaggtcaggagttcaagaccagcctgaccaacatggtgaaactccgtctctactaaaaatacaaaaattagctgggcatggtggcaggcacctgtaatcccagctactcgggaggctgaggcaggagaatcacttgaaaccaggaggcagagtttgcagtgagctacgttcacaccactgcattccaccctcggttacagagtgagactccgtctccaaaaaaaaaaaaaaaaaagcatatacggcatacctgttccacttttgcacaaatattttatttctaaagtatgtctgggctctggactagggtgaatgaagttcagatcccagccctactatttcctggctgtagaatcttggtcacttactatttgttccaaacctttttgtcatcgtctgtaaaatgagaatggtaatattagcgtgcactgtttgtgggaggaggactggcaaaaatatgagagtaggagtttgggctcttgagcttgggcctggccttcaaatttccactctttcactcactagctaaggggccttgggcaagtaccttatcatgactgtgcctgtttcctcaaagagagtcatggtagtagtagtactcaaccgataggactgaagtgactattgcatgagtcagtattggcaaagaattcagaatagttcctggcatacagcactgtggaagcattagctagtattattatttcttatattgctgttgagcgcttgtcctagtgcttggcacatagtaactgctcaataaatattactttatatcattaaaatattagaggctgcccagccagttcctgagacatctactacaaaagaattgttcatggtttgattttgttttttacatgatttggatgatacaggaagagggactgggagttgtttgttcccctgcaggtagcccggcttcagtagaaggagaggaagccggccctgaggtctgggttatcatccccattcttatagcactttgttctgtttgcccaggcccattgctagaagactgggacataatcagccccaaagatgtcattggctccgacgtgttgctggctgagaaacggtcatcactgacgactgccgccctgccctttacacagtccatcctcactcaggtgttttcagggaccctagggacccagctgtggttggagggcagagccttcctggcaccctggttctgagcatgctggttggcatctgcccctagtccacacagctgatggtggcctccctccctcctcataggtgggccgtaccttgtctaagg

SEQ ID NO: 43750 - DNA, 2300 bp, Homo sapien
taatcccagcactttgggaggccgaggcaggcggatcatgaagtcaggagtttgagaacagcctgaacaacatggtgaaacctcatctctactaaaaatacaaaaattagctgggcatagtggcacatgcccgtaatcccagctactcaggagactaaagcaggagaatcacttgaacctgggaggcggaggttgcagtgagctgagatcatgccactgcactccagcctgagcgacagagtgagactccgtctcagaaaaaagcacagaacatagggggaaaaatgattatatcaaaattatggatctttattcaactaagtttactgcttacaaagttaataacacaaatgccagagctggagaggctatttccaacacctaagggattaataattagactatgtgaggaatccctgacaataacaggaagataaatatgggaattaccccaacaggaatatggatgtactgtattctgtatgttagcaaatttggtctgtgttgggcaaattcattctatggataagaaatttagcctctgagggcaaactaacttattcttcgttgatgtggcgctcagaagtgaaaaatctgtcaaatccatttattgtaaaggtggccaagacactgaagactaaattgtgaacagtgggctcagacactacttgattgggataagtctattgtgtattgcgaaagtcccttctgtgaatcaagggctcagttactttttttttttttttgagactgagtcttgctctgtcgcccaagctggagtgcagtggcatgatctcagctcactgcaacctccacctcccgggttcaagcgattatcccgcctcagcctcctgagtagctgggactacaggtgcctaccaccacgcccggctaatttttttttttttttgtattgttagtagagacagggtttcaccatattggccagggtagtcttgaactcctgaccttgtgatctgcccacttcggcctcccaaagtgctgggattacaggcatgagccactgcgcccggcaagggctcagttactttcgaagagagcaaaaattgctctatggattgggatttacaacctctgaagatcgtagcatcctcttttgttttgttttgttttcacccaggctggagtgcaatggcgtggtctcggctcactgcaacctccgcctcccgggttcaagcgattttccagcctcagcctcccgagtaggtgggactacaggcacgtgccaccacacccagctaattttttttttctttttttttttttttttttttttttgtatttttagtagagatggggtttcaccatgttggccatgcaggtctcgaactcctgaactcgtgaaccgcccgctttggcctcccaaagtgctgggaatacaggcgtgagccaccgcgcccggccagcatcctgttttgtaaaagccatctcaggcagtctattggtgagaaaattaaggggctggcttcacgccagcagtcagacaagggtgagggctgaagtcagagatgagatggaatgacgccagggaaaagggtcccatgacaggcggctagatgttgagcacagaggagaaagagtaggagtcagggtcaaaccttaaaacgttgggtctgacatcatggactgtgaagggtgatgacatcagtgacggtgggggataaaatgtcaggcctttaaagggtatgaggttaaagaactagaaggtgaaggaggttaacatcagagaatggcagggacctagaggaagacgactacgatggtgaggaagacatccgatccagcgggggaaatgatggcaaggacgggaggatgatgtcagggacagcaagtagtatgagattgagaaggttcctttgtggaagggataaaggcagctcagccggttgtgggggggatgctgacgtttagggtgcaccagctgttcaaaagtcgaccccatttccggaaacaccccatttccggaaacaccccatttcgcggagaacactgctcccttcgctttgctgtcccttcctctccccaccactccgctcctgctggcctcagccaatcagcacgcacgccgggacgcgcaaggggaacgttccgggacgttctcgctacgtactctttatcaatcgtcttccggcgcagccccgtccctgttttttgtgctcctccgagctcgctgttcgtccgggttttttacgttttaatttccaggtaagttgcatatgtcctgcgaaacggcggctcctcgccacacacgcgccgcgccggccgtgaccggggaatag

SEQ ID NO: 43751 - DNA, 2300 bp, Homo sapien
caggcagtctattggtgagaaaattaaggggctggcttcacgccagcagtcagacaagggtgagggctgaagtcagagatgagatggaatgacgccagggaaaagggtcccatgacaggcggctagatgttgagcacagaggagaaagagtaggagtcagggtcaaaccttaaaacgttgggtctgacatcatggactgtgaagggtgatgacatcagtgacggtgggggataaaatgtcaggcctttaaagggtatgaggttaaagaactagaaggtgaaggaggttaacatcagagaatggcagggacctagaggaagacgactacgatggtgaggaagacatccgatccagcgggggaaatgatggcaaggacgggaggatgatgtcagggacagcaagtagtatgagattgagaaggttcctttgtggaagggataaaggcagctcagccggttgtgggggggatgctgacgtttagggtgcaccagctgttcaaaagtcgaccccatttccggaaacaccccatttccggaaacaccccatttcgcggagaacactgctcccttcgctttgctgtcccttcctctccccaccactccgctcctgctggcctcagccaatcagcacgcacgccgggacgcgcaaggggaacgttccgggacgttctcgctacgtactctttatcaatcgtcttccggcgcagccccgtccctgttttttgtgctcctccgagctcgctgttcgtccgggttttttacgttttaatttccaggtaagttgcatatgtcctgcgaaacggcggctcctcgccacacacgcgccgcgccggccgtgaccggggaatagcgagtggggagagtaatggccactgacacgtaggcttggctttctctgggacgggcgggtcccgtgcttggaggtgaaacatttcggttggtgggaggccggcgcgctgtatctgagtgtgaggcctaccgggagggactggtggcgtcggtggtggcagtgaccacgcgacagccgacacttactttccttatcccacgtggccgccgccatcttgttctgccggcgttaagggaacgcagggatgttctgggcttgcgcagtggcacaaaatgacgggcgtggcggctatgaatgtgagagcatgcgcaatgtggccccctaatggtggctgcgctgagccagctcctcagattaccaccttattggccgcctttctcagcttttctgtagttacccatattttgttcctctttcttgtctattttctgtgctttttctctgctttccgtctcgctattttctcacatctccattttctttctccttcctgccaccattcttcatgttcttcccacaggacttgaactgccatgtcctctgaagaaggaaagctcttcgtgggagggctcaactttaacaccgacgagcaggcactggaagaccacttcagcagtttcggacctatctctgagggtgagacgggccatactcacaatgggggttggtgagagaaagtctgggatccttgcatttcaaggagtattaactgaaaagttaggacccacgcctccaaattctttttcttcctaagcctatggtgtagactaaggatgaggggaagcgtctttgggattagtgggagcgctccgttttccctacctatgccatctccttttccggccaccctttgctacttaacctttggggtactgactggtccacattgctccatcttctctccctctcacagtggtcgttgtcaaggaccgggagactcagcggtccaggggttttggtttcatcaccttcaccaacccagagcatgcttcagttgccatgagagccatgaacggagaggtggggcctcctatctgcagagggaccttgtccccatctgcggcttccttcattctttttgtttttccctctgtgtctgctcggggcagcgtggccaccaagccccgcagtgcccactcacaggagcatgactgccttttgttctagggggtggagggcagcggcagacagagcctggccgcctgggaggcgacgactggtcctgcatgaggccgagaagccacctgtggatggttgacctgccttgggcttaggtagtagagtctgcagacctgtgggcctggcccggagaggacctcgtgagtcttctgacatggactctgaagcctcaaaccaagagaggtgtctgtctagccctgatagtcgggcagcttagaggagtggggaggagaactcagcctgagttcagtcaagatgtaagtagtagcaag

SEQ ID NO: 43752 - DNA, 2300 bp, Homo sapien
gctggtctcaacttcctggactcaagtgatcctcccgcctcagccttccaaagtgctgggattacagacataagccactacgcccagttgacaccatgtcttaaaaaaaaaaaaaaaaaaaaaaacgtaagggaaccagttcaataaaatgtcacccttgaattccctgggcttcagatatcctcatctgtaaaatggggatagtaacaggacccacaaccttcagttattatgattaaattgactgggtacagtggctcacgcctgtaatcctagcacttagggaggccgaggcgggcgaatcacttgagctcaggagtttgagaccagcctggccaacatggtgaaaccccgtctctaccaaaaatagaaaaattatccgggcgtggtggcaaatgtctgtggtcccagctcccgggaggctgaggtaggaggactgcttgagcccaggtggcagagattgcagtgagccaagatcgtgtcactgcactccagcctgggtgacagagtgaaaccccatctcaaaaaaaaaaaaaagattaaatagattaatatatgtataaaataccttgaacagtacccagcacattgtctcataaatattagttgttcttgttaaggttacatgtttgtgcagtgaaatagagtttactctttatcaatcatgttacaaaagagtatttaatatgaaaagacactgataagcttgttacagggacaagggagatgctgagtcaacacaatacagtgtgatctttcggtgactttaaaacattgttgaattgattgtatttgttataaaaataatgtggaaaataacagctttgaattttatgtcagttgatgttaagatccaacaggaagtttaccctgataacgttaagatgaacagtttgaaagcagcttcctgctggaagttgaaatagagatgattcagatagcctctttggatccaaaccccaaagcttcttttgcctaattctatcttctgtctttagaaactcaagcctcgactgggctcggtggctcacgcctgtaatcccagcactttgggaggccgaggcgggcggatcatgaggtcaggagattgagaccatcttggttaacacggtgaaaccccctctctactaaaaacacaaaaatttagccaggcgtggtgtcggacgcctgtagtcccagctacttgggaggctgaggcaggagaatggcgtgaacccaggaggcggagcttgcaatgagccgagatcgcgccactggactccagcctgggcgacagagcgagactcccgtctcaaaaagaaaaaaaaaaaaaaaaaagaaagaaactcaagcctcaagctgtctgggggcatccaagtccaaccatcccagtcacacacacacaaccgaccttactcatcccaggggtgtgcagaggcccactgcaagaactggtgaactttcaaggcgtctttgcatatatgatgattttttattctattattcaagttttgcttggacaagattgtgctgctaaaaagtggcctacaccactttttttgtttttgtttttgagacagggtttcactcccgtcgcccaggctagagtgcagtggcgcgatctcagctcactacaacctccgcgtcctgggctcaagcaatcctcctgccacaacctcccgagtagctgggactacaagcgcccgccaccatacccggctaatttttgtatttttagtagagacggggtttcaccatgttggccaggctggtcttgaactcctggcctcaagtgatccacctgcctcggcctccctaagtgctgggattacaggcgtgagccaccgcgcccggccctacaccactttttaaaagtcgtgtttcttctcttttttataatgttgtacttctgatttctagggaatgattagcaaactcacccctgacgctatgtcccttggacattatccttgtatacacaaaaagtgcaattaacgagtgggtagaagtcaaggggtggagcctccgtccttgggcttgaagccaatgtccctcaatgcgcctgcgagactcccacgccctgggaaggatgcctatcgattcgctctgggctcggcagttctttctgatagcaggcagccatcttgcctggagcctgagaaagggaggagagacagaaggaaccggcgacagtggtctcagggccgctccggggggcctcaagaaccggaggcagccccggaggtggtccccgatcccgggctatgctcttggatctgagaagggaaggcggagggcggcggggacaagatgggtggaga

SEQ ID NO: 43753 - DNA, 2300 bp, Homo sapien
gagaaagggaggagagacagaaggaaccggcgacagtggtctcagggccgctccggggggcctcaagaaccggaggcagccccggaggtggtccccgatcccgggctatgctcttggatctgagaagggaaggcggagggcggcggggacaagatgggtggagaatgtcaagcaaggaatgctaggcgggggaggggcgttgctatggcgactggggaggggcggtgtctgttctgaatcgctgtgtgtcacccgggcgctgcccaggaagggcagggctggggtgatgaccatggtaacacccgggggggagttcgtgacatctccggcgcggagggactcgatgtctatggcaatggtcgcctggtggaagggacggaactagatcccttcgctcgggacgctcacattccaggcccttgtcctgcaggctgccgcgggcggacacgccagaggaggaggccggggaatggccgcggtgtggcagcaagtcttagcagtggacgcgaggtgaggcgtggggtcaaagcccatgggagcagaacttactgtggtgcatgcgcaatggcgataagtgaggctgggcggagaacttgccttatgcggctgcgtgggcatgccggaggtgagcatgcgcagtagcgggggcgggcacgcccgcggtgagttggctgcgccggagaggattctaaacagcaagctgggaaaatgtggtcagatgtgggcatgcgcaaagcggctacctgtgagagggaggtggggctcaggcaggtgacatcctatcccctatgggtgtcccctagacttttttttttttacatcatcacttccccattctgaccccatcacctcccaacgctgacccccataatgtcagtctgatttctgtcgccctggtatactgaccctaattattgtctgcgctgacccagtcaccccgtagggaccccagcacggcagcagactgactctgttgtctgcaaactgacctcatgaccatgctcattattactgcagactcactcccaccacaggaccaagaggtccctcatcaccactgctagtcattcttaccacctaggccccagtcactgccacacacctcactctcctgccgtacccccccccccgagctgattgattccctctgtcctgtgcctgctgcctgccctgcatcctgaccctgcaggtacaacgcgtaccgcacaccaacgtttccacagtttcggacgcagtatatccgccggcgcagccagctgctgcgggagaatgccaaggctgggcaccccccagcgctgcgtcggcagtacctgaggcttcgggggcagctgctgggccagcgctacgggcccctctccgagccaggcagtgctcgtgcctatagcaacagcatcgtccgcagtagccgcactactcttgaccgcatggaggtgagcttctggccacattcacccccgggcataccctgcctgcacacattcactccactgactttcatcaagcacctgctctttgctgggcactgttctgcatcagcagaggacaaaaagataatatgccaagtaaaccagtaaacacacaaactttgtaaacaggtcagtaaacatatagcaagccctgtctttagtatctgctgagcagggggagggcaggaacagcagaactcgtgaggaagccactgcagtagtacaagtgggcagcggtggtggtggcaggggacacagtgagaagtgatctgactctaggtagattttcagggctccacacctcaaaggttctcgggctttttgcaagatgcacccaccctgaccctctccatttgcaggactttgaggatgatcctcgggccctgggggcccgtgggcaccgtcgttctgtcagcagaggctcctaccagctgcaggcgcagatgaaccgtgccgtctatgaggacaggtatgcaccagaggcagccaaggcggggggcgggttgcgaggaggagaggggccctggggcaatggcagactgaacactctcgcatctacctcctgtcacccctcacttcctattggggcccaggccccctggcagcgtggtgcccacgtcagcagcagaggcaagtcgggccatggccggggacacgtcactgagcgagaactatgcctttgcgggcatgtatcatgtttttgaccagcacgtggatgaggcaggtgagccagtgggtagcgggttccatcaccaagcgtttgcccaaactgtgacaaccaaccaaggcatccttttctgaatccaaggcccctggcacactccaaaggaggaa

SEQ ID NO: 43754 - DNA, 2300 bp, Homo sapien
cacgtggatgaggcaggtgagccagtgggtagcgggttccatcaccaagcgtttgcccaaactgtgacaaccaaccaaggcatccttttctgaatccaaggcccctggcacactccaaaggaggaatgaccatccataaagccttttgtagactgaaaatccctctgcaaagtggtcagtgcttcgtctactggaaagggcctcagaagcctaagagagagccctttgcagcaggctgcctgggttcctgagtcacttggaagagttcaaagcctttgctgatgataaatccccttgcagagggcagagtgggctacagtgtcaagggttttgcaaattgccaagaccttgattataaagtgttcgctaagacaggaactttttcatgttgcagaagacttttgcaatctgcaaaggagctgctaagacttagggagctttggcagagggtcttcaggggttacagttccctttgtcagccaaggaaagccctttgctgaggccactgttcctcatgcagtggggccccagccccaggcacacacgtcagagccttttagagagaaaagtgcccagtgagtgtgcagattcccactaatggcttcttggcattgcagtcccaagggtgcgcttcgccaatgatgaccgacaccgcctggcctgctgctcactcgacggcagcatctccctgtgccagctggtgcctgccccacccacagtgcttcgcgtgctacggggccacacccgtggtgtctccgacttcgcctggtccctctccaatgacatcctcgtgtccacctcactggatgccaccatgcgcatctgggcctctgaggatggtcgctgcatccgagagatccctgaccccgatagcgctgaactgctctgctgcaccttccagcctgtcaacaacaacctcactgtggtcaggctccaggacacccactcaccaagggctggtgggctgggtcaggaaggctatctgagggaatcagagtataaggagggacagccagggggggcctaggacccccccaccccccacccaatctcgtcagagcagtcctagtgtggtcagacttaaaagggaagcagatcagaagacgggagtgggccaggcgcagtggctcacgcctgtaatcccagcactttgggaggcggaggcgggcggatcacgaggtcaggagatggagaccatcctggctaacacggtgaaaccccatctctactaaaaatacaaaaaattagctgggcatggtggcgggcgcctatagtctcagctacttgggaggctgaggcaggagaatggtgtgaacctgggaggtggagcttgcagtgagccgagatggcaccactgggcgacagagcgagactccgcccccaccccccataaaaaggggaatgccgttcttggtctgggatggccttgctgtggtacactccagggagcacgggccagggtcagggttctggctctggagcccctttggtcccatcagctacagtcctacagttttccaactgcaggggctacctctgaggagcaggatgatgaggctgagcctcgtctggtctgtcagtggccccaccgtgtcagactccagggtagattggtcagagagcaggggaaggacattagaaagtctggtgtggcccggggtgtagtggggtgaactgcagaggaacagaccaagagtgagcttgtgggccgggatcctccccgcattagcagcagccccacaagttccagaaaggagcagccagggagcaggggaaagctgggatcacaggcctaggcaggccctatggttctcacactgtaggaggactggccaaggggcagcatgatggctctgaaggccctttagtcccgtaggcaggtggcctactctgggcagattgcaaaaggggctggctagggaggtggattcatgcctggtcaccttgtctacctgccacagccctattgtgaatagactctaatagggaccagccagtcgcatcaacagcagccccactgtggtcagactcaaggagggcctggctggaagcaggatgatggtctgtgcattctccccacaggtggggaacgccaagcacaacgtgcatgtcatgaacatctccacaggcaagaaagtgaaggggggctccagcaagctgacaggccgtgtccttgctctgtcctttgatgcccctggccggctgctctgggcgggtgatgaccatggcagtgtcttctctttcctctttgatatggccacaggtaggcagacagcaggcctgcatctgggtgctcgccc

SEQ ID NO: 43755 - DNA, 2300 bp, Homo sapien
gggcttgccctgatcagcaggttggaggtgctccaggcccgaagcttagctgtgagtggggacacgggagggaggttggaactgccactgcagaaggggttctgaacctaggttcaggagagaggctttgaacctgcacgtgtgggaagccatggaagtttccaggaaggactgcaggtcccaactggagatgtgccgttcctccttcaggtacctgggaatgtcagtcacaccccagacctgctcagctcccccaaactgctgttcctgtatctgagagcttcaagtctccaaatggcctacctcatacatggggaaactgaggcctggggaggccggggactgagctagcattcacttgtggaaatagtctggcatcatctggagaagttagagacatgcaaaccctacagccctcagattcccgtctgagagtctgcatgcctatgtggaccaggagatgtgtgcgggagtgaacactgcagtgttgctcccaacagcaagaaccagaagcagcccaaagggctgttacaggagaatatggacacccaggctgcacatgcacaccatggaatgctgtatggcagtggaaataaatgaacagctaccactataggcaaacaggaatcacagcaacagccaagagtgaaggcgtggagggacgagaccatgcactcacacctggcctgcctggctcgcactccgggcaaaggggtcagaacagtgactggcacacacgttaagtgctatgtgagtgttaagataaaactaggatgtccagtggggagaaagcaagcctttgaagattatgtgcttttacaaacttcaagtgcaatgaaaactaaacaagatgttgttcaggcattcatatatgatataaagttcctttctttaaaaaagggatgggctgggcacggtggctcacgcctgtaattctaatactttgggaggccgaggcaggtggatcacgaggtcgagaaatcgagaccatcctggccaacatggtgaaaccctgtctctactaaaaatacaaaaaaattagctgggcgtggtggcgtgtgcctgtagtcccagctacttgggaggctgaggcaggagagtcacttgaacccgggaggcaaaggttgcagtgagccgagatcgtgccaccgcactccagcctggcgacagagtgagactccatctcaaaaaaaaaaagaaaaaaaaaagtatgacaagcagaaagtaatttgggagctgcggggaggcaagggtaagggatggggaagtggaccagaggcatatgcgtcattggcagtgtctaagcactcacgataggcgtggatcacaggggctcgctctgtaattaaaaggaaaagggtttttgttgtgttgttgttgttgctgtttttgagacaagggtcttgctctgtcatcatccaggctggagtgcagtggtgcagtctcagctcactgcaacctccgcctcctgggttcaagcgattctcctgcctcagcctcctgagcagctaggactacaggtgtgtgccaccatgcctggctaatttttgtattttttagtggaaatggggttttgccatgttgcccaggctcgtcttgaactcctgacctcaagtgatccactcgtctcggcctcccaaagtgctgggattacaggtgtgagctattgtccccagccaaaaggaaaagttttactgtagtaacccttccggactagggacctcgggcctcagcctcaggctacctaggtgctttagaaaggaggccacccaggcccatgactactccttgccacagggagccctgcacacagatgtgctaagctctcgctgccagccagagggaggagggtctgagccagtcagaaggagatgggccccagagagtaagaaagggggaggaggacccaagctgatccaaaaggtgggtctaagcagtcaagtggaggagggttccaatctgatggcggagggcccaagctcagcctaacgaggaggccaggcccaccaaggggcccctggaggacttgtttcccttgtcccttgtggttttttgcatttcctgttcccttgctgctcattgcggaagttcctcttcttaccctgcacccagagcctcgccagagaagacaagggcagaaagcaccatgagtgggggcccaatgggaggaaggcccgggggccgaggagcaccagcggttcagcagaacataccctccaccctcctccaggaccacgagaaccagcgactctttgagatgcttggacgaaaatgcttggtgagctggggatctcctgccc

SEQ ID NO: 43756 - DNA, 2300 bp, Homo sapien
aggtctcctgaaaaagtgctagtccagaatgattcactttccagatgagcaggagacacccaccccaaggtcacttactgcaggttttacagaccagtttaagaaactgcctaagatcaagtaatttagtaaatggcagagcctggatatgagtccaggtagtcaggctccagaatccagacttttgcccactactttatagtgtttgggggcactactggcgacagacccttttgtctccctctcagatccagacaggcagaggtcctgtcttaaatcactcttgtgggttggacaggtctcctggacacccgggagtgggagagccctgctgcccgaggagactgggggtacatgaggatgagcacctgactctgctcgagaaggagtaagggagggaaggggatgcatggtgggaccttcgctcctgtctgtcccctcagggcaagctggggctgacggaacctcagaccagccagtcacttcttaatgagctcacagctggactggcaggcagacagaatatccgtttggttaactgtataactgtttggttgactacagaactcatggagtgacagggagaaggcgcaacttgaggacgtgacagcgcagtttcctgaacatctaactgaatgacagcctgcctaggactggctggggctggtagcctgacagtggaaaagacaggcagcctcctgaggaccttgcaggctggctgactgatggcccgtggtgctactgcctgcctgggtggccggatgttgtgaatgactattgtcaggaatcacagctggcgggggaatgtctagatgttatactgtctggcaccgtgtaaaggagggccacctggggaaacttcaggctaactgatcaacagacccgtggctgcttgctaggcagctgtatctggtgatcaactatccacgctgctcgaatcacagcatgctggagggcctggctgggtgctctgactgactgatcacctgacagacggtgcggtcagtcggatgctgagaatgactgacgatgtgatgaggggcggattgaacgagtcacaggccagctggccaggagcaaaatcggcatagctgtctgactcgatggctgtacgtggttacggactgtctgccctgatagaatctcagcttcaacgcatcagaggagactgacttgaccaatggtggggatgagtcgcctgagaaatgacagactggctgacccactgacaggtggtgtggaggcttaatcctacctctagttgctgtgactatttgctttgagggcctagctggatgttgtgactgatcgtggtgtgaatgagaagtaatctgagggaaagacagtgaccaactgatagtgcccgacagggctgtattagatgctgacagtgacagcttgtcccgacctaatcacagcccgcctgggggcatggctggatgctgcagtctatgagaggatttagccagggagaatcgcagctggtcccagggctatggtgggtggagaggaggactgattgatctgctgacaacgtgaggacaggatggtcttagggaatgataaggcaggctggctaacagtgctgtctgcctgcctccagggagtcgccgctggccagggcacaaatggaagccagtattgactgcccagcagtgtggatgggggccgggagtctgactaggcacctgtctggggcgaccgcctgagcagttggatacggcactagtccacctgggagccccggcctgcttggggttaaaatgagatgacgggctgactgacggtgataacagggagtatgacaggactgaggaaccactgcgactggctgataacgtgattggctagcagtgtgacagacagaccagcgcacgggcagggcctctggcaactttagctaccgccgctgtcgctcccgctgccgccgccgcccagacgcactctgggaaagcgcggcgagcacccgcctccgggaccgagccgggcggcagggaggggttcggtcacggctctccggttggtccgcgcgggtgctgcgagtcgggagccgcggccaataggctgcgcgttcccggccacgcccgcgcgagcgctcttctcgcgaggccggctaggcccgaatgtcgttagccgtggggaaagatggcggaaaatttaaaaggtgaagcagtggaggcagaggcgcgggcccgctggccgggccgggtgggctggaggggtggcgttgccggctcggggccccggcgtccgaggccccggcgccgggagccggaagctcggcgcggaaaggatgaggc

SEQ ID NO: 43757 - DNA, 2300 bp, Homo sapien
acaaggaatgctaaggctgcctggatctcagctcccacttttcttctttgctaagtaccctgataaagtcaacccagtgcagaagtattttggtgttcctgtaaccaccagcatggccatgctggtgtgtaccagcttggaatactagcccctgcccaatgtccctgtgacactcagatcagtctcccaggcctttcccatagggaaagcagggagtttcagacacacagtgaggagagccgggtgcacactgtgaacacagggtgggaagagctgcacacacacaccgggtcccatctccctacctctcccacgtactccatgacgaagctgttcttgcgaatcttctccagggtgcggacgccccagccacgcccatcatccgtgcggaagatgcagaggtcatatcggatacccttctgtaccacacgatttgggcagtcatagccgcagcggcagcgggagttgcactcgtagatgggcagcccggctcgaagccgcacctggccctggtcattgtaggcaaacttgtgcagtgacgcccccgggcagcagcctccagtgggtgcccacagacagtcctggcactcgcagcccacagccacctggttgagggtgatgccctcaccaacacggtactcattgatgtacacgaaggcccgcggagggccgtccaggtccacctcattctctacagtgatgcgtcccagatggctgcgcttggcattgagctcctgctcccagcgacggagcgcccgcctctgcttggccttctgcaccaggtagttggccaagcttgggtccaggtgccggggggtctttgaccggtggtgccgccggagcagctccctttctaagtccttgtggaactgcttgaggatacgcacacacttgagattctgccgtggctcccaggtgctctctgagtctggatatccacgccatttcaccaggtaatattcctgttcctgttgggggtgggtagggggacgggggtaccgtaagtagtgagatctttgggccagccttcatggggcttccatcccaaagctgatggataacacctaccccaccccaccccttttctggaatgacttcatgcggtgattaaaaagcatgggctctagagtgaggattactaggttcaaatcctcctctcccccttactgtctgtccaaactgttccaacttttaattaatctcccaaacccactcctctccttggtcttccccatcatcagctccctcccttctagctgttcagaccggaactcctggagtcatccttgacttctcttttgttcacacttccgacacccaccctctgcacatcccgttggccccaccttcaaaatacgtccagtgacaaaccatcatcactgccaccaccctggctcacctggaccctgacaagtccttgcctgttctaggcagcttacatgtattattaactaacttaatcctcacaaccccacatgaggtagatgctcctagttatccctcttttacgacaaggaaaatgaagtactgaaggtttgggtaggtagcctggggtaacacaaccaggactggaacccaagcatgctgactccagtttgttctcctaaccatcctgccactcccccttctggcaataactatccccatttcagttgttaggggattaaatgagtttccgagaggaaacgcctggcacactgaaagtgctcaatagccattagctattgacatttccactccagggttcagcatctcaatctctgcaattactttgtattcctagggagatgggaagagatttatttgggaattcattccggctcctgcccagaaagctacttagtttccctatctgtaacatagggataaaagggtctattcatcctgtgttttcagggtcaaaggagaaaattccctttggaaacagatgtgggcagttggggacaagagggcaggacactaacttccttgtgacctgtcccctcccagagcatggtcaccccagactcacgcggatcttcttgtaatcgcacaggtactcgacttcaaagtcatagaggttcctcttagagataccgagggcagggcaggagagcttggccaggcggcacaggtcctgcagctgattccaagaagacttgcaacacacgctgcagcctggatcaagcggggcagaaagaactattactgggcagcctgactaggccaggagtcaaaggggaccccaaatcctccctgggacatcccaaagactgactaagagtcagggaaatttaatccacaggccttccccagtgctg

SEQ ID NO: 43758 - DNA, 2300 bp, Homo sapien
agtgacctagtgcatgtgtgtagtgtgcgcacacacacactatggaaacacagggaactgtatctggaaggaaacaccagaatctgaccccagtggtcattctgggggaatggggatagagatgattgctagagtccatgtactgatgtgttgttcaaatctttttttttttttttttttttcgagagaaagagtctccttctgtcatccaggctggagtacagtggcacgatctcagcccactgcaacctctgccaccaattcaagtgattcttgtgcctcagcctcccgagtagctgggattacagctgcgtgccaccatgcccggctaatttttgtatttttagtagagatgggggtttcaccatattggccaggctggtcttgaactcctgatctcaattgatccacccgccttagcctcccaaagtgctggaattacaggtgtgagccaccaccctcagcctgtttttcaaatcttttatacaaacctgtattcacatattatttgtgtaactctttttaaaggaaaatcatatgcttaaaaacaatatctggccgggcacggtggctcacgcctgtaatcccaacacttcaggaggccaaagcaggccaattgtaggcaacatagcaagacctcatccctactaaaaatacaaaaattagccaggcgtggtgacacacacctgtagtcccagctacccaggaggctgaggcaggaggatcccttgagcccaggagtttgaggctgcactgagccatcatggcgccagtgggctccagcatgggtgacaaagtgagacactgtctcaaaaaaaaacaaaaacaaaacaatatccacaacacaaagtgtttgtgttgggggtaactagaaacaaaaatctcaaactcacatgctccaggggccagacaagtaacctgtaagggagatgggggagttctgctcagggtaaagtgaacagcaactgggctgatgaatgttctctgactctcagcagcggaaggtgagggtgagtgaagggtgagtggggaggaggaggaagactgcaaatctcatcccccaaaactcatcccccaaaataattcaggaacatcacaccctggggctcagaacttttttttttttaaacagagtctcactctgtcacccaggctggagtgcaatggcgcgatctcggctcactgcaacctccgcctcccgggttcaaactattctcctgcctcaggctcctgaatagctgggactacaggtgcacaccaccatgcctgggtaatttttgtatttttagtagagatggagctttaccatgttggccaggctggtctcgaactcccagcctcaagtaatccgtccaccttggcctcccaaagtgctgggattacaggcgtgagccaccgtgcttgaccaaggggctcagaactcttaagagttcagggatcttggcttggaaacagacacctaatgggtcagagcagtcatactctaactcagatagctcacaacttcatacccctgacacacactctcaaacagctcacagatctcacactttggagacatacccctaagtagaccagaggcatcacacgctagaataaagatccccttaatacttggtggtttttcagtattattattattgagatggagtcttgctctgtcacccaggctgaaatgcaatggcgccatctcggctcactgcaacctccgcctcccggattcacgcgattctcctgcctcagcctcccaagtagctgggattacaggcgcccgccaccatgcctggctaatgttttgtatttttagtaaagatagggttttgccatgttgtccaggctggtctcgaaatcctgatctcaggtgatccacgtgccttgtcctcccaaagtgctgggattacaggcatgaaccaccgcacccagccttcagtgttaacaagaagtaatcccttacacacatccactttaagctttcaattttgaggccctgaatttaatgttaaagtccttccatttgcactacctacctgtgtcacctcccacagtcctcagcctgtgccctcccattcctgccccttgatctccaggcgctgagccagaggattgtcgggaggaccctgggcaaagacgcctaccctgccatgctgcgccatctgccctccaggctgccagtcaagatgtggggcaggactttggagaaacaggtgaacaagatggcccctggggatctggggcaagggtgttggcactgaaactggtctagtaacctgtttcccttctctgcgggctcccatttcctg

SEQ ID NO: 43759 - DNA, 2300 bp, Homo sapien
cacaaagtctgactagtttctattctgttcgattcgattccattggattccattctattctgttctaccctttgctattttattattttctattccactgcgtttagttccattgaaaccagcccattttaaacaattgatttcactgagctccagctaaaaaaaatcctgtaccattctattttcctgagtggaggaggcattagcaaagttgctgagttttgctctcccggtggatacaaaagatccacatggacataggaactgcagaaagagaaaatgaccgacattttggctccattgaaaataaagtcatatgttgaaataaattttattaactttcttttttaattccctttttgagacagggtcttgctttgttgcccagcctggagcatggtggcatgatcacagctcactgcagcctcaacctcctggactcaagcaatcctcctacttcagcctccctagtagctgggattacaggtgtgtgccaccatgcccaactattttttgttttcttttttctttttttttgtagaggtgagggctcactatgtttcccaggctggtcttgaattcctgggctcaagcaatcctccctcctcagcctcccagagtgttggggttacaggcatgagccactgcacccagcccttattaaccttctaacatctgtagaatctgtcacaataccctgtttatattcctgatattggcaatccatatattttcttaatttctcgagagaaaatagacattgctagtattttattaatctgttcaaagaatcaacttttaacattgttggctttattgtatctttgctttctatttcaccagtttctgctgttataatttccttccttctactttcttaggttccacttgccattcttttcccagtttcttgatagggaagctcaggtcattgattttcaacttttctacttttctgatctgtgcatttagaactatagatttcctctaagcactgctttggccacatctgcatcattttgatagtctgttagaaataaactccacctattcctcccattattctattcttccctgccagcttagattcactccccagatcctgctttgcagactcggagctccatccttgcaaattcaaggacgagcagggatggctgtcttcaataacaggaaggccagcgtagctcagaacccaagagtgagtgagagataagtgggagggcaaggcagggtctggatcctgcagactcttggaggtgaagttacaaagcctgctttataaaatgatgatcaagacatagtcatcacacaaaggactgggtgcagtggctcacgtctgtaatcctagcactttgggaggccaaggtgggtggattacatgaggtcaggagtttgagaccagcctggcctacatggtgaaatcctgtctctattaaaaatacaaaaattagctgggcatggtgacgtgcacctgtaatcccctactcgggaggctgaggcaggagaatcgcttgaacctgggaggcagaggttgcagtgacctgagattgcaccactgcactccaccctgggcgacaagagcaaacctcggtctcaaaaaaaaaaaaaaaaaaagacatagtaatcacacaaggcttactgtgtgccaagccccgttttacacactctacaaaaatataatccattttatttctcaccacagcatataaaatccctatagtcagagtgcccggaacaccatgtccttcctcctttggcctcctctacagggaagtgttctgtcttcctacagggtcctcttcaaggtccccttcaggttgccaggggcctctgaattcctctcctaaagctcaaggtcagcgctgtgtttcctagcctctctccacatggccttaatcatgacagctttgggggcaccctgcgtgagccacctttgtatctctccacctgtccctggctaaactgggggaggagccagccctcagccccggcccagccctgcacacctgagcacagggccctccatggcttagagccgggcctttccatgggcctctgctgccctctgcttgtctctgaaagagaaagggagagaggaggacaggaaatgggagcccgcagagaagggaaacaggttactagaccagtttcagtgccaacacccttgccccagatccccaggggccatcttgttcacctgtttctccaaagtcctgccccacatcttgactggcagcctggagggcagatggcgcagcatggcagggtaggcgtctttgcccagggtcctcccgaca

SEQ ID NO: 43760 - DNA, 2300 bp, Homo sapien
ttagtgtcagtatcaatattacaatattggtattactcttagtgtcagcatattattagcattagtactataagtagtagtagggttagaaagggctatgtactctcccttgtatgcagtaggtactcaataaataaataggggtacttaatatttattgagatttcagattcaagtaagttaagatcatgtaacatgggttaaaactcatttagtctccccagtcactgcatggagtggcttattggggtatattattaccccatttttacagatgaggagctaaattccagaggggatggtaactctcccaaggtcacctgatccattagtggttagggcagtctatgaacgaggatgagctggctctagagaccatctcctgaaaccactgccacttaagtcagaggtgtctttgtattcgttctccttattactgatgagggttcagcatggggcgtggcacaccagcaggagctcaataaataggaattcatgggcttgctctctttcctcctcaaatctcccattgcatatgaggacactgaggctcagaggagtgagataagaatggtaagatccctccagggtgggccagtgggcaagctgaccccactgacctggggctccacccttggcctctgccctttgtaggtctcagtctccccatctgtagactaggtgggcaggacagctccttgtcccacgtgtgcatgtgtgtcagatgctttcatatagaaaaagtgctcaggttaggtacaagtctatgtgaggtctatgagacactgtggttgttgtcattaatatttggaggaggtggggcagggcaagagtgtggggactggggtgcggaggcctagccacattctggttgtcccctgctgagggctgagggcagagccacaggctacatcaatccacatcctcccatcctacctgcatgggcaccacatgcccagggtgtgatccagtctgcctggaccttcttctgagtctgtctctgaatatccctctgtctctgtctcccttctcagttctccacttctgtctttggcctctttccctttcaggttttatctgtcacttctgtccatctctgtctctcattctctctttgcctctctctatatgtctttaatggtctctggttctccccgggtgtctcgccctctttgtctctccttttcttttgtgccctctctctgcctctttccacgtctgtctccttctctattcatctctgtcactctctttctccccatttccatctctctccgcctatctctgtttttgtttgtctctctgcctctgtctctcccactccacccctttcctttcctaccctatcccactcctcgaggaatcatccctggctcccacctcagtttcccgcctccaaggcagcatggcgggcaagaagttgaggccactgtccctgggtgttcctacccccacaccctcaccccaagacagcctgttactgcggcgccaacagccacggtcgcctacatctgataagacttatctgctgccccagggcaggccggagctggcgtaagccccagtggggcgctaagtgagtgtgcccctgcctcccgccagcactggcctggcctgcaggcttagcctgggtcatcaaggtatcccacaggctctagttcaaatccagcagaacctctctgagcctcactcttctcacctgcaaaatgggtacagccacatcccttctctccctgcagccaggaagacgcacatacacaggagtctagcccacaccggccccgcacaaattaagggctttactctctgaaaagcccagtgaagtcatgaaaccatatctgctattttcatttatcttggtttcagcctattttgcttgtctggacactacagtccacgggagcctaggtcgagcgaggtccaagaatccccagggtgggcagggagggtggaagagggcctccagtgcccaagaggtgccccacaagcatgggacccgccccctcccctggactgccccacccactggggcaccagccactccctggggaggagggaggagggagaagggagggagggagggagggaggaagggagcctcaaaggccaaggccagccaggacaccccctgggatcacactgagcttgccacatccccaaggcggccgaaccctccgcaaccaccagcccaggtcagtctcagcccccagagagcccccaccaaggcaaccctgggcctgctgcccctacccttatgcttgctccaggctccccaacccacagctggtccccaaagtgtc

SEQ ID NO: 43761 - DNA, 2300 bp, Homo sapien
acaggaacccatagtctggagctctctagaaacccctgcttgattcagtaaaggtacaatatagaaaccataggaatccctgtcctcattctgtccaggaacatttggaatgacccaccagaggtacactagaagtgacctgaccctgcccatgaatccctgtcctcacacacctcacacaaaaggaatacctctccttaggaaaaaaggcccctaccctcaatcctgcaaaagaataccagccagatagagaccaaggcctgacactacagcacagatcggcaaactatggcattcaagccaaagccagactgtgggctgttttacatttttaaagggttgttttttaaaaagagaaaaaaagaaaaatgccactgagaccgtatgtggcctgcaaagcctaagatgtttactctctgtccctttataaagtttgctgacccctgctcttcagaaacctctcttctgatccaacagaaaaatgggccttgaccctttgcaagactccctactctatcaggctgcaggtatcagaactctagaatttttttgtagtgtgttatcattgtatgtgttttctttggtgagtgtaggggtttaaaggtcttaggtctgcaactcttttgcgctgagacaaaagataggttcacgtaggaggggtgagagggaagaggcggcaggacatcttcaagaggatcagagggcaaagctactgggcggtgagaccgtcaatctgtcagtctgatgcagaacccccggactgcttatctctccggtcccagcttatagcccggtaggaaatggtggagaatgagacagggagattaggaggacaaaccggcctcctgcagagctgacatttagacatggagtgggagttgcgggggagagggggtgcctagggacagctccccagacgcacacacactttctattactgcttgggagcagtggttacccgttggagggggcagatagggagagctgctgcccatgagaactcccatcctcaaggccattctggccctgggcactattattatcacaactttccagatgaggaaacggagcacagaactgttcagcaacttgcccaaagtcacatggttaagtcccgtaacctcagtttccttatctgcaaagcagccttaataatgggaactacctcatagaattgtggtttacaacgatgcctgtcacataatacttgctatcattaccattccctgcccccactaagactccttccactcagaatattgcggcagaatattaatagctaatattcggccagtgtttcctgtgtaccaccatagtgaatattaactcggaaaatcctcacatttagcatcgtcaccacgcctattttggccgccaccaccaacgtccagtggcaacctcgctctcggcccagccacaaccagcccgcccgcgctacgtcatcacggcgcgtcgcgcgggaagtcgcggggaaaaggtaagatgccccttcctaattccctcgcttccttgcttgctctccagacaccgccgacccgaagggctcctaagtgactggacagggacggaggggcggcggctatggcatccgggacgacagcgacgatagccgaggcaagaaaaagcttgcaccgcagccctgtcgggaaccgccggcgcctgccttttacgtaggcgcagcacagctggcgtagcacgccgacgcaccgccccgtcgcctgtgagctcgcggtgtggctcagcccagctggcgtagcacgccgacgcaccgccccgccgcttgtgagctcgcgagaggtgtggctcgcgcgaggggcgcggccttgaggcacggtcccctctggaggcgggatctgggcgggcagtcgagagacgaggcccaatggaaaagaaaagcctgagcgctcgcgtccccacaggtcgccagaaacttggtggagcgagccaagggcggagtttgagaaaggggctgcgtccaatgagtggagcggtgagtacagcgcgtcgacggcggaggcgggaagggggcggaggccgaccgaaggcggctagggactggctgaagagggttagcgaaacgttagcggtcgggtctgggcagggggtggagctggttgaaggaacggggcagtcccctgaggagcggggctggttgaaacgctaggggcgggatctggcggagtggaaggtaccggtccggcccgataaggggtggagttaagtgaatcgttaagggtggagtcgaaaccggggtcggggccggggccggctgagtgaaagggtgggtgattatcccggga

SEQ ID NO: 43762 - DNA, 2300 bp, Homo sapien
ggggtgagagggaagaggcggcaggacatcttcaagaggatcagagggcaaagctactgggcggtgagaccgtcaatctgtcagtctgatgcagaacccccggactgcttatctctccggtcccagcttatagcccggtaggaaatggtggagaatgagacagggagattaggaggacaaaccggcctcctgcagagctgacatttagacatggagtgggagttgcgggggagagggggtgcctagggacagctccccagacgcacacacactttctattactgcttgggagcagtggttacccgttggagggggcagatagggagagctgctgcccatgagaactcccatcctcaaggccattctggccctgggcactattattatcacaactttccagatgaggaaacggagcacagaactgttcagcaacttgcccaaagtcacatggttaagtcccgtaacctcagtttccttatctgcaaagcagccttaataatgggaactacctcatagaattgtggtttacaacgatgcctgtcacataatacttgctatcattaccattccctgcccccactaagactccttccactcagaatattgcggcagaatattaatagctaatattcggccagtgtttcctgtgtaccaccatagtgaatattaactcggaaaatcctcacatttagcatcgtcaccacgcctattttggccgccaccaccaacgtccagtggcaacctcgctctcggcccagccacaaccagcccgcccgcgctacgtcatcacggcgcgtcgcgcgggaagtcgcggggaaaaggtaagatgccccttcctaattccctcgcttccttgcttgctctccagacaccgccgacccgaagggctcctaagtgactggacagggacggaggggcggcggctatggcatccgggacgacagcgacgatagccgaggcaagaaaaagcttgcaccgcagccctgtcgggaaccgccggcgcctgccttttacgtaggcgcagcacagctggcgtagcacgccgacgcaccgccccgtcgcctgtgagctcgcggtgtggctcagcccagctggcgtagcacgccgacgcaccgccccgccgcttgtgagctcgcgagaggtgtggctcgcgcgaggggcgcggccttgaggcacggtcccctctggaggcgggatctgggcgggcagtcgagagacgaggcccaatggaaaagaaaagcctgagcgctcgcgtccccacaggtcgccagaaacttggtggagcgagccaagggcggagtttgagaaaggggctgcgtccaatgagtggagcggtgagtacagcgcgtcgacggcggaggcgggaagggggcggaggccgaccgaaggcggctagggactggctgaagagggttagcgaaacgttagcggtcgggtctgggcagggggtggagctggttgaaggaacggggcagtcccctgaggagcggggctggttgaaacgctaggggcgggatctggcggagtggaaggtaccggtccggcccgataaggggtggagttaagtgaatcgttaagggtggagtcgaaaccggggtcggggccggggccggctgagtgaaagggtgggtgattatcccgggagataggccgaaagggcaggttcgtgaaggaatggggtctgggctgggcttagagggtctgggaatggggcttaggagagtagaaggggcggtgattggttggaaagggcaggccctaagacggactgtgtgagcccgggggctcattgctccgtgaaagggcaagaccagggaaagagaatcgtgtaaaaggggtggagtctagcgggccgggcggggccgggtagaatggccacctgagtggagggagaaggcctgagagaggcggagtttggaaggctgtggagaatcagatcgcgtaaggaatggaatctaatagagggggcggagcctggaaaagggcagagaggtggggtcctcagggcacactagccccctcacatacccacgctcctccccccacccccagaaccgcggcaggggccaagcctcctcaactatgacctcaaccggccaggattccaccacaaccaggcagcgaagaagtaggcagaacccccagtcgccccctcaggactccagtgtcacttcggtgaggccctagacccgccctgatgagggggagagggagcaagttggtcatgccctggactctgacccttctctctgattcacagaagcgaaatattaaaaagggagccgttccccgctctatcc

SEQ ID NO: 43763 - DNA, 2300 bp, Homo sapien
aagatcatgccactgcactccagcctgggcgatagagggagaccctgtctcaaaaaaggaagtgccttaagtttcttctgttgtctgagttatgtctctttattctgaggctggttgaattatttttttcttggtccttctcttttatgctgatggttttcctcaaatgtctagcaatccttatttggctatttatacccaagaatgaaggcccattgtagggggctgtcagaggactactctgctgcagtgtttgtaggtctgttttcctgaaaggcatttccccagaatggggacagggaatgtccactgacaggttgcaactttagcgagtgtgggcaaggacccgggcattagatgggatcctgccagatgtcagaacaaaggaggcctcttctttggggtaacatctcttttttccctcagcctttccaaagtgtatctgttgtacttatcttttccagtgtagctttgggctttgttggtcatctctactgttttattatggtgggtttttaatacttcattaatttttctggttttatctttattaatgttttcctccgacgttctttattttgttcatttctggcttctggaatttaatgcttcaacatttatcaactcattggccgatctcatttcatctatacctgtacccactgccctcttcctgttttccttcaaagctaatcccagataccatataatttctcctgtaaatatttcagaatgcatctctaaaacataagtacacttttttagaaaagcattaccttagtatcaatacctgaaaattaacaataattatttttttaatctgccaagggtctgtcattcaaagaattctttaatatcattaatcattctttttgtttgaataaatgcataggaggctatagctgtgtgttctttcatgggtacactattgattacacacacagatgtgaaacactgtgaatatattcagtgcattcttccttattaacaaacgtgtgtaaacaaacaaacaaaaagaacatgtccatgcccttggatctcccagctccccatctctcagtctctgaactccagcagcagggagacaaactggataatccttaaaatactgttgtgaagacaaggaaagcagatgatctaaaactaagtagttaaaagaaacaagtaactttgttgtattggtgattcagtgagttggctcttcagaagggattttgtgtgcattgacctggatctgtactggatttctccagaaaggaaacttcagcttatcttgggtgcccccttatcctgctcagcatgagacagagcaccctggggcccctggaatctcaaagtctactttctagaaattcattgaagtctcttattctctgacatcctttccactctctctttctgggttgctgtttgtttacaatttctttactgtattttgaatggggtagtaggaggttgaggaagtaaacctgtgctatcaatccaccatttaacttgaaggtggttgaacttattttgaatttcccttctgttttctttttaaacttagcttgagtgctagttctgctgtttattgactttgatggctctcttttagagtcagctttcttcagatcttttctttcttcctgtcttccccaatgatatttttttcttttcctttctttttttttgagacagagtcatgctctgtcgcccaggctggagtgcagtggcccgatctcggctcactgcaacctccgcctcctgggttcaagcaattctcctacctccacctcccaagtagctaggattacaggcacgcgccaccacgcccagcaaattttttgtatttttagtagagacagggtttcgccatgttggccatgctggtctcgaacttctggcctctagtgatccgcccaccttggcctcccaaagtgctgggattacaggtgtgaaccactgcgcccagccctctggtgataatttttatgtcctactgtgtttctcttcctctaatgattaacttactaaaagtttagaaccaagatttatctatcaatgtcaaaaataaaacaatcatcctccacctactcaacaccagagcttttgcttgtttttattccccaattccaagctcttttccctcaattttaagaatctttctatatcacttgcattaaatttcacaactacattatcaacccattaaaatgtgactcttaagtttgtctagattcaatgcataccactatttcttgcatttccctaaaaaagctgccttagatcctctctggaacaaagcagggggtaaatga

SEQ ID NO: 43764 - DNA, 2300 bp, Homo sapien
aagaaacaagtaactttgttgtattggtgattcagtgagttggctcttcagaagggattttgtgtgcattgacctggatctgtactggatttctccagaaaggaaacttcagcttatcttgggtgcccccttatcctgctcagcatgagacagagcaccctggggcccctggaatctcaaagtctactttctagaaattcattgaagtctcttattctctgacatcctttccactctctctttctgggttgctgtttgtttacaatttctttactgtattttgaatggggtagtaggaggttgaggaagtaaacctgtgctatcaatccaccatttaacttgaaggtggttgaacttattttgaatttcccttctgttttctttttaaacttagcttgagtgctagttctgctgtttattgactttgatggctctcttttagagtcagctttcttcagatcttttctttcttcctgtcttccccaatgatatttttttcttttcctttctttttttttgagacagagtcatgctctgtcgcccaggctggagtgcagtggcccgatctcggctcactgcaacctccgcctcctgggttcaagcaattctcctacctccacctcccaagtagctaggattacaggcacgcgccaccacgcccagcaaattttttgtatttttagtagagacagggtttcgccatgttggccatgctggtctcgaacttctggcctctagtgatccgcccaccttggcctcccaaagtgctgggattacaggtgtgaaccactgcgcccagccctctggtgataatttttatgtcctactgtgtttctcttcctctaatgattaacttactaaaagtttagaaccaagatttatctatcaatgtcaaaaataaaacaatcatcctccacctactcaacaccagagcttttgcttgtttttattccccaattccaagctcttttccctcaattttaagaatctttctatatcacttgcattaaatttcacaactacattatcaacccattaaaatgtgactcttaagtttgtctagattcaatgcataccactatttcttgcatttccctaaaaaagctgccttagatcctctctggaacaaagcagggggtaaatgaccagatagaaggatggatggatgatagattattcattttgctttccccagtcagaattaagccctcccatggccccttgctgggctttctgtcaaaacacgtgcatcgcatcttttcagtatctgttttgcgtgtcggtcatactcacccctctgagtgctcattctctcgcctataaaatagaagaagtagtagaggtggcctgtaaggcattggggaggaggaactgccctttcactggcctcatgacagccccagccagcacccccgctctagttccacccacagaagcaagtctcacccctaccccccaggtctctccacttcctgctagagaatcacccagctccccagcctggcttgaggctcttttcagccttagctggctccccgcagctaagagccccatgctccatttgggcctccagtgtcacagggtttgacctgctgttactactacctttgtcataggggcaggtagtgggcggacatgatctagagtaccccacagagtcaggagcccccatgatctgagatagaccctagagctgagcctgaaattgggtgggcactgagggggcagcgatgtttgctgagggagaggttctggtgagagactaaatgaatgagcgagtgaggtaatggataaataaagataagaatgaaaaaatggtaagatgattaaattggtgactgaatgtaagggtaaattaatggaagaatggattcatggattaaataattaatggggaaattaatgaatgagagaatgaacgagtggttgaatggggaaatgagtggtagaggaaactggcaactgttgggttgggggtgtctatggggattgacttctccaactctcttacctctttttcttctgcccccagtgtcctctatttctccatccaccgctacgagcagggtaggttctggccccacctgaaggcctctaactggtccaccacaggtttcggccaaggccaaggatataccatcaatgtgccttggaaccaggtcagcatctacccacctctgcccccaaagtgaggcccagccccgcccttctgtcagcggctcgggacaggtggctgaacatcccccatcacactcctgtgtctgcaggtggggatgcgggatgctgactacattgctgct

SEQ ID NO: 43765 - DNA, 2300 bp, Homo sapien
ctcttttcagccttagctggctccccgcagctaagagccccatgctccatttgggcctccagtgtcacagggtttgacctgctgttactactacctttgtcataggggcaggtagtgggcggacatgatctagagtaccccacagagtcaggagcccccatgatctgagatagaccctagagctgagcctgaaattgggtgggcactgagggggcagcgatgtttgctgagggagaggttctggtgagagactaaatgaatgagcgagtgaggtaatggataaataaagataagaatgaaaaaatggtaagatgattaaattggtgactgaatgtaagggtaaattaatggaagaatggattcatggattaaataattaatggggaaattaatgaatgagagaatgaacgagtggttgaatggggaaatgagtggtagaggaaactggcaactgttgggttgggggtgtctatggggattgacttctccaactctcttacctctttttcttctgcccccagtgtcctctatttctccatccaccgctacgagcagggtaggttctggccccacctgaaggcctctaactggtccaccacaggtttcggccaaggccaaggatataccatcaatgtgccttggaaccaggtcagcatctacccacctctgcccccaaagtgaggcccagccccgcccttctgtcagcggctcgggacaggtggctgaacatcccccatcacactcctgtgtctgcaggtggggatgcgggatgctgactacattgctgctttcctgcacgtcctgctgccagtcgccctcgaggtcctggggatctggggtgtgttgggaggaggagtggccttgaaggttaggctgtgagggtaggtagcctcatggagtctgttcccccttcagttccagcctcagctggtcctggtggctgctggatttgatgccctgcaaggggaccccaaggtaaggcaggctccctggggcggcaggtgggttgcatggagccaggctgaccctccatgtccccccagggtgagatggccgccactccggcagggttcgcccagctaacccacctgctcatgggtctggcaggaggcaagctgatcctgtctctggaggtgagtgactcaccttcgtccctcagcctgtggatcctggagggcttaagaacgaagctttcaagtccaacaggagttcctggcccaggaattcacttactagctggacaaccttgcataagtcacttcacttctttgtgcctccgctttccttctataaaacgagcataatgtaatcacctcatatcattgtccagtgaattcagtgaggcacccttctaagttccttgttgcttgacatgtggtatgcactctcttattatcatcattattattattccctggtcatgtctggtcctttcctgatcccccttcacaactccttgccccagggtggctacaacctccgcgccctggctgaaggcgtcagtgcttcgctccacacccttctgggagacccttgccccatgctggagtcacctggtgccccctgccggaggtgagccccggtggaggaggggaaagcgggagcctcactgcccgcccacattccttgacatcatattttctccctgccctgcagtgcccaggcttcagtttcctgtgctctggaagcccttgagcccttctgggaggttcttgtgagatcaagtaggaagtggggtgtgggcctggtgtggggtggacgtgggatgagccctgggggagactgtcttcagacttcctctgactttactgggctgccttggtgggagagggtcaggccctctctctctccctgggccctggtttcaggcctcccacccctttttctgtttgggtcacctgagttccagagtatgacggggattcagattgagagggtaggacaaacgtggcctcccccttttagctgagaccgtggagagggacaacatggaggaggacaatgtagaggagagcgaggaggaaggaccctgggagccccctgtgctcccaatcctgacatggccagtgctacagtctcgcacagggctggtctatgaccaaaatatgatgaatcactgcaacttgtgggacaggtaggcatttggagggctggatgagtaggtgttgggggtccctccccctcaggcactaagcctctacctctcgtttccccactgctagccaccaccctgaggtaccccagcgcatcttgcggatcatgtgccgtctggaggagctgggccttgccgggcgctgcct

SEQ ID NO: 43766 - DNA, 2300 bp, Homo sapien
gtgcgtcccccaggacaccacgcagagcaggatgcagcttgcggtttttgctttttcaactctgtggctgtggctgctcgccatgcccagactatcagtgggcatgccctacggtaaggactccctggggaccccccaaatcctgatccttgtggggacctggatgctccccccagcccattgtttactcatgccccatggtccagctcccaggacttccttccccagaaagaagtaagggtgcagtccttacccagagaaggaccgaggatggagcctctcagtgcttatttagataggacccccagatcatgttacctgggcacttacaaaacaggatccagggtcccaccccagcatttctggcctatagcagctgcctcgacagaacccaggtctaggctcctgatgcatactccagaagacccacgaaccagcccccagcattagctgcccaaggcccagggtccagttccctagcaatgacccagaagagcccagggcccagccccgagcacttgctcaggcctaccgggcagcccttgggaaccaggatcagacttttctccttaactgataggacccagggtcctgccactcagcactaaatgcccctgcagaccccaggggtctagcccagccctcttccagggcgtgagtatcgtcggttactgaggtgctgtctcctccccaggatcctgattgtggattgggatgtccaccacggtaatggaactcagcacatgtttgaggatgaccccaggtaagggctgcagtcaggggccgcagtgtgatcagggaggcgggtgagcacctcaggggtactggagcccctaaccagccatggtccgcttcccaccccctccctggcagtgtgctatatgtgtccctgcaccgctatgatcatggcaccttcttccccatgggggatgagggtgccagcagccagatcggccgggctgcgggcacaggcttcaccgtcaacgtggcatggaacgggccccgcatgggtgatgctgactacctagctgcctggcatcgcctggtgcttcccattgcctacgaggtacagctcaggatagatcgcaggacgtatgtgacacgcctgtgcaggtggcagcctggacctgcctccttggcatgtgtgtgtgtgactaccatgtggctgatgatatgagacagcgcatgggtgtttaatgaggctaccagggcagttggtggctgtgatcaccttgtgtatttgtgcacagatggctgtacatgactgccttctctgtgtgacactgtgtgagtgactgtcttggctgtgtgtgtgagggccttctgactatgcaccaatggcccgtgtcctggctggatctgtgttgtatgtgcgtgccatcacaagtgcttgagtatgtgcgtgtgcgactctgtgcaggcaggtatttctcaccttttctctgtgtgatgggtgtgatactgtatgtcactaaatgcaaccatctctgtgacagcctgtgtgggaccttctggatgtggaaggctgtgtgtgacagcagtcactgtctggctgtctgccctggctgtttgtgtgtatgtctctgactgggaggtagctgccttccctctgtgtgagctaggaggctggtggcttgtgtatggctgactctgggagggagggaaagggtgtgagcaccgctctgtcaccctgggcgccggtgtgcatctttggatctgcatgtgcatctgactgtgcatgggtagccaggacagccttctgtgtgtgtacaactgtatgtgcaaataaccagctcttgtggacataccagagtgcatgtcgccgttgtggctgtgtggtgatggcatgtgtatgtgactgtgcaggatggctgtgggttattgtcctctttgagaaactgtgtgtgtgtacatgactagtgcagatatatagtactgatctatatggtactgtctgtgtggcagtacgtgtggctctgtgtgaccatcttctctgtatgtggttcttgcgttgccatcttctgttttggaagtgtgcaagcacctctctttggcactatgtatataaaaccctgtatcttgtgtatgtgtgtcccacgtttgaccctggggtatgtgtgtgtgaggacatgtctctgtctctctgtttttcatgtcactctcttgacgtgtcagtctgtctcatgtccccatctgtccctttttttttttttttgaaatggagtcttgctctgtcacccaggctagagtgcagtggtgcaatctcggctcactgccagctccgcctcctgggttcatgc

SEQ ID NO: 43767 - DNA, 2300 bp, Homo sapien
tctgaagatcagggaaactgaggcacaaagaggtgtgatgactagcctgagatggcacatttactgatggcagaaccaggacttgaacccatgcagcctggctccagggtttgtgctttttactctacctgaactgcctctaacaagttcctgggacaaaggaaattcactgacctttgtaaatgactcagtatccccacgccctgtgcctcagtttcctcatctttatgaggcaggctaatcatggaggaatgcctggcatatggtaaatgctggatcttttggatctggttttttgttgttgttgttgttgttgttgtttgtgagacaagagtctcgctctgtcacccaggctagtctgcagtggcatgatctcagctcactgcagcctccacctcccggcttcaagtgatcctcccacctcagcctcctgagtcgctgggattacaggcacccgccaccacgcccagctaatttttgtatttttagtagagatggggtttcaccatgttggtcaggctggtcttgagctcctggcctcaagaaatccacccaccttagcctcccagagtgctggaattacaggcatgagccaccgcacctggcccctggttactgttatgcgttgttcagatattaacccactcagcaaccttctgtgctcttattttctttttctttttctttttttttttgagacgttgtcttgctctgtcgcccaggctagagtgcagtggtgcgattgtggctcactgggttcaagcagttctctgcctcagcctcctgagtagctaggattacaggtgcctgccaccacacccagctaatttttttgtatttttagtagagacggggtttcaccatgttggccaggctggtgttgaactcctgacctcgtgatccacctgcctcagcctcccaaagtgttgggattacaggcatgagctaccatacctgcctctttttttttttttttttttttttccttttgagacagagtctcgccgtgtcacccaggctggagtgcaatggcgctatctcggctcactgcagcctctatctcccaggctcgagcaagcaattctcatgcctcagcctcccgagtagctgggactacaggcgcatgccaccacgcctggctaatttttgtatttttagtagagacgggggtttcaccatgttggccaggctggcctcaaactcctgacctcaggtaaccttcccgcctcggcctcccaaagtgctgggattataggggtgagccaccgcgcccagcctgtgctgttattttcaccactttacagatgaggaaaataagtcactgagaaattaattggcttgcaaaaagtcgcacttactatgtgcccagtactgcttgtgacaggacacggtgggagttaagaacacagatgactccatcagagagcccaagttcaaaccccagtgctgcctcttcagctgttatgacctcggacaagtcatctaaccactctgagcctcagtttctttatctgtaaaaagaatagcaactgggattcctgtagagtgtaaaaaaagtcaatacaggagtccatgtggagaaagagtccagttgttcctgtactaggtcagggcaggggcttttgtatgggttcacagcagtcgtcttgtgcaggtcaggtcagtggttactgtatgatgtgaggccaggggttcctggacagtgtgaagacggatttctgtatggcatgaaggcaagttcctgtatagattgagcgcctgtggttgtgaggattgagttaatatgcatgaagtacttaaaatcgggtctggcacacagcaaacaataaatgtcagctgttactaatgcttttatcagtattgttatcttgcactttacatcacaatttactccccacaacaaccaccttacacagtgggtgctgcctatcttaaaggtgtgggttctgttcacttgttctcagtactccccctccctctccagacttgcagggctcagtagggaggattggggaggcaggacatgttgtcctccaaattccccaatgaacccccaccatacctttccctccccttttccttaacaaagggtggctataacctgacatccatctcagagtccatggctgcctgcactcgctccctccttggagacccaccacccctgctgaccctgccacggcccccactatcaggggccctggcctcaatcactgagaccatccaagtccatcgcagatactggcgcagcttacgggtcatgagtgagtggatttgggggtgatggggggaacccaggg

SEQ ID NO: 43768 - DNA, 2300 bp, Homo sapien
gaagtggagtcctggtttcggggacccttccgcactccgagctttgcacctcacccggcctcgtccgggaaagcacgacctggcgaggccgccctaaccccaggtcccggccccttagcgcgccagccttggtgagctgggcgaagccccccaacctggtcccagcggctctgagcgcgcggccacggggacccgccgggggctccgcgccacttgagaggaccgagcccccaatctccggcgcctcccgcgggctgaggccccgggccagtgccctcggcacgtgcctctgcgcctcgggctcctcccgggagcggagccttggggaccagggccgcggcctccctgcgcgtcgcggggactgggcgagtgtggccccgtcccgccaggcacctggggtggaagctgcgctccgccactcggccaggccccgggctttccttcctcaccgtcggcgcccccagactccagccgctcagaccccgacttaagaggcagcctcgaccccgcctctgccttctgacccatccctaaagatggccgggcacccctacaggacccccagaagccgacctctccctccacgtgcgccgccgcctcgcccctccccgcagtcctccaggtcttcttcctgtccccaaccgtcggggacccccaagctccgtcctccgcttcctgctctctttatcccgcccccgctccttctgggccaacgccgccagtgactattcccagggatccctcagagctgaggacgccgcggccgcatccccatttgggaccttgccccgactccgacctccggatctccagctccaccaaacctcgaagccaccatccgcccccaaactgccgctgcgccaggctttcggaggggagtcgtggcaacagccattaggatgcactaagcagggcacttcctgagcccaaggacaccgaggggcattcactgagtgaatggggatgtgctgctaataactaacactaattgaccacctgccgtgtgcccatcctcttcgaacatgcaacttccttgttccttatcttgttactgtctctttctctctgccagaatccaatcctcacaagggcagggactggggtctgttttgttaactgccatatcacaatgcctggcacgaaggaagattcttgaattaatgaatggagattaaattataatttaaaagcctggcatgaactgagcaccttctgcatgcttatcacccgctactgacatatagttcactttttttttttttttttttttgagacggagttttgctcttatctcccaggctggagtgcaagtggtgtgatctcagctcactgcaacctccgcctcccgggttcaagcgattcttctgcctcagcctcccgagtagctgggattacaggcgtccaccaccactcctggctaatttttttgtgtttttattagagacagggtttcgcaatgttgggcaggctggtctcgaactcctgacctcaggtgatccacccgactcggcctccaaagtgctgggattacaggcgtgagccattgtgccccgccccctttttaacctagtttgttgtctctcaccccgaccagaatataaccttcatgagggctacagtttgttgtctatttattgcccaactccatgtccttgccacacagtaggttcccaataaatgtatgttgaataattaataaagactacattctaatgataatggctaacagaccacgtgatttacatatttatttggtttattatattatctgcctctgccttttagaacataaaccttctgggggtgggaatgttgggtccctactgtctggcaggcactgtgctgggctagggttcaatggtgaccaaaaccggcaaaatcctgccctccctctgtcatggggaggaactgctaatgggcatggggattcttttctgggtgaggaaaatgttctaaaatttacttatggtgatagttgcacaacttcgtgaatatgctaaaacccgttaaattggacactagctggctgaacttgatgggatgtaaattacatctcaataaagctgtttgggaaatccagccttcacagttgttgattcgcgtgaggagggaaggagagatggggggacgtgggacagggagaaaacaacataaatcatatatatatagcatgcaaattggaaggtgatcagcacacaataggcattcaataaatgttgaaataatgacaccccactgtctccttgccctcaaatggtctcccctaacgtatcccctgttgtcttgcttcttctcttccc

SEQ ID NO: 43769 - DNA, 2300 bp, Homo sapien
aatttttgcatggactcttatatacatttaaaaatatggccaggtgtggtggctcatgcctgtaatcccagcactttgggaggccaaggtgggtggatcacttgaacccaggagttcaagagcagcctgggcaacatggtgaaacccatctctacagaaaaatgcaaaaattagctgggcatggtggggaacacctgtagtcccagcaagtcggaaggctgaggtgggaggattgcttgagcctgggaagtggaggttgcagtgagccgtgatttcgccactgcattccagcctgggtgacagagtgagaccctgtctcaaaacacaaataaacaaaccaaaacaaattttattacacattttattacagaaggagtaggattaaaaataaaacaaaataaaaagtacatttaattgattttctttaaaatattcagctggggtttaaattgaaattacatagaaattatatattagtttggatagacttgacatctttataaaatgaaattgcctcatccaggaacatgtattgtgtcttcatttattcagatgatctttttttgtttttgagacggagtcttgctctgtcgcccaggctggaatgcagtggcaccatctcagctcactgcaacctctgcctctcaggttcaagcagttctcctcctcctcagcctcctgagtagctgagattacaggcgcgtgtcaccatgcctggctaatttttgtattttcagtagagatggggtttcaccatgttggccaggctggtctcaaactcctgacctcaggtgatacacccacttcggcctcccaaagtgctgggattacgagcatgagccaccgcgcctggcctattgtaatttttttttttcagacaacagaaaagtataaaggagaaagtaacaaaccattagttacctccccagagataaccattgatgacatttcctccccaacatttttccccctatggatacacatacattttttcaagatcttgtttcctttgatatgtcattttagtggcttgaacttatttctggaacaatatatgggtaaagtctatgcatatatgtatctatgtatatatctatctatggaaaacaagtagatatagacagtaaaataaagacagagacaagacagcggttggagagatgaaaggagagaaagtcatagacaaggagagacatatggggagaggaagacacagagagagctgtgggcacataagggcagaaagataaacacagagagccatggagagatgaaagtattgggctggggccaggcatggtggctcaacgcctgtaatcccagcactttgggaggccgaggagggccgattgcttgagctcagaagttggagaccaacctggcaacatgacgaaaccccatctctacaaaaatacaaaaattagccaggcgtggtggtgggcacctgtagtcccagctacttggcaggctgaggcatgagaattggttgaaccctggaggtggaaattgcagtgagctgagatccggccactgtcctccagcctggaggacacagcgagacactgtcagaaaaaaaaaaacacaaagagacaaggagaggatggaaaggagcatttatggagctcctactgaatgtcattctaaacctccaaggtcactttgagggaggctgtcagtagtaacccctttacgccgctgagagcctgagccttagaatggccaactgagctgtccatggtcacatcacctagattgaacccatctccctggcgcgggccgggcccactgcgggtgatccattaactatttatctaatgaacaaactaaagtccatctcctcccccaggaagagagatgaggaccagacccccattccactccactgagtcaatttttcttacctgttttcctgtctactaaggtaacagtaaggtcggttgccccagcaactgccctccgactgccatggcaaccgccagctctccaccttgccctttgggcatctccatggcgacgggaggtctggtggggctgccagctccccaggctgcgcctgcgtcggtcgggtgggtggggtgggggcggggagggggggcctggttccgggcgtgcgcagccgcagagcgccgcagcctcgccagctcgccccggcactgcgcacttgccagccagtccgcccgtccggagcccggctcgctggggcagcatggcggggtcgccgctgctctgggggccgcgggccgggggcgtcggccttttggtgctgctgctgctcggcctgtttcggccgccccccgcgc

SEQ ID NO: 43770 - DNA, 2300 bp, Homo sapien
tgagctgtagagatgtggagaagtggccaagaactagtggcctggagagcgccccaacatgggtgttctcagagctaggttgagaagtgctaattcattcatacatttgttcattcattcattcagtgaatgattaacaagtacctactatatgtgccaagcaccatgccatatgcagggatacagccatgaacaaggtaggtctgctctctgccctctcagagctcacattaacggtgggagacacagatcttgagcaagagtagataaacaagggagcttcagacagcaatctgcactgtagaggaaatgccatgaagaaatatgactggggctgaggggtcaggaaaggcctcttgaaggagggggaatctgtgctgagaccttgaggatgacaaacttgggcaaagatccagggaggagagttccaggagtctaggggagggacggggctacatatataaattgcagagaccttggctaatagatggcatttaaagtcatggcatttgcgatcttctgggaggggaggtggtcagagaaaaagaattatgttaaaagaattctctcaacttcaaggctgtcttccgtctgccaattaaattcctgtcattttcctctatccgggtttctgagccagaatctgcctctaggtaaaatgcgcagtggctaacacctgtaatcccagcactttgggaggctgaggtgggtggatcacttgagttcaggaattagagaccagcctaagcaacacgttgaaaccccgtctctacaaataaataaatacatacataaataattagccgggcatggtggcgcagtcctgtggtcccagctacttgggaggctgaggtgggaggatcacttgagcctgggaggcggaggctgtagtgacccatgatcaggccactgcacgccagcctgggcaacagggcaagatgctgtctcaaaaaaaaaaaaaaaaaaaaaaacatggccaggcacagtggcacacgcctgtaatcccagcactttgggaggccgaggtaggtggatcacctgaggtccagagttcaaggccagcctggccaacatagtgaaaccccatttctactaaaattacaaaaattcgtcaggtctggtggcacatgcctgtagtcccagctacttgggaggctgagacaggagaattgcctgaacccaggaggcagaggttgcagtgagccaagagcgtgccactgcactctagcctgggcaacagagcaagactgtctcaaaaaaaaaaaaaactgtctggctttgcacatacatttaaaatttggtgatgactctttgaacgacacagcatttccacagaggagctccagttgggtggggtggagggtggaagacagaggccatgtttgcaatccctacaaaatcccagatacaggagccaggctcggcacatagtaggtgagtgggcaccagaatgaataagtgcacgtgactggcagctccaagcagttttcagagcagcctcccttgtgggcaagatagctaaccccacaccaacccagggaaggcctggactcacaacaggggcattgcggaaacccttgatggcctggaagactccgccaccgatgacacccatagtgaaggctccaccgcaatcatccacaattcgccatgggctgcaagcaggaagggaaggacggggttaatgtgagccctcccccaggtcctgtcacacgaactcttttctaactgggagaaaccaagtcaccagaatgggaagttcctaagtaggaacaaacacttcagataataatgagctagttctgtcacgctttttccacacacccccccattaaagcgagaaatggggcaaagggggagaaatattagtcttcgccctgtctaccaaccaaggaatcagccaacggttttactgtgatcaaagattaaatgaattggcacacgcagagttgacgtttcaataagcgacataggcgtgttaactagccaagacagactgtcagcaaagcaggaccgcgtcgcaccccttctccgacggtgagcccgtccaaccatgccccgccccttttcaatccggcacaactgggaaaaaccaagagcgaccgcgggaagcatccaccgtccccgccggccctcaacaggttcatccgtgccccgccccccactgacaaaggcgacctgggaaaaaccactggcggcaactctggggatttccggtcaacaccgtaccacccctagccgggatggatcgtccagcgtgtcttttttcgttaacagggctaggagattacgaagtcagg

SEQ ID NO: 43771 - DNA, 2300 bp, Homo sapien
tctaggtaaaatgcgcagtggctaacacctgtaatcccagcactttgggaggctgaggtgggtggatcacttgagttcaggaattagagaccagcctaagcaacacgttgaaaccccgtctctacaaataaataaatacatacataaataattagccgggcatggtggcgcagtcctgtggtcccagctacttgggaggctgaggtgggaggatcacttgagcctgggaggcggaggctgtagtgacccatgatcaggccactgcacgccagcctgggcaacagggcaagatgctgtctcaaaaaaaaaaaaaaaaaaaaaaacatggccaggcacagtggcacacgcctgtaatcccagcactttgggaggccgaggtaggtggatcacctgaggtccagagttcaaggccagcctggccaacatagtgaaaccccatttctactaaaattacaaaaattcgtcaggtctggtggcacatgcctgtagtcccagctacttgggaggctgagacaggagaattgcctgaacccaggaggcagaggttgcagtgagccaagagcgtgccactgcactctagcctgggcaacagagcaagactgtctcaaaaaaaaaaaaaactgtctggctttgcacatacatttaaaatttggtgatgactctttgaacgacacagcatttccacagaggagctccagttgggtggggtggagggtggaagacagaggccatgtttgcaatccctacaaaatcccagatacaggagccaggctcggcacatagtaggtgagtgggcaccagaatgaataagtgcacgtgactggcagctccaagcagttttcagagcagcctcccttgtgggcaagatagctaaccccacaccaacccagggaaggcctggactcacaacaggggcattgcggaaacccttgatggcctggaagactccgccaccgatgacacccatagtgaaggctccaccgcaatcatccacaattcgccatgggctgcaagcaggaagggaaggacggggttaatgtgagccctcccccaggtcctgtcacacgaactcttttctaactgggagaaaccaagtcaccagaatgggaagttcctaagtaggaacaaacacttcagataataatgagctagttctgtcacgctttttccacacacccccccattaaagcgagaaatggggcaaagggggagaaatattagtcttcgccctgtctaccaaccaaggaatcagccaacggttttactgtgatcaaagattaaatgaattggcacacgcagagttgacgtttcaataagcgacataggcgtgttaactagccaagacagactgtcagcaaagcaggaccgcgtcgcaccccttctccgacggtgagcccgtccaaccatgccccgccccttttcaatccggcacaactgggaaaaaccaagagcgaccgcgggaagcatccaccgtccccgccggccctcaacaggttcatccgtgccccgccccccactgacaaaggcgacctgggaaaaaccactggcggcaactctggggatttccggtcaacaccgtaccacccctagccgggatggatcgtccagcgtgtcttttttcgttaacagggctaggagattacgaagtcaggagaaacatggcgtggttcggccttcgccgcaccttctctggttgtggcccctcataacggagcccgaatgacaggaaccgagtgggggtagcgggagatacgttaagagtcccccgagtctggtacatggctctgtgcggccgatgcctcccccgcccgacccccacggctggccttggcgtcgcagcaatattccggatgcctgtgcccattgccgtaccagggctcccgagcgtactcctccatggcgctggcgtctggccgcgcagtcaggccacgcccccagcgtagacgcacaccggcgtcggagctttccgcctattaccgggcagcgattgggtcgctataccgcatgtcacgccaaggacgcactctcattggccaatcgagtttctgccatttgttcattgcctcctgagcgtagtccagttactttcaggctcggggagtgaaggcctcgttgagagaaggtctcattcggtgttttgggaagagagtcgtgtgggcccaggtatcgtagcggcgacacgagagagacgggcggtgtgacagccttccactacctgcacgagtgtattggtaacgttggggtgggtgcactcttttggagctggaggaagtgctgccctctgctcccccatcccagcg

SEQ ID NO: 43772 - DNA, 2300 bp, Homo sapien
agagcgtgccactgcactctagcctgggcaacagagcaagactgtctcaaaaaaaaaaaaaactgtctggctttgcacatacatttaaaatttggtgatgactctttgaacgacacagcatttccacagaggagctccagttgggtggggtggagggtggaagacagaggccatgtttgcaatccctacaaaatcccagatacaggagccaggctcggcacatagtaggtgagtgggcaccagaatgaataagtgcacgtgactggcagctccaagcagttttcagagcagcctcccttgtgggcaagatagctaaccccacaccaacccagggaaggcctggactcacaacaggggcattgcggaaacccttgatggcctggaagactccgccaccgatgacacccatagtgaaggctccaccgcaatcatccacaattcgccatgggctgcaagcaggaagggaaggacggggttaatgtgagccctcccccaggtcctgtcacacgaactcttttctaactgggagaaaccaagtcaccagaatgggaagttcctaagtaggaacaaacacttcagataataatgagctagttctgtcacgctttttccacacacccccccattaaagcgagaaatggggcaaagggggagaaatattagtcttcgccctgtctaccaaccaaggaatcagccaacggttttactgtgatcaaagattaaatgaattggcacacgcagagttgacgtttcaataagcgacataggcgtgttaactagccaagacagactgtcagcaaagcaggaccgcgtcgcaccccttctccgacggtgagcccgtccaaccatgccccgccccttttcaatccggcacaactgggaaaaaccaagagcgaccgcgggaagcatccaccgtccccgccggccctcaacaggttcatccgtgccccgccccccactgacaaaggcgacctgggaaaaaccactggcggcaactctggggatttccggtcaacaccgtaccacccctagccgggatggatcgtccagcgtgtcttttttcgttaacagggctaggagattacgaagtcaggagaaacatggcgtggttcggccttcgccgcaccttctctggttgtggcccctcataacggagcccgaatgacaggaaccgagtgggggtagcgggagatacgttaagagtcccccgagtctggtacatggctctgtgcggccgatgcctcccccgcccgacccccacggctggccttggcgtcgcagcaatattccggatgcctgtgcccattgccgtaccagggctcccgagcgtactcctccatggcgctggcgtctggccgcgcagtcaggccacgcccccagcgtagacgcacaccggcgtcggagctttccgcctattaccgggcagcgattgggtcgctataccgcatgtcacgccaaggacgcactctcattggccaatcgagtttctgccatttgttcattgcctcctgagcgtagtccagttactttcaggctcggggagtgaaggcctcgttgagagaaggtctcattcggtgttttgggaagagagtcgtgtgggcccaggtatcgtagcggcgacacgagagagacgggcggtgtgacagccttccactacctgcacgagtgtattggtaacgttggggtgggtgcactcttttggagctggaggaagtgctgccctctgctcccccatcccagcgctttggtttctcccacccggcagtcatggggacgctggatgagcccatttctgaagtgcggaggggccgggcttcttaggctgtgggcggagcctgggcctgggagaggaacagggccctggagcacctggtttcggggacagtagggttggtgggagttgcgatgatattgccacctacctcttacatcttttagtgcgtatgttctgtccacccagctactggttcatttgagtagatcggagtcagatgagtacatgtttacgggaggcgcttggttacgggatccagataggaatctttatctgagctgcttgtcagtttgttcgtctgtccctaggtctgtctgctatcagctatgccgctgcccgttgcgctgcagacccgcttggccaagagaggcatcctcaaacatctggagcctggtgagacagctaaaagcagatggtcctaacacgtgccagcctcgacaggcacttttgttgttgatactgacgcttgatacctagcatgggccaactgtgcaccaagcaatggggtggcaggcatttttcgttg

SEQ ID NO: 43773 - DNA, 2300 bp, Homo sapien
agatggagtctttctctgttgcccaggctggagtgcagtggcatgatctcggctcactgcaagctccgccttccgggttcacaccattctcctgcctcagcctcccgagtagctgggactacaggcatctggcaccacgcccggctaagttttttgtatttttattagagatggggtttcaccctgttagccagaatggtctcgatctcctgacctcgtgatccgtccacctccgcctcccaaagcgctgagattacaggcatgaggcaccctgcccggcctgggatcattgacaattttattaaccacaaggtctataccttgcacacagtaggcttgtaatagatgtcagttatcaataaggagaagatatattttccagtgcctggcacactatagccccaaatagatgccagtttttagtattactgataataaggtgtgatttgcagccagagcacagtaggcctaaatgatagatcctcactgcaactacgcttggcacacaggagacagcagtagaggttagcagtacttcctattagatactatgtcatcacccccatagagtaatccatgggatttaacttggcatacagtaggccccaaataggcattaggtggtcagtattattttgttgttttttttggatttttttcagacagggtctccatgtgtcggccaggctggagtgcagtggcacaatctcggctcactgcacccttgacatcctaggctcaagagatcctctcacctcagcctcccaagtagctgggactacaggcatgcaccacaacacacgattaatttttgtattttttgtaaagacggggttttgccatgttgctcaggctaatctcttaatccctaaactcaagcaatctacccgcctcagcctcctaaagtgctgggaatgccagcttgagccgccacgcccagccagtcagtattgttaagaatgaaatatctgccgggcacagtggcttatgcctgtaatcccaaccctttggaaagccaagggtggggggtggatcacctgaggtcaggagttagaggccagcctagccaacatggtgaaacccgtctctactaaaaatgcaaaaatcagccgggtgtggtatcacgtgcctgtaatcccagctacttgggaggctgagacaggaaaatcgcttgagcccgggaggcggaggttgcagtgagacgagatcacgccacagcactccagcctgggcgacagaccgagactctgtctcaaaaaaaaaaaaaaaaaaattgccaggtgtggtggggcggggcgtgcctgtagtcccaactactcgggaagttaaggcaggagaatcgcttgaacctggaaggcggaggttttagtgagccgagatcgcgccactgcactccagcctgggtgcacaataagactctgcctcaaaaaaaaaaaaaaaaaaaaaaaaaaaaaaaaagaatgaaatatctattcccccaaccccctccacttgacacgcggtagggatggatgtcaggaatccacattgttaacaacgaaaaatgcctgccaccccattgcttggtgcacagttggcccatgctaggtatcaagcgtcagtatcaacaacaaaagtgcctgtcgaggctggcacgtgttaggaccatctgcttttagctgtctcaccaggctccagatgtttgaggatgcctctcttggccaagcgggtctgcagcgcaacgggcagcggcatagctgatagcagacagacctagggacagacgaacaaactgacaagcagctcagataaagattcctatctggatcccgtaaccaagcgcctcccgtaaacatgtactcatctgactccgatctactcaaatgaaccagtagctgggtggacagaacatacgcactaaaagatgtaagaggtaggtggcaatatcatcgcaactcccaccaaccctactgtccccgaaaccaggtgctccagggccctgttcctctcccaggcccaggctccgcccacagcctaagaagcccggcccctccgcacttcagaaatgggctcatccagcgtccccatgactgccgggtgggagaaaccaaagcgctgggatgggggagcagagggcagcacttcctccagctccaaaagagtgcacccaccccaacgttaccaatacactcgtgcaggtagtggaaggctgtcacaccgcccgtctctctcgtgtcgccgctacgatacctgggcccacacgactctcttcccaaaacaccgaatgagaccttctctcaacgaggccttcactccccgag

SEQ ID NO: 43774 - DNA, 2300 bp, Homo sapien
aggagacaagatcgggggatgatctggaaagcgcgatcagtgaagcggacgaacggcaggataaggcgggtctagtgacaggaatgggccgatgaagctctgtagggatggtgggtaggccgatcgggccgtgtccccggcctcccgatccgacggaatttggaaatcccggggctattcatacattgagcttttaggagcggaggagaaaagccaccaccctgacgatcccggctctcgctccaccttcactcaggtggcccggcagcggaagtgacgaacgcggaagtggtttttctgttgccgaggggacgggccgggcagatgccaacatggcagcggttggggctggtggttccaccgcggcgcccgggccaggggcggtttccgcgggtgcattggagccggggaccgccagtgcgggtgagacagtctgcccgagcagtcgcatgggaggcggaggtcgggatcgctgggagtcgggaatgttcctcactaaagtgagagggagcatcccgtgtggaccgacgtgtgtgtgtgtgtgtgtgtgcacattgtcagtgtgttgggggcggggaagagaacattctgagagtgattgtgggatccttccgcatatggagagtagagaccattgtgagtgtggtgggtaattctttttgggaaggctaaggccaccgaaaccattctgaatatgtggagtccttccgtgtggaagagaccattctgcgggtgtgggagttcctcactgaagaagggggagactattctgagggtggtggttccttccttataaagggacagagactattgtgagttagggtggggcgagtccttctttatgtgactagagagggtccattttgaggatgggggtgtctttcattatgtgcggaggagaccgttctgggggctccctcctaatggaggtagagttcattgtacattcgggtgggagggctcatcgttatatggtggagaaagaacgttctgagagtgccgggtccttccttatagcagagagagctcattgtgagtgtgggtagagcaaggaaaaattcattagctagagggtccgtgtgcggtggtgggagggcagaccatgtggagtgcagggaagtatttcctcatctggttgagggagccagacctttcttggtgggataaccattcctgatacaggattcagtccctgggagcatgtgggaatcatttcttgtatttagtagactattctggttcgagaggaaccagttgtcacaggagtgaggggttggagagaccattctgggtatgaggaggatcattccatatgggatgtaggccattctcagtgtgagggaatcgaatcatttcttagataggagaaagaccgttcttagggggtgaacatacctcatacagtggcctcattccctgcattgatgtgttattctttacatgagacagtccctcattaaacaggagcatcatttcatataaattctcagtttgctaatccataaatgggaatcctcgcagttcttttggagatgacagtgatatgagtctattgaggtaatccatagaaatcccttaacccagtgataggcatacagtaaacactcaataaacgtggagaatgtagttgtcggtattctttctggggaagagttgcttctcacttgggaggaagccgaggcgcgtggccagggtttgcctcagccattacctgacacctcagtaaggattccaggtatggactgggacagggtggggcccatttctcccttctggctcttcctgctcatggctgaggcagtaagccggtaggagtcagacccttattgggtgagggcaggcaggctgagggagcaagtagccatggctaggagggtcctgggtgagaaagaaagggggtgggtggtggtgtggctatgccccagcggcttctgaccccgtccttcccccttgccccttccgttccccacagctcacaggcgcctgaagtacatatccctagctgtgctggtggtccagaatgcctccctcatcctcagcatccgctacgcccgcacgttgccaggggaccgcttctttgccaccactgctgtggtcatggcggaagtgctcaaaggtctcacctgcctgctgctgctcttcgcacagaagaggggtacgaaccagggatggggctgcactggggtcggtgggtgagactccacatgtatgtgtgtgtgttcacacagatggtttgcttcaggagtgtctccaaatctcaacctgcctggagcgccactccagctatgcgtagcggcatc

SEQ ID NO: 43775 - DNA, 2300 bp, Homo sapien
acatttgttgacttggttttacaggtcattaccagtcattaaagtccagtattactaaggtaagggattgaggatcaggggttagaagacataaaccaagtctgcccagttcccttcccaatcctacaaaggagccttcctcccagaacctgtggtccctgattctggagggggaacttcttgcttctcattttgctaaggaagtttattttggtgaagttgttcccattctgagccccgggactcttattctgatgatgtgtcaccccacattggcacctcctactaccaccacacaaacttagttcatatgctcttacttgggcaagggtgctttccttccaataccccagtagcttttattttagtaaagggaccctttcccctagcctagggtcccatattgggtcaagctgcttacctgcctcagcccaggattctttattctgggggaggtaatgccctgttgttaccccaaggcttcttttttttttttttttttttgggtgaggggaccctactctgttatcccaagtgctcttattctggtgagaagaaccttacttccataatttgggaaggaatggaagatggacaccaccggacaccaccagacactaggatgggatggatggttttttgggggatgggctaggggaaataaggcttgctgtttgttctcctggggcgctccctccaacttttgcagattcttgcaacctcctcctgagccgggattgtccaattactaaaatgtaaataatcacgtattgtggggaggggagttccaagtgtgccctcctctcttctcctgcctggattatttaaaaagccatgtgtggaaacccactatttaataaaagtaatagaatcagaagcggctggccatttgtaggtgtgaggcttttatggagcatctactgtgcactgagacagactgtccctctgctttgtcctcaggaagccacagtcttatgttgccatcctaaagagctttaaggattcttgaagctgcaccacacacacacaaaaaaatcttgattcccctgcccctgatcttatgcagtgcccagtatgtgcagaagggttctctgttggagatactgtgcatattgaaggtgtttagggcacatccccaatcaagatggctatctcagaagcagaaaaactaccttccctggcaccccaggggaatgaagaagccctttcccctgttgcagaagaaaagccctgtcagggtactggccagggcggggctggggttgggcgctgactggaatctgtccagggtgtagtcacctgttttgctctttatctttagcctcttcccccatctttacccttacatacccatccctctaatttctccttcaacacttgacttacctggcctaccctattccatgttggtttcacttgttccgacctgagttgttccctctcttgccctgcttatttgtctcggttcagtataaactccgccttccgggttccagcggttctcctgcctcagcctccagagtagctgggtacaggtgcataccactaagcccgggtaattttttttttttatttgagacggggttttgtcgttttgcccaggctggaactcctgagctcaggtgatcgcccggctcagcctcccaaagtgctgggattacaggcgtgagccaccgcctctggcccggactcttgccctgcttccaaatgctagctaacctgtgagcctttcgcctgtcccctttgccatcctcagtggtgactcacttgtcttcccttatgtgcgtcaactttcctttgcattttcacttgtttatcctcacctgctctgcttttatctgctagcttaacattcctgactcgcacctgatgccagtacgccctcaccccgaccccgccaggtcaaagtttcttcgtccccagattcccgtgtgctctccagggggcgaggcctcgctggaagacgggaaagcggaatttcagtccaaccatgaagcacctggtagtttctgatacggaaagggcggcgccttatggagaagctgccaataaagagccgagatgaaaggggtggctgaaccaatgagtctaggagacaagatcgggggatgatctggaaagcgcgatcagtgaagcggacgaacggcaggataaggcgggtctagtgacaggaatgggccgatgaagctctgtagggatggtgggtaggccgatcgggccgtgtccccggcctcccgatccgacggaatttggaaatcccggggctattcatacattgagcttttaggagcggaggagaa

SEQ ID NO: 43776 - DNA, 2300 bp, Homo sapien
tgatcatctagagggaatatgtatgatcaaagtaacgtactacctgggcacagtgcttggcacattgagagagcacaaatgttagtagtattctttttgtagaagtttctgcaccatttggcccctgccaatctctcgccgctctgtccagtgttcttggcctttgcctgcaatttgccctcccctgtcctgagccaccaaccttctttgtctttcaagacagagggtcacctgctgagaagcccattcacattctcacttctatctaaaaatctccccagtagctgtactacagataaacttcatggcacgggtttgatgcctgacttatctgtacatctctgataccaacatccccatcaaggcctggcaggcttatagcaaaccacccccaataacgttgggtgaacaaaggagagtacatgtgtgcttttttggtgttgtctgtgtgtgtgtgactgtggtgagtccaagtcttcatgtgcagctcacagagtgtccccagttgtgtgtgtgatgaagggcttgtttccaggtgtgtcagatggtgactgagtgtgggactcttatctctgacagtttgtgtctaaatccaagatgcgtgcatgcctgcgtgggtctgtctgtgacagtgcatctgtggtttctgtctgatggggtggatgtccgtttgtgttcctgcaacagattctgggtagctatttctggacagtttgttccattgataaactgcatgtgtcatggtgtatgtatgtctgtgtctgaacaggtctatccatgtctgtttttgtgacactgccacaaaatgtgattctatcacatcagtacatgtctgccttcagagcagtgcatgtgtgtccctggagcatctgtgcatcttcctgtgacagactctgcgtctctcatttctgggacagtacaagtcttgctgtgacagtgcatatctgatggtgacagtgtgtttgtgacaagttctgccagtgtgacgggacatttctgtgtcatcacatggcaaatgtaggtctgcgtgagtgcctttctgtaacagtgtatctctgggtgtcattctaggacataactatttttctgacagtgtgcttgcctgaaagtgtatgtcagtctctggctgcatgtgtatctaggtcgtttctgtgaatgtgtctgacagtatgtgtttgtgtatatcttggcattcatgtgtctttggagtgcatttttcttcctggggtgtggcgccttttctggctgtttttcacaaatttgtgtctgagagttgccacttctctagcagcctctatcatgtctctcagtccttgcctctctcaactccaagagcagccccatgccaccaccactctgggctcacccccatcccccaagaaccaccccctgctgttctagattctagacttgctgactgggcccagggctcagggttaaaagctccaataaacactcaccaggcaatgctgcctttgaccaatgcacacccgtggcgttgatggtaggggttccccctccctggctaccagatatttccagggccctggcctcagctttccagtgaaggccgccagtcgcctggaggactccggtgaaggagtccgacaagcacctttcgagacggagtcttggatagccacaagcgcgaattcttagaagcccggcctggcgctatctctgtgctaatatccaggcagcggcggcaaaccaacttcccaggaaaggatactgcgcagttattttttaagtgtaaatacacacacacaccgccaccactaccaacaacaaccccgcgcaacaaccaaaacaagcgcggtgctgcaaagggattcccagaaccggtttcctcttggtgtgagccccacctcaagccccctcatttacatgcaggccccgcctcctcggaagaaccgagcgtgtatttgcataagggggcccttgaaacgatgagggtggtatgcaaataagaactggctccgattggctgtggtacagcaggtgccgcgtccggattgatcaaagccaggtgggcggggctgtcgcccagggtgactctcccgggaggcgcgtgcccaggctcagtagcattggggctggcgcgcgcggcgaatctcaacgctgcgccgtctgcgggcgcttccgggccaccagtttctctgctttccaccctggcgccccccagccctggctccccagctgcgctgccccgggcgtccacgccctgcgggcttagcgggttcagtgggctcaatctgcgcagcgccacctccatgttgaccaagcctctacaggggcct

SEQ ID NO: 43777 - DNA, 2300 bp, Homo sapien
ggtgttcttctgacagttcttcagagaggtagactgacagggaagaactcaggagtgttcctgtgtgacctgaccctagccccatgccccagggagatcccatcagagcagtggtcctctggggaaacaaagggaaattcccaaaaccagtggaaatcagacttgcatgatcttcaggcccactttaatttcacagggagaagagctccctggcttacccagcctatccatttgctcagtaaacttttcctgatttcctttactgtatcgggccctgagctgggggtggactttggtgtgaactgccctttgccttctgtgggagcccagtgtggtcgggcagaagtctatgcacacctttgataaatctggtgatagaggtgtcctgggtagtggggaactgtattaaagaacatgttgggccaggcgcggtggctcacacctgtaatccaggcactttgggagtctgaggcgagaggatcgcttgagcccaggaggtcaaggctgcagtgaactatgatcgcgccactgcactccagcctgggcgacagagcgagaccttgtctcaaataaataaataaataaagaacacattggtgtttgagaagtaggcagctgacgaggatggaaggagcgtcctgaagagaaggaacggcatgtgtgaagatcctcaagcgaagcagagggagtgtgtttccttctcgccttagtttgaccaaatctcacgacgcctggactattcgggccacaggctgcccatcctgagttaagctaaagttagttgcatgtgtgtcttatctcttttactagactgtgtgctccccgaaggtaggggcaggattttactcacctctgtcaccttcacagtaccccacattcaggcctccctacggaggaaggaattctgatttactctgtggctactctgtcccaagcccagtggtagttattttatacccgttatctcatttaatccccacaaaaggcctgccatttggttatccctttttttttttttttttttttgagacagagtcttactctgtcgcccaggctggagtgcagtggcatgatctcggctcactgcaacctctgcctcctgggttcaagcgattctcctgcttcagcctcccaagtagctgggattataggcgcccgccaccatgcccggctaatttttgtatttttggtagagacggggttttaccacgttggccaggctggtctcgaactcgtgacctcaagtgatctgcccaccttggcctcccaaagtgctgggataacaggtgtgagcctccacgcctggcctgttatccctctttttcccattttacagatgaggtatatgaggctcagaacacttgggtcacttgcctctggtcactcaactctctagtatctggcagaactgggcttggagcccatttttttttctttcctttttttgtctttgttcccttttttttcagcctacaaaggccatgttgacttgtaggagtcaggaaaactgaattcagagttgactctgtcacagactgactctttgtgaccttggacaaaccacaaactccccctgaacctcagtttcctcatgtggaaagcaaagggggtgtgggaatcaatagcatttgaggccaacctgtggaacttagaatgttgttgatttctctgagtggccacgtgtaccctagacaaagtcatctgcccaagaggcctgtggatgtgttcctctcacctgcactctcttgttcttcaagtctggccctgcctgccatatttttccatgaccccgttctagcctacaagggcaagaactctccaggccttggggtagaaaagggaatttccctggtcccccagttcctcctccccaaaggatgttctatgattcagagctcttctctggcatctctgaccctagctgctgctttcttctgcccccacagctgaccaggtgtatggagaccaggacatgcatgaggttgtgcgaaagcattgcatggactatctggtgagaaaatggaggcctttggggaaggggcagggtgggaggatttcttctccacacagaccttaaccttccaatctattctgcagatgaagaatgccgactacttctccaactatgtcacagaggactttaccacctacattaacaggaagcggaaaaacaattgccatggcaaccacattgagatgcaggccatggcagagatgtacaaccgtcctgtggaggtgtaccagtacagcacaggtacttctgcagtgggtaggtgagggaaagatggtgcctcattcga

SEQ ID NO: 43778 - DNA, 2300 bp, Homo sapien
tgggttttaaatgactgacaaagatcactcagacaggaagggcagagctaggattagcgtgtagctctccagctactcaatagcagggattctgccaaccccattttgagacgctgactggtgacagagctttcataaacctcgatcgacccaagcaaactcagttttagaaaaaggctgggcttggccaggcgcggtgactaacgcctgtaatcccagcactctgggaagccgaggcgggaggatcgcttgagcccgggagctggagatcagcctgggcaacatagtgagactttgtccctacaaaaaagtgaaaaaaaaattagccggtcgtagtggtgcgcgcctgtggtcccagctattcgggaggctgaggcgggaggatcgcttgaacctgggagttggagtttgcagtgagctatgatcgcgccactgcattccaacctgggcgacagagtgagacccctgtctcaattaggaaaaaaaaaaaaaaaaaaaaaaaaaaggctgggccgcgcctgcgcactagccataggggcggggaggtcaacgcgaggccgagagtgctgtggtgccagagaaggcgtgtctgtttcccaaacaaccactgtccccacggcgcctgtctgtcccaaggttggtcggtatgccgcgagtgacggcgtctcttaaccaatcaccgcagaactcaggctgttgccggggcgaagcggtgtccgcctcccccggaagggtatttgtaggtgggtgggaccggaagtgacgctacaggggccagctatgctcccgggagtgttgatgttttccagtcattccggctgacagcgttcaagttggaatcctggaggggaggtgtttttcctgtcgtacgtgggacaggccacgctgtccgtccgcagtaccgacgcctgcaggtcagagcttcggggagaaaagtgaagagcaagacggaactgacggggagaaaggctgggaaccagggtgtcgactttgactgaaatttgagacggagggcaccggagggcgagcactcgcctgtgattggcccgtgggcgtcgtcgaggtcccacgcagctgctcaattggttggtgttgcaattgttgtggcggcggcggcggcgattttgcccacgtacttccgagtaaggggcggggctgtgccctggcgcgcgtgcgcagcgccccggggccccacccggtagtgcaagaacctgcgagggggcggagcgaagaggtgcttgttttggttctgtttcctttgaagcagaaggccggaacaagcgtagcaataaacttgctggacttggagagaaggctaagacaaactcgccgcactgccttcatcttggactttacatccgggttctcctctcggcgtgacccgcgcgccgccaccgccgccgccgccgccgccgccgcctccgccgccgagggttctcgaaccggtgccgcgatccctttatccgggtctcgccgttcccgtcgtgcctcgcgcactacactagccccctcatccgggttctctcccggcgtgccccgcgccgggtttgttggggggtactcggcagtgcagccatgactatactccccaaaaagaagccgccgcctcccgacgccgaccccgccaacgagccgccgccgcccgggccgatgcccccggcgccgcggcgcggcggaggtgtgggcgtgggcggcggcggcacgggcgtgggcggcggcgatcgcgaccgtgactccggcgtcgtgggggcccgtccgcgagcttcgccaccgcctcaaggcccgctaccaggaccgccgggcgctcttcatcgctgggcgctggccgtgccgcctggtgcagtggcgggtccccggccacaacaggcttctccacctccttgcgggggcccaggtggtcccggcggcggtcccggcgacgcgctgggcgcagcggcggcgggtgtgggtgccgcgggcgtggtggtgggtgtgggtggtgccgtaggcgtgggcggctgctgctccgggcctgggcacagcaagcggcgacgtcaagctcccggggttggcgcggttggcgggggcagtcccgagcgtgaggaggtcggcgcaggctacaacagtgaggacgagtatgaggcggctgcagcacgcatcgaggctatggaccctgccactgtcgagcaggtaagagctgtggggtgaggggtgagcggccacggcagatgggacccccagactgtgaagggactcaaggaaggctgtttgagatcgccccaagggatctaggcgttttcactgggcctgacagtcttctc

SEQ ID NO: 43779 - DNA, 2300 bp, Homo sapien
atttcaactagggttagtatctcaagggaggcaaggctatactcaaaacagctttcccatggtctctttcagtcaacctgttgtatggtttgtctcctaagactggaagtgaactccaaataccttcttggttcatcagctcatctgaaccccataaccattccctgaggtagtctgggcaggtattatcattcctgttttacacatgggtaatctcaaaagtgacacaatgacttgctcaaggtcatacagttggtaatggtccatctgtgcctggaactgaggtctttctggctccaaagcctgggatccttccactgcaccaccatgcagactactttattgaacacttcctatgtgctgggcacagcaccaggcccttcacaagcattaatctctgatcctcggattagaattattgccaatttatagaatagaaattaaggatgggtgctcacttcgcaccacatatactaaaattagaacgatacagagattagcatggcactatgcgaaaggatgacacgcaaatacgtgaagcgttctataaaaaagtaaacaacaacaacaaaaattgaggacggggtgggttttaaatgactgacaaagatcactcagacaggaagggcagagctaggattagcgtgtagctctccagctactcaatagcagggattctgccaaccccattttgagacgctgactggtgacagagctttcataaacctcgatcgacccaagcaaactcagttttagaaaaaggctgggcttggccaggcgcggtgactaacgcctgtaatcccagcactctgggaagccgaggcgggaggatcgcttgagcccgggagctggagatcagcctgggcaacatagtgagactttgtccctacaaaaaagtgaaaaaaaaattagccggtcgtagtggtgcgcgcctgtggtcccagctattcgggaggctgaggcgggaggatcgcttgaacctgggagttggagtttgcagtgagctatgatcgcgccactgcattccaacctgggcgacagagtgagacccctgtctcaattaggaaaaaaaaaaaaaaaaaaaaaaaaaaggctgggccgcgcctgcgcactagccataggggcggggaggtcaacgcgaggccgagagtgctgtggtgccagagaaggcgtgtctgtttcccaaacaaccactgtccccacggcgcctgtctgtcccaaggttggtcggtatgccgcgagtgacggcgtctcttaaccaatcaccgcagaactcaggctgttgccggggcgaagcggtgtccgcctcccccggaagggtatttgtaggtgggtgggaccggaagtgacgctacaggggccagctatgctcccgggagtgttgatgttttccagtcattccggctgacagcgttcaagttggaatcctggaggggaggtgtttttcctgtcgtacgtgggacaggccacgctgtccgtccgcagtaccgacgcctgcaggtcagagcttcggggagaaaagtgaagagcaagacggaactgacggggagaaaggctgggaaccagggtgtcgactttgactgaaatttgagacggagggcaccggagggcgagcactcgcctgtgattggcccgtgggcgtcgtcgaggtcccacgcagctgctcaattggttggtgttgcaattgttgtggcggcggcggcggcgattttgcccacgtacttccgagtaaggggcggggctgtgccctggcgcgcgtgcgcagcgccccggggccccacccggtagtgcaagaacctgcgagggggcggagcgaagaggtgcttgttttggttctgtttcctttgaagcagaaggccggaacaagcgtagcaataaacttgctggacttggagagaaggctaagacaaactcgccgcactgccttcatcttggactttacatccgggttctcctctcggcgtgacccgcgcgccgccaccgccgccgccgccgccgccgccgcctccgccgccgagggttctcgaaccggtgccgcgatccctttatccgggtctcgccgttcccgtcgtgcctcgcgcactacactagccccctcatccgggttctctcccggcgtgccccgcgccgggtttgttggggggtactcggcagtgcagccatgactatactccccaaaaagaagccgccgcctcccgacgccgaccccgccaacgagccgccgccgcccgggccgatgcccccggcgccgcggcgcggcggaggtgtgggcgtgggcggcggcggcacgggcgtgggcg

SEQ ID NO: 43780 - DNA, 2300 bp, Homo sapien
cattgcccaggcccctcctaggttctgtaaatgtcccccagactccttcccatctctttagttcttcctcctggttcctcttggcctctctagacacccccagtttccttgtttgggtggctcaaggtgtctccaagcccccaccatcctggagacagccacattctcctaaacgccaccctcactaagtctccctgggcttggggagtggcacgatggcggcaggcctggccacgtggctgccttttgctcgggcagcagcagtgggctggctgcccctggcccagcaacccctgcccccggcaccgggggtgaaggcatctcgaggagatgaggttctggtggtgaacgtgagcggacggcgctttgagacttggaagaatacgctggaccgctacccagacaccttgctgggcagctcggagaaggaattcttctacgatgctgactcaggcgagtacttcttcgatcgcgaccctgacatgttccgccatgtgctgaacttctaccgaacggggcggctgcattgcccacggcaggagtgcatccaggccttcgacgaagagctggctttctacggcctggttcccgagctagtcggtgactgctgccttgaagagtatcgggaccgaaagaaggagaatgccgagcgcctggcagaggatgaggaggcagagcaggccggggacggcccagccctgccagcaggcagctccctgcggcagcggctctggcgggccttcgagaatccacacacgagcaccgcagccctcgttttctactatgtgaccggcttcttcatcgccgtgtcggtcatcgccaatgtggtggagaccatcccatgccgcggctctgcacgcaggtcctcaagggagcagccctgtggcgaacgcttcccacaggcctttttctgcatggacacagcctgtgtactcatattcacaggtgaatacctcctgcggctgtttgccgcccccagccgttgccgcttcctgcggagtgtcatgagcctcatcgacgtggtggccatcctgccctactacattgggcttttggtgcccaagaacgacgatgtctctggcgcctttgtcaccctgcgtgtgttccgggtgtttcgcatcttcaagttctccaggcactcacagggcttgaggattctgggctacacactcaagagctgtgcctctgagctgggctttctcctcttttccctaaccatggccatcatcatctttgccactgtcatgttttatgctgagaagggcacaaacaagaccaactttacaagcatccctgcggccttctggtataccattgtcaccatgaccacgcttgggtgagtgtggactctgcgttgggggctgcccgattacactcaccctttctgtaaaattaggaagtttaaaggaatgatctctttctttctttctttttaaatggagtcttactctgtcgcccaggctggagtacagtggcaagatctcagctcactacaacctctgcttcctgggttcaagtgattctccagcctcagactcccaagtagctgggattacaggtacacgccaccatgcccagctaatttttgtatttttagtagagacggggtttcaccgcgttggccaggctggtctcaaactcctgacctcaggtgatccgcccgccttggccgcccaaagtgccgggattacaggtgtgagccaccgcgcctggcctctttctctttttgagcttcagtttgctcatctgtacaaactgagggagctggacttaattcttcagatccctcccagctctgacaatgccttgattttctaggtcaggagacttgggttcaaggattgtcttagctgctctctttctgttgatgtcgttttctcatggcctcagttttcccctctgtaaaatgggaaatgctgatcccttcatcatctagagaggattcaatgacatcatagttgtgaaagttctctgaatgtttctggtgcaggatacataggtgttggctttctagcacctttttctgttttggggacccatgtctcccaaccttctagaattgtctgctgtgtggggcactacttctgagcctttgtgattccttgatgtttcccagaacaagatgttttcagcatttttattattattatttttttgtcgatccctgcagaagaaacagagttgggataaaagtatcaaatggaatcatcgaactcatgagctttccaaagatactgtctagggcagatgctgtgatccttctctaagtttccatcactgggattgggtatacagttggt

SEQ ID NO: 43781 - DNA, 2300 bp, Homo sapien
tcatctctgcatgagctctccttcccagagaccaactcttttttattttattttattttattttttaatttatgtctggagcctggctactctgcatttgggattggggatgctgggtgggtgtgtggtccatgttcagcgttctagcaacacgtgtgtgtgtgtgtgtgtaaaggctatgcagccaaaataccatctggccagacgggcccacccactgactgtctcgtctcgttcttttcaaccaggaggaatatgctgggggcggggaggtttacaccattggaatagggagagaggtctctggctgcaacgttactctcttttccccaccctcatccagcctgtctccatttactgctgaccagcccctcaaactgagtggagctgaaatacctgcagatatgtacatgggtagacatgtatgggattgtgggtatagatgagtagacagatgggaggatggataagtggttggatggaccgatggatgtataagtgaacggttgcatggactgatgatggatagattgggaaataaatggatggatggataggtggttagatgaataaatgggtagatagattggtaggtggatagaggatggatagtagagatgtaaatggacagatggataataggtctatggacaaatgggtggatgatttaggtagacaggtggatggatgggtttatggacaggttaggagtaaatggaccaatggttgggggaatggatggatgggtagatgagctaatgaatgggaagggtaaagagtgggagaagaaatgacaagtggagctatgtatggacagagatgggcagaggatgtcaccctgcatgtgttccgggtgggaagagatgggcagaggatggatacatacagatagatagattggcaaacagccaaatggggtgaacttacaaatggatgaatgagtgggtgggtagattaacgactaagtggacgggtgggtggagggatggatagaggaattgattgtgtgggtgggagaatgggtggatgggtaggtggaggaatggatgtagaaatggacaaatcaggagtgtgccaaatgggcaattggaagtttacacgggtgggtaaatcttgggtgaaaggctaggcctggccctgcattacagtgcccctgtcatcacactcctttaattaagattaagcatccctggtgtgagctgtgtccagtgctatcacctttcacatcatgtaatgctccaaatgacgctatcaagttgggataagtctctccatctgacaactgaggaaacaatgcaagtcacttgctcaaggatgcagcaagtcagtggcaaagctggggtttgaacccacccatagccagccagaggcattccataatcagtgctcctgccatccagaagcagagccctctagcggaggaggtgtgatttgaggccactggatatggacagataagagagactaccccctcggagtggggcctgcctgagatggtaggggggtgggacctggattgtccccctctacattccctttaccctcatttcatatctaaaaacaggaagtcccgtgctccaatcccacagccgaagtcttagagctggggctgtaacccatgctgcgcccctcaagggggcggcttcggaagcttggccatctagagaaacactccccagcaattacccccgactcctggctctcctgcctttccacagtctggggggcagggaggggacagcgctgcatcattccctgtggcactccgctctggggccattaactgacgccttcccatcgatcggatctgctaagtgctgctgattcaggcgagtgggggtgggggcccctgggggcagagcgggtaggagctgggcaggaagagaggggagtccaggaaggaggtggagagaattggcgaagttccctgccacccccattttccagatgacgcgactgaggcccaaccagctttgtaggaggcggagtctccccagggtccctctctggctgtcctaggggagggggctcagggagccacgaggcccctccctgcctctccatctcccggcaagctcagaggggcggggagagagagccagaggaggaggagaactcaggcagctctgcagagggggccaggagctcgggtgtttggtacccccagccccaccgctgttgctgctcctgcagcggggacacaggtgaggacgccccgagagagagggggagggggaccaccactagcgctgtcctcatccttccctggtccagcccccacgccctaacccatcctggga

SEQ ID NO: 43782 - DNA, 2300 bp, Homo sapien
agctgggattacaagcgcgtgcgccaccacgcccagctaatttttgtatttttagtagagacggggtttcaccatattggtcaggctggtcttgaactcctgacctcatgatccacctgccttggcctcccaaagtgctgggatacaggcgtgagccaccgtgcccagccacggaaaaagatttttgggggaggctgaggtgggaggattgcttgagctcaggagttcaagaccagtctgggcaatgtagcgagaccttgtctctacaaaaaaatcaaaaaattagcccggcatgatggcacacacctctgatcccagctacttgggagagtgaggtgggagaatcacttgagcccaggaggtcaaggttgcagtgaactgtgatcattccagtgcactccagcctgggtgacagagcaagtccctgtctcaaaaaaaaaaagaaaaaaatgtgagaggcatggatagagctgaaccttcgtcttttaggcatgtggtcatttggcacagggactctgccacctgaggggttgaaggccagttctccctctattcgaggcatggcaagggacttcagagaccacctcatccatcatatatccctgttctactcaccagccctgcaggaacgctatgggaaagaagccgggaagttctcagctgtcagtgagggccagggggatcccccagggggcccggcccccaccgtcctggcccccatgccgttggcagaggtggagctgaaatgggaaatggagaaagaggagaagagattgctctgggaacagctgcaaggcttagaggtgaatctgagtctgttggagctggaatgccagaaggcagggcagatgttctacctctgtctatagtcccacggagatggctgtgacatcaccatcttgtgggctgatggggtgagggaggcaggagggcaggggaaggcttctccttgtccttgctaacaacaaccctcccatccctcatccttccctgcagagctcaaagcaggccgaaacatccaggctgcaggaggaacttgctaaggtgcggctgcttggctctttcccattctgctcccaatctgctggattctttcccattccattcccaatcctagggcagaaggggcattgtaccccatcaaagcctaggtttcatcatctgtgaaatggagagactcacacctatgtctcagagttactttcagtatggaatgagttaatgtggtcccactatatcttgtgcatgataagtttcatcccatccatctctcagctttgcccattcactcattcattcattcatgcaagcatttacagactcctggctcttatcttaggacctggagacccaggggtgcggcacccagtcatgatatcctgctttccaggcctcccagcctagccaatctataacatggccattggccactatgttgggagcataaataccgggctttggaacctgaaggatctgggtggagataatattgttgttgctgacccgctgagcaaccaaattacttaacctttccaagactctgtttccccatttgtaaaactggtactactcacttgtcagggctattttgaggattccacaagacaacataagtaaatcctggcttccaaaaatgacttaataagaagtgtctatatttattaattttaggtttgtctttatattattctcaatgttatcacttgtctgtacctctctccccagctctccgagaaactgaaaaagaaacaagaaaggtaaatttctttttcccaagggtactgggggccgaggggggaattaacttacggaactgacccatctacatctgtccttctgtgcccagtttttgccgtctgcagacagaaaaggagactctgtttaatgacagcaggtaactgccagatttgcgggtattggtggacaattgggacagtgcccagtgaagattacaggggcagagctaggagactgggcctcaagccatgtccaacacaccccctccccatcactcctaggaacaagattgaggaattacaacaacggaaggaagctgatcacaaagcccagttggctcgaacccagaagctgcagcaggaacttgaggctgccaatcaggtgatggggactgggttctgagatccctggggtaggggccaggactgggagcctggagaggtctgaggtccatggaggctggctggggagtctgagatttcctgtgttggaaatgggttctggggccccccaggagctaggaaaatgggaattggagagccctaggaattgttataggagtc

SEQ ID NO: 43783 - DNA, 2300 bp, Homo sapien
tttgttttgtttttgagacagagttttcccctctatcgctaaggctggagtgcagtggcacgatctcggctcactgcaccctccacctcttgggttcaagcgattctcatgcctcagcctcctgagtagctgtgattacaggcgtgtaccatcactcctagcttatttttgtatttttagtacagatgtggtttcaccatgctggctgggctggtcttgcactcctgacctcaggtgatacacctgcctcggcctcccaaagtgctgggattacaggcgtgagccactgagcccgcccggcccatactatggaattttactagtcaataaaaagaaaaaaagatacttatacacgaaacaacttggatgaatctcaaaaggattatgatgagtgaaagaagccagacagaaaaggatacatcctgtctcattctatttgcatgaaactctgcaagagaaatgtaatccagtaacaggaagccaatcattggttacctgggatagggggtggggtttgggataggatacaaagaaatcaatgttccctatcttgcttgtgatggtggttacaaggttgtatacattagacaaagctcactaaattgtacccttaaaatgggtgcatttatgtatatagacagatcaatagcgttatctttcaataaagtcaattaaatcaagaaagaaatcaaagagtcctggctggcaatacttttctttttctttcttttcttggagacagagtctcgctctatcccccaggctggagtgtagtggtgcgatctcggctcaccgcaacctctgcctggcgggttcaagcgattctcgtgcctcagccttccgagtagctgggattacaggcgcccaccaccacacccggccaatttttgtgtttttagtagagatggggtttcaccatgttggccaggttagtctcgaactcctgaccgcaagtgaacagccctccttggcctcccaaagtgctgggattacaggcgtgagccaccgcgcccggccctgctggaaatatttttccacagcagggaaatcattaaattctacgaaaataagaaggctgggcgcggtggctcacgccttaatcccagcactctgggaggccgaggcgggcggactacctgaggtcgggagttcgagaccggcctgaccaatatggagaaaccccgtctctactaaaaaaaaaaaaaaaaattacccggacgaggtggcgggtgcctgtaatcccagctactcgggaggctgaggcaggagaatcgcttgaactcgccaagcggaggttgctgtgatcggatatcgtgccactgcactccagcctgggcaacaaaagtgaaactccgtctcaaaaaagaaaaacaacaacaacaacaacaacaaaaacagaaagaaaaaagaaaataagaaaaaaactacactgagataccatttcttactctcagatcggtgagggttatagtgaattctaatacttgaatgagcctggtgtttcaccaccctggtttgttttttgtttttgttttgttttaatgtagctttttcgtttgattcactgtcactctttccactctgctatttttattggtggctaagtcctttacctaacgtgacatgcagtatcatgataacaaaataagtgtcaaaccttaaaaaaaaaaaaaaaaaaaaggccaaaggctttacaagaggtgggattcccctttggggtctcccggaggaggggcgggaacaagaccagagcgaagcttccgctttcatttctatggttattaagttacccattctcattaaaggaataccgcggaagggtgattttctgtcggcaaagacttccctagcgacgagtccacccatgaaacggggatgtaataatgtcgtatcacaatgggtggcctagaagagtccaaaagccaatcagatgacttacattcgggtagaacgttgtattacagttcacctgactcgtcggtttcgttctcttctctgcgtctccaaaatgctgcccttcggaattaggttctaccccctccattcctggccagtggtttggtccgaccttaatactgccaggaggcgcgagctgcgtctgcgcagaaagctggcgggggggtggggggaggaacatggcgcaagctctgtctgaggaggagtttcagcggatgcaggtgccgctcgcggtgggaaagaccacccggctaggcgaccgggggcggggtagcgagaggtcgtgctatcagctctgagaaggggttggttgggatggaccctgagtttatggggtgggtctg

SEQ ID NO: 43784 - DNA, 2300 bp, Homo sapien
cttgaacctgggaggcagaggttgcagtgagccgagatcgcaccattgcactccagcctggacgacagagcgagactctgtctttaaaaaaaaaaaaaaaaggccgggcacagtagctcacccctgtaattccagcactctgggaggccgaagtgggcgatcacgaggtcaggagtttgagaccagcctgaccaacatggtgaaatcctgtctctaataaaaatacaaaaattagccaggcgcggtgacaggtgcctgtaatcccagctactcgggaggctgaggcaggagaattgcttgagcctgggaggtggaggttgcagtgagccgagaccgtgccactgcactccagcttgggcaaaagagcgagactccatataaaaaaaaagaaaagtacctaaaatttgccaggcgtggtggcacatgcctgtaatcccaggtactcaggaggctgaggcaggagaatcgcttgaacccgggaggcggaggttgcagtgagctgagatcgcgccattgcaccccagcctgggtgacagagggaaaccctgtttcaaaataaataaataaataaataaaataaaataaaataaaataaaataagagagtatagggccaggtatggtggtttacgcctgtaatcccactttgggaggccacggcaggtatatcacttgaggccaggagtttgagactagcctgggcaacatggtgagaccctgtctctactaaaaatacaaaaattagctgggcgtggttgcgcgtctgtaatcccaggtacttgggaggctgaggcacgtgaatcgcttgaacctgggaggcagaggttgcagttagcagagatcatgccactgcactccagtctgggcaatagagtgagactccgtttcaaaaaaaaaaaaaaaaaaaaaaagagagagagtacagcaaagttgaggagaaaaaataaaggttattagggagccatcagtctggttacagagattcagcaaccaggcttggaggggtagcagtgtgataggttagaaagagctagcaagggtcgggtgtggtggcttacacctctaatcccagcactttgggaggccgaggcaggcagatcacttgaggtcaggagttcgaaaccagcctggccatcatggtgaaaccccgtctctactaaaaacacaaaaaattagctgggtgtggtggcagatgcctgtaatcgcaactagagaggttgagacaagataattacctgaacctgggaggcagaggttgcagtgagccgagatcatgccactgcactccagcctgggtgacagggcgagattgtctcaaaaaaaaaaaaaagagataacaagtatggtggtcacagtctagggtagtcacggtgaccaagcccagttccagccctcagaggtcacagtctggtgggggaaatggagggaccaggcctgatgcttgttctaggagtcagtgtctggttgagaaattgcgggaaaatactttttcccagccttcaagaagatacttgtgttcatttaaattctcccaaaatctcaacatctgttccaaaattcagttggttgcttgttcctctgcctttcagatatttgtctttgtcctttccaccatcttaaatacctctgttgtctgccaggaaatatcctcatagacttctttatcagtttcaaaagtggatttgcaagaaaagcttctttccccctctgccctcagtggcatttttcaatcgagccctcactcacctgactttactgttttaccgcctcacccatttacaggcttgcatatcttcagaacagttcaattctattcctcagcttcttcaaagaccaaatggaagtaagaagcagcatgttctgactaacatccctttagagaaataaattagatgaaacacttgcagcagttaaaattgtgcctggtgattggtctttaaaaatactgtcttttgtttgcatattgtcttcctccatgccctcttcctttctaaattcttttatccatccttctggaatctgtttctcccaaggacttttatccctcttggcctgcatgggctatgttcactgcacagtgtaaaacaaggacaggagactctttgccaaagttaaaagcgcatcaaacacgcctagcttttattattttaatcacaaacctatagacccctcagtataccctccatggggcctggccccagcaatccaaagctgacaaccttgggtgtaggtatgaggggtgggaatggaggggggagtgtctcttgataactctgaaatggggtgattcctccaaatgaa

SEQ ID NO: 43785 - DNA, 2300 bp, Homo sapien
gcctggctaatttttttgtatttttagtagagacagggttttgccacgttggccaggctggtcttgaacttctgacctcaagtgatccacctgcctcggcctctcaaagtgctgggattacaggcgtgagccaccgcactgggccattgtttttgtttttgagacagagtctcactctgtcgccccaggctggagtgcagtggcgtgatctcggctcactgcaacctccgcctgtcgggttcaagctattctcctgcctcagcctcccgagtagctgggactacaggccaggcgcagaccaccacgcccggctaatttttgtatttttgtagagacgaggttttgccatgttggccaggctggtatcgaacttctggcctcaagcgacccaccaaccttggcctcccaaactgctggattacaggtgtgagccaccgtgcccggcccattcttacatgtttaaggcatcataggaattttaacattggatctacaagttccgttttagagttttgattggtacaattggtaatgtattcttttttcttttttttttttttttgagactgagtctcactctgtcacccaggctgcagtgcagtgacactatcttggttcactgcaacctctgcttcctggttcaagggattctcctgcctcagcctcccgagtagttgggattacaggcgcccgccaccacgcccggctaattttttgtatttttagtagagacggggtttcaccgtgttggccaggctggtctcaaactcctgacctcaggtgatccacccgcctcggcctcccaaagtgctgggattacaggcatgagccaccgcgcccggccagaagtcatctttattatgtagaggtttcccccttgtacgagatggttgtgtgtgagtatggatgagtttacgaaagcaactgacagacctgtgaaataatgatgccaatacaggaaggtccaaggtaaatgaaagcccggtgaaattcctggaggcgcaactcagggtggggtcttgggatgtcaggaaagaggaagggaaggctgtaggtctgggtgttttgtgagctatttgcacctgaggatatatgagtgagaccctccgccttgtgcgagccggcttgcatgcgtctggcatacagaagcgctcagtgaatgttgaataagtgaacaaatgagtgaatcaactaattttgggaagcttcttgtatgccaaacaacctgctagcacttttcatacattatctttaatcctcagaacaaccctgccagacaggtattttgacccccatttaacaggccaggaaagctgaggctgggagaggggaggtccccttccctattcaaacctggatctttgtgattccagaagtcgtcattcaccgaagggaccagattcattcacccgtcaagaatttattaagcacatattgcgcagcgcaatgaacatagtacaaccgctctcgatggcatggaacaggcggaatactcccggaagaccagctgggcggctggactgcggacagcgaaaggggggggtttctggcccgcaccttcagggaatgtagctgcctgtgcctcatagttatggctttggctgagagagcacagccagatcgaggttggagcgcggtctagggctcagatattacaaatattggccgaaagagggcgcggttccgcagctaaaagcttggccaggagaccctccgtgcgccgactggccatcgatgcgcaggcgcagaggacccaaggagcggcttaatattaccttgcagagggataatttgagaagagagggcgtggctccgaaagcgacgcaaacatagaggcgtggttcaaccaaatcaaccctcgcctatttgtcgctgcccctgagggcgtggtctgggtgctgcttctcggaatgagggcgggccgaatcgcgtttttcctccgcgtcggaggcgtcgcttagggtgggccctcgaatcgccgttcagcgattggccgcctcgctaatgggtcgtggccagacgggccatccatccccagtgcggtcacttcctgtggagtttccccatccctgggaggagggaggagggggaagaagacgagggggaggagggcggtcgtccggggttaggttgagggggggcgtcggtccgttctgggcgggggatgactcacagcccatcccatctcccagacgccgcccgcccgcgcagtgctagctccatggcttagcggaggaggcggcagtggcgagctggggggaggggggactcttattttgttagggggaccgggccgaggc

SEQ ID NO: 43786 - DNA, 2300 bp, Homo sapien
ggtgacagggtgagactccgtctcaaaaaaaaaaaaaaaaaaaaaaaaaattgcgtctgaatacatttagtctctgattttggatagcaagagttcagacaagttatctgaggaaaaacaactgtttcaaatgtatcaagtgagactgaaggacaccagctctgtctggaaaaaatgtgtctgaatgtatctacttgattcctgacttcctgtggggaagaatacttgtaactgtgacagccaacatacactgagctcttaccaggcactgttctgcacaagctttaaatgtattaactgatttaatgctcacaatagccccgtgaggtacatactgttatcatcgtccccaattgacagagaggcacagagaggttaagtgacttgttcaagcagtcacacagctagtaagtggcagagctgggttgaatcccagactcaccatttactagtgacagcagggtcacgtgaggcccagggcccagctggggtagggcttagaggttgggtcctcttcgaggctattaaaagtcatggaccagggcaatgatgtgtgttagtgactgccccatttgtctgcctggcccaggaggtccagttacctgctctcccccagttacccccacaacagcccacctctgtgtgagtgtattaattgttgttagtaagagtcattaatgacatggtgtgtttccttgcactttgaaatgcctttcaaagttatttggggcctccattgtctctgtaaccaccttttacccattttacagatgaggagacctaagctttgagactcaatctacattgccagccagattctcatccctcttggctctgattttattactgtctcacttcccaacatctttggtggcccataagaggtgggagaggctgtggccgagaggacactccccaatgcccaccttaccactgcccgccccaggcagtgaagtggggagggcgatgaaaggggcctttgtgttccatgctggaaatctcacacccaggaagaaaggtgggcagggatggcgggaggccttaatagtatgagtctggggcattgctgattcagagtgagctcctctctaggctcagcccatctgcagcttttctcacttcaggtcatggtgtgggctgctgcaggggtctgggtagggcttgggccctgggtcacagagcagatggtcctgaatggagcacaggatgtgtgctgtgtgccgggactggcccagagctcaggtggtagtggtgatggtggtggtggtgatggtggtggtggtgggcggggtgaggggaggcagggacagtacgtcgtaaggactcaaagctctcatttccttctctggcatgaagcctgactctctgaagaagagagacccagcatggatgtgaagaagcatgagcccccttccctacttctccttcccacttgcaggagtagcctctgtctgcctcccagccaggacccagcccccggaaattctgatttcacctgctcttctgccactgtgatctgaatcaggcctcttcacctttccaggcctcagcttctgcatctataaaatggctgtgaggaggctgggtctgtgccatcctgctacatttgtaggaaccaagagggatcaaaacccataagtgttttgtagggtgtaagttgtgcttgatttattgagattatttcttctggagccacagaaggatcttgagacctgacctctccttagaaaggttgacttcctctgtccccaacttgggaaactattattccccagtgagggtgggaattgccccaaggccttctaccactgccttgccctgggaggaaagggtaggggcctcagaatgtgatgcttagtgccaagacacaaaaactcagtttacacccgaagcctcccatgtactttacagctccccacacctctatggcccagatccaagttgccccttgggtgggcagcgtctaatcctctgggaatttgggcagtaggagaggcagctgctactcccaccactctcagcccttcttcccagttttctgctaagtgtacggggtgaggaggcacaggcctccatgcctggccagttttaaaaaaaatttttgtagagatgggggtctcattatgttgcacagtctggccttgaactcttggcttcaagcaatcctcccacctcagcctcccaaagtgctgagattacaggcaccagctaccctgcctggcccaggctgtcttcttagacatgctgagcaccctgagtggacctggccctgaaactgcccccaggggtgaccctagtcc

SEQ ID NO: 43787 - DNA, 2300 bp, Homo sapien
cccgctgcagctggtccctgggacaggatgggggccatggggtcactggtagggggagacctggggttggtgtgggggtgtgctggggaggggtttgctgggatccctttctcgccatctgggcggggatgaggcagctccaggccccaaggcaagtatgcagagggcaggtgagcggaggcagaagcttaggaactgggtgtgggggtgtggggcgttgactgtgtctagcctgcccagtgaccccatgactcatactctaactatgtccccccgaggtcgggctgatagggaggagttggggttcctgtgtggaccctgtctggacttccaggacgctctgagaaattagagaagaaaggattggctgggtgcagtgcctcacgcatgtaatcccagcactttgggaggccgaggcgggtggatcacctgaggtcaggagttcgagaccagcctggccaacatggtgaaacccaatttctactaaaaatacaaaagtagccaggcatggtggcgtgcacctgtaatcccagctactttggaggctgaagtgggagaattgcttgaacctgggaagtggaggctgcagtgagccaagatcgtgccaccactgcattccagcctaagtgacagagccaggccctatctccaaaaaaaaaaaaaaaaaaaaaaaaaaaagaatcgaagcagcccagcatggaattgggattggattgggaccaatgctggcaagggggaccgtggatggagttgggttcctgtgggggtaaaggaaggttccagggaaccctgtgagagttccttgggcctaaatgggggctgggaaagttggagccccagtgatctgggatgtggaggaacccctgccatgctgggaagtgtcagaccttagatgagtggggatgtggggcctgggtttgtcaaaaggctttagggactgatccccacccctgctgttgaaggcagggcaccactgcttcaagagaggggtacaggccctatggggcaggcaggaggactgcagagaaacatgacaccttacaagcagcttggcctcaccccacaatacacagatggggaaggggcttgaacccatgcctccttggttggctgggtcttcctcacaccaggctaacatgtcatgacaagctgccgacttcaaggtaggtgataatggagctctgtggccccataaagccctcccagtcacctgccacctaggttaggccaggtggtgggaggtgatgtcactcagctgcccagctggggactgagcatgatgtggaaggaagggagcaaactccagaggaggggtggccagccaaggcaggttccatggtcagctgagccatcgggggcagagaaggaggcaggaggcaggtggttcgttatttgcagctgtggactttgcttctcacaaatcccagcaggaggacttccctacactaggctcaggacaggctgtcatggcaagaggggctggagggaccctgggtcaagtgaacattctccttgctacactagagctacagaatggagttgggacaagcacagacccacagatctgagcttgaaccctggctccaccgcctcctcatttacttactctatcttttattcattcagctggcacccattcattgagcacttgtgtgtacagccatgttcagggtgctggtgatgctgctgaaaatgggacagataatgtttcctgtcctcgtcgatgttccaggaggcacaatctcttgttggacaaccgtttgtgagaggatataactgtggaagtgataattaagttctagaatgataagtgtgatgcaggggctggggtggtgagaggttgaagaaagcacttcaggcagcatccacagcctgggcaaaggccctgaggcctgagggaccagggagcttatgaggaagttggtggagttagagcggttctcatgagcgagagtgtaggaccagaggggtgggcctggtttatgtctgtggctatgggccagttatttcacctctgtgccttcctttcctcatctctaaaatggggatacgaatctttccgggtggctctgaagattgagtgtggcatcataggtaactgttgcaggcacccaggtgttgactgcgtgtccattgttgttatagttggttgaatctgtcccattaattctccttccccaggcaagactcgtggctgtgacccatgggcctctgaggaggcgttgtaagtccgcccagctccccacttgctgtgctctcactcaatgcgaagggaaccaaggtaccagggccaagtgggt

SEQ ID NO: 43788 - DNA, 2300 bp, Homo sapien
gcctagctggcggggcgtgcagctgagctgagccccctcagggttcttcgggttaagcttatcgtggagggttgaagtctggtcctcatccagctctgtccattctgagatgctgcctcctcttcagccgcccaccccaccccccatcttcacaccctagggctctgtgacctctgccccagcctggagaagcaactgctagtgttcccgggacacaagtgtgggagtctgcaacttgtggtgagccgtccagtggacaagggtgggtaggttggtggactggcttccttgtggactcttggccccttccctccataccaccccaacctcagactcctccctcctaccccaggacctggcgagcacaaagcctggcacctcgtctgctccattcacgatcaatgcacatcagagtgacatagcctgtgtgtctctaaaccagccaggcactgtagtggcctcagcctcccagaagggtacccttattcgcctctttgacacacaatccaaggagaaactggtggagctgcgccgaggcactgaccctgccaccctctactggtgagcacagggtatgcatggtgggctggtgaccccataccacatgacatgtgggcatcactgctgatctgtcttctagcattaacttcagccacgactcctccttcctctgcgcttccagtgataagggtactgtccatatctttgctctcaaggatacccgcctcaaccgccgctccgcgtgagtaccccctccccaccctaccgtgtccctgtccccctgcccatttaccatacctgggcttagccagtgctgcctgcaggctggctcgcgtgggcaaggtggggcctatgattgggcagtacgtggactctcagtggagcctggcgagcttcactgtgcctgctgagtcagcttgcatctgcgccttcggtcgcaatacttccaagaacgtcaactctgtcattggtgagtgggaacagccccttggttgggggtactgcatggggcaaaggcctgcaggttggacctgaaaggattttagggccatgtgaggctcagcttcatcatcagtaagggggacagcactgggcaaaggcctggaggcagaccctaggtcctgagatgcctgagaggactggagcctgtggctgtggcagcctctgaccttttaccaccccccctcccccagccatctgcgtagatgggaccttccacaaatatgtcttcactcctgatggaaactgcaacagagaggctttcgacgtgtaccttgacatctgtgatgatgatgacttttaaggaccctgggggctgtgctagggacctgcagtggcagaactgcagagctgagccttggcagtggggcgtgcttggaagccaccagccagcaagcattaatggggctggtgcccactttccactcagcagagctatgtctaaataaagagctcacttccccccagcacttcttgatgactgtgtgccccaagggccaggccagagacccaggaaggcagcgaccccttgggatccctaacctggaggaaattgccagggacccagagggagtgccctaatccaacctggggattttttaaaagcttcctaggaagagatgatctccgatgtgatgaatacgaataaaaggcccttaatggcatttacggcttgacctcaggggcggggcatggagtttcctggagaaatgtgaccctcttgggcgctgacaggaaggaggtggaatccaactcggatccttgtgacagtccctcctttcttatctgtctggctactttgtgcttgagccgctggcaccgcccggagcagcccctgcggcgccccgcgcgggggtggatggcagttttaagggttgggagcatctcgcttcgtggcaaaggcttgatttcccggcagcctttgctgctttcctgagcggcgtgttagttgcttttccggtcacgtgcatcgccgcccctgcgcaatccacctaggaggttaggaaaaagctgcccagcccagactccatttcccggtgtgccccgcggtggcgaggggcgtaacggttgttgtagtccggccccctcctggctggtccagccacattaaccggcaggatgtcggaggtgcggctgccaccgctacgcgccctggacgactttgttctggggtcggcgcgtctggcggctccggatccatgcgacccgcagcgatggtgccaccgcgtcatcaacaacctcctctactaccaaaccaactaccttctctgcttcggcatcggcctcgctctcgccgggtg

SEQ ID NO: 43789 - DNA, 2300 bp, Homo sapien
ggaagctggagcacgatcccagggttggttgggtctgggggaggctggaagtctttcgagtaggggtctaaggcagaggtcttgagtgggtgctggcgttggaaggagcatgcggctggtcttgggagaggggcgaggcatcccggacagagtcttggaatggaggtgcaaaaaaggggtgttgaaagttggagctgtccagagaataactctaaggcagagctgtccaaagaaagagcatgaggcattccagtggagggtgtaactgaaagaaaggaaggagatttggactcttggaggatgggggagggagtatgtctggccagagttattggggagttgaggatttgaagggaagttgggggctctatggcagtaatcttagtaggggactgcgcaggcatcttaggggttgaggttctcctaggtaggagttttgggtggtttgttttgggcaagggtcttagaaggcaagggtgccctggggcggggtcttggataggggtctagagggggaatcttaggaggatggggggggttcctggggttgggtccaggccaggttatgttgtagtcaaggacagcagaacacaaggaaggagatgtcccaggggtggaaaatttagagtgctagggggaatcctagggtagagtccccagggcataagccaatctaagggaatgtctaggctggccctgaagggtagttaccaaggcatgagaaggggtcatcccaaggtaggcatcctgaaggagtttggggaagccggttgagggggaaaggtgtgagaggactctggggtggtcaaataggttggggtacagttagaagggtatgagcagaggagttcctggggatggcagaccaagcatagcagtcccagggccaagtcagggaggtacaagaagtgcatctcctagcccacttttgtctatttattgagagagtccggtgctaggtcaggtttgaagatgagaaatgggttgggagtggttccaggccatgtctggcattgggatcaagattggctggcggtggggaggagatatcacgggggcaccccctatcacattacttcctgacaagtcagtgagggccagcatgtaaagaggaggtgtggggtccacgtcagtgtgggcctggagcttgccaaacctgaaagaaggagggttcctggccatgttgtttgggatcttgggagcttagagcagagaccctgggactctctgtttttatctttttcttccccccgagacggagtctcgctctgtcacccaggctggaatgcaatggctcgatttcggctcactgccatctcagcctctcgggttcaagcaattctcctgcctcagcctcctgagtagctgggattataggtgccccccaccacacccggctaacttttgtatttttattagagacgggatttcaccatgttagccaggctgatctcaaactcctgacctcaggtgatccacccgccttggcctcccaaagtgctgggattacaggcataagccaccacgcctggcctgtttttatcttttttgcagtcactccagagtcagtagttagcagagtaggaggaggaaatcaggtgaggcagaacttggaggggagattccaggactcttctcatctttatcccatttgtatgcagaggaacaatcctgcaccatgactcaacagccacttcgaggagtgaccagcctgcgtttcaaccaagaccaaagtgagagaggattgggcctgtacccttgtgggaggaagcgaggaaaagaggggtcagaagtgggccatgggcccccagcttcctacctgggcattctttaaggcagtctggattccttccatcccccaggctgcttttgctgcgccatggagacaggtgtgcgcatctacaacgtggagcccttgatggagaaggggcatctgggtgagctgttggcaggggaggggcaatgggcagaagagctgggctgggcattggctcccacctccactgacaccctggtccctgtccagaccacgagcaggtgggcagcatgggcttggtggagatgctgcaccgctccaaccttctggccttggtgggcggtggtagtagtcccaagttctcagagatctcaggtaagtgccctcatcctgccctttggcccagatttctcggattcctggcctcccacaggcaccccaaggtactggcagatgaagacgtcagagtacttcagagtcacacagagaggaggcctacagcttggaagtcatggatcttatagcttgagaagcttggtgcttt

SEQ ID NO: 43790 - DNA, 2300 bp, Homo sapien
cttttttttttttttttttttggagacagggtttccctctgttgcccaggctggagtgcagtggcgcgatcttggctcactgcaacctctgccttctgggttccaatgattctcctgcctcagcctcccaagtaggggacttacaggtgcccgccaccacgcccggctaattttttgtattttagtagagaggaggtttcaccgtgttacccagggtggtctcaaacccctgagctcaggcaatccacctgcctcggcctcccaaattgctgggattacaggcatgcaccaccatgcccagccctttttttttgagacgggaatttcgctcgtctcccaggctggagtgcaatggcaggatctgggcttgctgcaacctccgcctcctaggtttaagtggttctcctgcctcagcctccccagtagctaggattacaggcgcgtgtcaccacgcccggctttttttttttttttcgagacagagtctcactctattacccaggctggagtgcagtggtgcgatctctgctcactgcaacctcctcctcctggcttcaagtgattctcctgcctcagcctcccgagtagctgggactacaggcacgcaccaccatgcctggctaactttttgtatttttagtagagagggggtttcaccatgctggccaggctgatctcgaactcctgacctcatgatctgcctgcttcggcctcccaaagtgctgggattacaggcgtgagccaccgcgcccagcctatttattatttcttaatgtaaagtttaattaaaaatccttccagccgggcgcggtggctcacgcctgtaatcccaacactttggggggccgaggcaggcggatcacctgaggtcaggagttcaagaccagactgatcaacagggagaaacccggtctctactaaaaatacaaaattagctgggcgtggtggcacatgcctgtaatcccagctacttgggaggctggggaggctgaggcagaagaatcccttgaacccgggaggcggaggttgtggtgagccaagatcgcgctaattgcactccagcctgggcaaaaagagccaaactctgttaatcaaaaaaaaaaaaaaaaaaaaaattccttccagtatgcatataatttggggcctttttttaaaagctttatcataggtaggacctcttttttttttttttttaacccaaagcattcataccttttactatcaaaaagctattttgtattttgtaaaaataaaagcagaggccgggcgtggtagcttaagcctgtaatcccagcactttgggaggccgaggtgggtggataacctgaggtcaagagttcgagaccagcctgaccaacatggtgaaaccccgtctctactaaaaatacaaaaattagatgggcgtggtggcgcacgcctgcagtcccagctactccggaggctgaggcaggataaccgtttgaacccgggaggcggaggttgcagtgagccgagatcgcgccactgcactccagcctgggagacagagcgagactctgtctcagaaaacaaaactaaacaaaacacaaaagacaaaactcagagctggcggggttggggggacagggtggggagaaagaaagcgaaatctgttccttggcttctcggagccaaggaggtttctccactttcaaggtctccaggtccgcccccgcctgtaacccccagcgccgcccctctggaagcctgggaggactgtgtgttgcgaaccggtgcggctactctcggccgccgcggaggtccgcgtcttgttagcagggaaggtttactcccccattgtgggtgaccaaggggctgagggcttggccggtttcgctttgctgggggcaaggcacgctctctctccccacccttccgggttccctcagacagtctcggccttgaggaacccccttcgcctccggtcccccagccaaccttcctccgctccccgcgccctccccggagaaccccactgtcactcgcgatgctccgaagacccgggaactaggcgaggaaggcggtggccgcctttttccagctggggtgagtcatttcctgcgacaggctccctcccccggaagtagggcctgatgtaaacacccgagccgggctccaaggcccgggaggtcagaaaaccgggccgcgggcggcaccgacagctggggcccgggtcagggacacgcggaggtcaggccggtgaaggcggcaggaagctggagcacgatcccagggttggttgggtctgggggaggctggaagtctttcgagtaggggtctaa

SEQ ID NO: 43791 - DNA, 2300 bp, Homo sapien
tgagatttctctgtattttttctttaatattcagtcttcatagactgtcaaaaattgccaatgccgactatattgcaagtcttcggggcggggtattgggaagtttccaattagcaatatccacaccttggctaaacctcattggctatgatactgccactgcaaaaagcatatttcttttttttcaagaatattcttttttttttttttttttttggagacagggtttccctctgttgcccaggctggagtgcagtggcgcgatcttggctcactgcaacctctgccttctgggttccaatgattctcctgcctcagcctcccaagtaggggacttacaggtgcccgccaccacgcccggctaattttttgtattttagtagagaggaggtttcaccgtgttacccagggtggtctcaaacccctgagctcaggcaatccacctgcctcggcctcccaaattgctgggattacaggcatgcaccaccatgcccagccctttttttttgagacgggaatttcgctcgtctcccaggctggagtgcaatggcaggatctgggcttgctgcaacctccgcctcctaggtttaagtggttctcctgcctcagcctccccagtagctaggattacaggcgcgtgtcaccacgcccggctttttttttttttttcgagacagagtctcactctattacccaggctggagtgcagtggtgcgatctctgctcactgcaacctcctcctcctggcttcaagtgattctcctgcctcagcctcccgagtagctgggactacaggcacgcaccaccatgcctggctaactttttgtatttttagtagagagggggtttcaccatgctggccaggctgatctcgaactcctgacctcatgatctgcctgcttcggcctcccaaagtgctgggattacaggcgtgagccaccgcgcccagcctatttattatttcttaatgtaaagtttaattaaaaatccttccagccgggcgcggtggctcacgcctgtaatcccaacactttggggggccgaggcaggcggatcacctgaggtcaggagttcaagaccagactgatcaacagggagaaacccggtctctactaaaaatacaaaattagctgggcgtggtggcacatgcctgtaatcccagctacttgggaggctggggaggctgaggcagaagaatcccttgaacccgggaggcggaggttgtggtgagccaagatcgcgctaattgcactccagcctgggcaaaaagagccaaactctgttaatcaaaaaaaaaaaaaaaaaaaaaattccttccagtatgcatataatttggggcctttttttaaaagctttatcataggtaggacctcttttttttttttttttaacccaaagcattcataccttttactatcaaaaagctattttgtattttgtaaaaataaaagcagaggccgggcgtggtagcttaagcctgtaatcccagcactttgggaggccgaggtgggtggataacctgaggtcaagagttcgagaccagcctgaccaacatggtgaaaccccgtctctactaaaaatacaaaaattagatgggcgtggtggcgcacgcctgcagtcccagctactccggaggctgaggcaggataaccgtttgaacccgggaggcggaggttgcagtgagccgagatcgcgccactgcactccagcctgggagacagagcgagactctgtctcagaaaacaaaactaaacaaaacacaaaagacaaaactcagagctggcggggttggggggacagggtggggagaaagaaagcgaaatctgttccttggcttctcggagccaaggaggtttctccactttcaaggtctccaggtccgcccccgcctgtaacccccagcgccgcccctctggaagcctgggaggactgtgtgttgcgaaccggtgcggctactctcggccgccgcggaggtccgcgtcttgttagcagggaaggtttactcccccattgtgggtgaccaaggggctgagggcttggccggtttcgctttgctgggggcaaggcacgctctctctccccacccttccgggttccctcagacagtctcggccttgaggaacccccttcgcctccggtcccccagccaaccttcctccgctccccgcgccctccccggagaaccccactgtcactcgcgatgctccgaagacccgggaactaggcgaggaaggcggtggccgcctttttccagctggggtgagtcatttcctgcgacaggctccctcccccggaagtag

SEQ ID NO: 43792 - DNA, 2300 bp, Homo sapien
cagtataaccaaacatacaataagctatattaactcattttttggtgggggggtagagacagggtatttctttgtcacccaggctggagtataatggtgaagtcatggctcactgcagtctggacagcctgtgctcaagccatcctcccacctcagccccccaagtagcttggagtacaggtgcgccacgctacacctggctaattttttactttttgtagagatgaggtctcacaatgttgccctgctggtctcaaatttctgcgttcaggcaatcctcctgcctcagactcccaaagtgctggaattacaggcatgagccactgcacccagcctttattacctttttttttcttttttttttaagataggttctccttctgttgtccaggctggagtttagtggcacggtcttgactcactgcaacctccgcctcccaggttcaagcaattcccgcaccttagcctcccgagtagatgggatttacaggtgctcgccaccactcctggctaatttttgtatttttagtagagaccaggttttgccatgttggtcaggctggtctcaaactcctgacctcaagtgatccgcccacctcagcctcccaaagtgctgggattacaggcatgagcctccacgccctgcagtattatcttttttaaagagagagtacttgaggccaggagtttgagaccagtctgggcaatgtgagacaccgtctctacaaaaattacaaaaaattagcccagtttggtggtacacacttgtggtcccagctactcaggaggctgatgtgggaggatcacttaagccttgcaattagaggccgcagtgagccatgatcacaccacggcactccagcctgggcaacagagacctcatctcaaaaaataaataaataggccgggcacagtggctcgtgcctgtaatcccagcactttgggaggccaaggcaggtggatcacctgaggtcaggagttcaagaccggcctgaccaacatggtgaaaccccatctctactaaaaatacaaaaaataagccaggtgtggtggctaacgcctgtaatcccaactactctggaggccgagacaggagaatcgcttgaacctgggaggcagaggttgcagtgagccgagattgcgccattgtactccagcctgggcaacaggagcaaaattccatctcaaaaaaaaaaataataataataataatacaaaaattagctgggggaggccaggcgcggtggctcatgcctgtaatcccagcactttgggaggccgaggcgggcagatcacctgaggtcaggagttcaagaccatcctaaccaacattgtgaaaccccatctctactaaaaatacaaaaaatgagctgggcatggtggcacgtgcctgtagtcccagctactcgggaggctgagacaggagaatcgcttaaaaccaggaggtgaaggctacagtgagcccagatcacgccaccacactccagcctggcgacagagcgagactctgtctcaaaaaaaaaaaaaaaaacaattagctggggctagtggtgggcgcctgggcgacaaaagtgaaactccatctcaaataaataacagaaacacaccctttcttatctgttgtgcatacttaactaaaagaaacacacccaaaagtatttacaaataaagaagatgggggaggaaaagaaaatctttagcttattaataaaagaatgggtctatttgaaaagtacaaatgctaaaaaaaaaagtgcttcaatgtatatagcttgccttttaagtctgtagccatttaaattataagaatttcatcatttgctggccaggcgcagtaactcacacctgtaatcccagcacattgggagaccgaggtgggcggatcacgaggtcaagagatggagaccatcctggccaacatggtggaaccccatctcttattagccgagcatggtggtgtgcacctgtagtcccagctacttgagaggctgaggcaggagaatcgcttgaacccaggaagcggaggttgtagtgagccgatattgtgccactgcactccagcctggcgacagagcgaaactcagtctcaaaaaataaaaataaaaaatatcatcacttgccaagcctggtggctcatgcctgtaatcccagcactttgtgaggctgaggcaggaggattacttgagtccaaaagattgaagctgcagtgagctgtgattgggccactgccctctagcctgggcaacagagcaagaccctattcaacaataacaaaaaaaggaattaggtgatgggaaatg

SEQ ID NO: 43793 - DNA, 2300 bp, Homo sapien
gcctgacataaggaagtgtcatttcccaaccctcagatccagtacgcccttttagtaagaaacatttcggccgggcgcggtggctcatgcctgtaatctcagcactttgggaggccaaggtgggtggatcaactgaggtcgggagttcgagaccagcctgaccaacatggagaaaccctgtctctactaaaaatacaaaattagctgggcgtggtggcacatgcctgtaatcccagctactagggaggctgaggcaggagaatcacttgaacctgggaggcagaggttgcagtgagccaagatcgtgccattgcactccagcctgggcaacaagagcgaaactccgtctcagaaaaaaaaaaaagaaaaggcctccttttaccatcctgaaatgacattcacattcatgtacattacaagtcttgctggtgtgggacagccccccagcaccagacctctgcccattcagtgccaaagcaccctcaaggaggaattcccaaaacacaccccgagggcaggcaggaacaggacccttgtctgtctggttcagcgcggaatccccaccacctaatacaagaccctgaatgcactaagtaaataattgcagtctggataactatgctgtgatttactgccctcttcctacaaagcttccctgtcctctgttcactgcccctgcgtggggagccagagaagaaaaacgactcagggtgcacaggggccagctcccttgcacagagagttctacacagttcactgatgctgtgggcaaatggatgcttcaggggccctctgtcctgccgggggcggaatgaggacagggtgagcacagaaaggagagacatctgtagagtcagtgacgcatggtcagaacacagagtccagagtgcacagcctgaccctggccctggctctgctcagctgtgtgccttctggtaacccctacagggccttaggtctctcatccagaacgcaacgatgataatagtagttaaggttgttgtgaagacgcagtgaaattattcacgtaatcaggagaggttggcacgtgttaaaattatccattactgggtaatttggatcaacgaactatcattcctgacgcctagattccccccgtccctcaagcgcctcctcaccctcctccctcagacttccaggctccaccaccactggtggatggtcaagaacccagaacaggcgaccgacctctctttttctttcccctgctgcacagcccatctcagagctcccttctgtgaggctcagccagaggcctgcagggttgggacaggctcctggagccctccccaccaacgagaggccccggcctactcccctcacctgcacaggaaaaccctggcccagtcagggaaccagaaatctcctcccagtccttaccttgccctcaccctcagccaccaccaactacccctggacgggcgccccctacatccctgcacctcggtctgtgtgaccccaggagtgcccactccccaatgtgtgtgcccctgtgggtgtccaaagccctgtctgtgtgaccctaggggtgtccactccccagcgtgtccgaccctcggaccccagagcccgcagcccacagcctggaatggcctgccgcgcgcggggcagggacgcgcgcacgaaagcgtccacatggagccacaacactgggcaggggcagccaacccgggcacacctttttgtgtggggtaaggaaagagcccctcccccgcgcggggcccggcatgctcgtgcccatcccgtcctgttggcactcccagacccgagcggccctcggcctctctcccgcccaccgcgttgccctctcccccgaaggcttagtcttgacccaaccctcccgccgcggaacaagcaactggcttaaggccggggcgcggtgggctctgattggtcgatgacgattgacggtgatgatctgattggtcgatggttgattggcgcttctcggtagctgcccgggcgcgcctccgcccctgcgctccgggctcccattcgtcgccgctctggggcatgcgcagtgggtgccattcagtgcctgggctccgggaaagtcgtgcttttacggttccgggtactggctcccacaccactgcctcgtgtggggttgttcgcccgtgaaggggcaggacagggtgcgcgctggtggaggttagtgaggtcacacaccgggccgtggcgcctggtgcgctgggcgcttccacctcaaccttcgtagcaaacccagcggggttctgtgcctgcgcaccgtggttcctgcgttcatttactgtcccgtt

SEQ ID NO: 43794 - DNA, 2300 bp, Homo sapien
ttttgtagagtcagggtgtcactaggttgcccagggtggtctcaaagtcctgagctcaaacaatcctcctgcctaggcctcccaaagtgctgggattataggcgtgagccactaagctcggcacatgttgctatatttttaaaatatgtatttaaatgtctgtattccctactagactacaagtttcttttttttctttttcttttctttttcttttttttttttttgagacagagtctcgctctgttgcccaggctggagtgcagtggggcaatcttggctcactgcaacttccacctactaggttcaagcgattctcctgcctccacctcccgagtagctgggattacaagcatgtgccaccacacccggctaatttttgtatttttagtggagattgggttttgccatgttggccaggctggtctcaaactcttgacctcaggtggtccgcccgcctaggtctcccaaagtgctgggattacaggcatgagccactgtgcccagcctattttattgatatttgaatctagtgccttgttgagtattaaaatctgacatcagtaggcactattctttttctttttttttttttttttttgtttttcttttgtttttgagactgagtgtcactctatagcccaggccggagtgttgagatctcggctcactgtaacctccgcctcccgggttcaagcgattctcctgcctcaacctcccgagtagctgggattacaggcatgcgccaccacaccccgctaatttttgtattttcagtagagacggggtttcaccatgttggccaggctggtctcgaactactggcctcaagtgatccgcccgcctcggcctcctaaagtgctgggattacgggtatgagcctggccaataggcactatttctttctttctttcttttttcttttttaagacggagtctcgctctgtcgcccaggctggagtgcagtggcaggatctcggctcactgcaaactctgtctcccggattcaagcaatcctcctgtctcagcctcccaagtagctggggatacaggcgccaccaccacgcccggctaatttttgtatttttagtagagacagggtttcaccatatgagtcaggctggtctcaaagtcctgacctcaggtgatccaccagcctcggcctcccaaaatgctgggattacaggcatgagccaccacgcccctctaatttttgtattttcagtagagacggggttttttatgtctattatttattttatgtctattatttattattgtacacaactgacgctccatcccccccacccccgacctttttcttttttagagatggggtctcgctctgtcacccaggctggaatgcagtggtgcgataagagctaagtgcagcctcgaattcccaggcctcaggccatcctcctgcctcagcctgcggagtaaatggaactacaggtgcgcgccaccacacccagctgattatttctaaatgatttacttcatcaacacttcccacataagtagggcacacattaggcgctccataaatacttgtcaaacgcctacacgaaggaagattaatgtctggcaagaatgaatccaccttccaccatgcctaccccgctaaaaactacatttccagccaggcgtggtggctcacacctgtaatcccagcactgtgggaggccgaggcaggagaatcacgaggtcaggaaatcgagaccatcctggctaacacggtgaaaccccgtctctactaaaaatacaaaaattagccaggcgtggtggcgcatgcctttagtctcagctactcgggaggctgaggcaggagaatcgcttgaacctgggaggcggaggttgcagtgagccgagatcacgccactgcactccagcctgtgaaacagagcgagactccatcttaaaaaacaaaacaaaacaaacaaaaaaaaaactacatttccctgggcgcttggcgcgacgcgctcccaccacgtttgaaagagcgacaattacttcccacggccccttaccgccccctcccgccggtgccacagtggttgatgggaaggtagtttttacgcactttggccggcccctagcgatctgaacccaaactaaatttcccagcaagcagcgcgccggcctgggaaaaggagcaagatggctgactccaaagagggtgttttgccgctgacggctgcttccactgccccaatttcattcggcttcactcgcacgtccgcacggaggcggctggccgactcgggagacggcgcggggccatctccggaggagaagga

SEQ ID NO: 43795 - DNA, 2300 bp, Homo sapien
aattgggttgtattcacaaatggatgaggctaagaggggcattgatttgaatccacagtggggcagggctaagtgagggtttgctcccccatagtgtcattgtaatcaatattaaagataagcaccaacactgctaccaaatagcttggcttggcacaacaccagcaatttggaagctttgttccgaactctcttgacagtcttaccatgcatatctcatcacccccacttcccagagaggtacattgaggtgtcaggcaatgcagtggctggagttcctccctcatgtctgcatcctctctacacccctaaccctgccagcagcctcagtgacacatacactactctctggccctggaatttcggccctgctggtgtcagctctctcagtgaacacctatcctgggcccctgcccctgtaatttcagccctgctggtgtcagctgtctcagtgaacacctatccagcatcctgggcccccgcccctgtaattcacgtcccctgaggatgtccttggaccccttcattcgttcatgattccccaagcctgaatacctcccagcctggaagcagtttcccatccagttggcaagctccctgatcgatgttagtagattctacctggtgcttggatgcctcccctcactgtccatctgtcctcggcccttggacaatgccccagtctgcaagaccctcccatgcatggagctacagagcctcaagctctccttcacagtgtgtaagcacctcactctcacatccacaggttcttaaaacctggagccccagattggaagctgccctctccagattcaggtgtggaagtctcaacaagaattgggaggagcagtgaaggaggtccagggtgtccccccttagacaaggtcaggtcagaggtgaaagaggcaggggactgcaggtggaatgaaagcaggaaccgttcagaccctttcacctatgaggatactgggtctctgaaaggtgaacggagaggcttgcacaaccagccagaatggacattaggacacagtgtgtccacagccatagtgaaatagtcactaaccaagtgagtcttgtaggtaagctgcctgaaactggtgttgttggcttgctgcagggacctaggcaggtccctgagcctctcagaccctgagtttcttatttggcaaagtagtggtgaaaggccctctctcactgcaatcccattcctccttccactacagtcacactgtgtccgaatgctccctgcttggggcttatgtccccagacactccccttttcaaacatagaagaggcctcattcctccactgacatcagctagtgtcccatccaactccaatgcattcattcacagcctcctcaattttgggtcccatctctcatccactctccaagggacctgccctctgcaatttttttttcttttcttttctttttctttttctttttttttttttttcttgagagggagtcttgctctgtcacccaagttggagtgcagtggaacgatctcagctcgctgcaacctccgcctcccaggttcaagcgattctcttgcctcagccccccgagtagctaagattacagatgcccactaccacacctggctaatttttataatcttagtagaaatggagttttgccatgttggccaggctggtctcaaactcctggcctcaagtgatccacctgccttggccttccaaagtgttgggattacaggcatgagccaccgcgcccagcccaccctctccaatttttgagttccgcaacctcataatgcccagagcaccaaaccattctttggctccaaaagctccaacggtactcagtcccaccacacatttccagtttcccaatagggacagtgggagataaactttccctgcaaatatactgagtgcctacttgtgcaaagctctggtggagattgcagagtttcctagtaaactcgggctccagttctgcgtccctgcttttagttgtcagaggtcagacagtaccctaatttctctgggcttcgactgccccttcctatgctggaatagcaacatcccagagtggaaaaaggagccagcccagcgtcctcagctaacggaggcctccttgctggccgccagataggccaccccgcagatacaggaaccaggcacgggcccgccaccctgtttccagggtctgagcgggtcaccaggtgagcacgccccagagctcaaaactcgtcgctggctgccctgcgtccacccggccgactactggccatggagccgcgcacagggggcgccgcgaaccctaagg

SEQ ID NO: 43796 - DNA, 2300 bp, Homo sapien
gaaaggccctctctcactgcaatcccattcctccttccactacagtcacactgtgtccgaatgctccctgcttggggcttatgtccccagacactccccttttcaaacatagaagaggcctcattcctccactgacatcagctagtgtcccatccaactccaatgcattcattcacagcctcctcaattttgggtcccatctctcatccactctccaagggacctgccctctgcaatttttttttcttttcttttctttttctttttctttttttttttttttcttgagagggagtcttgctctgtcacccaagttggagtgcagtggaacgatctcagctcgctgcaacctccgcctcccaggttcaagcgattctcttgcctcagccccccgagtagctaagattacagatgcccactaccacacctggctaatttttataatcttagtagaaatggagttttgccatgttggccaggctggtctcaaactcctggcctcaagtgatccacctgccttggccttccaaagtgttgggattacaggcatgagccaccgcgcccagcccaccctctccaatttttgagttccgcaacctcataatgcccagagcaccaaaccattctttggctccaaaagctccaacggtactcagtcccaccacacatttccagtttcccaatagggacagtgggagataaactttccctgcaaatatactgagtgcctacttgtgcaaagctctggtggagattgcagagtttcctagtaaactcgggctccagttctgcgtccctgcttttagttgtcagaggtcagacagtaccctaatttctctgggcttcgactgccccttcctatgctggaatagcaacatcccagagtggaaaaaggagccagcccagcgtcctcagctaacggaggcctccttgctggccgccagataggccaccccgcagatacaggaaccaggcacgggcccgccaccctgtttccagggtctgagcgggtcaccaggtgagcacgccccagagctcaaaactcgtcgctggctgccctgcgtccacccggccgactactggccatggagccgcgcacagggggcgccgcgaaccctaaggggagcagaggaagtacagggattggggatgttggggaaggacagagcgagtcgccgccacccccgtcccgcctgtctgctccacaccttttccttctgacaggtggtaaacagagcggctctggcgcccaagtgaaggtggcagggggcaggggcccagcgatggaggctgggctggaggtcccctacccacacccacacacgagggaaagggccgcgcaccagagcaggggaggggctctcaggagtctccagggagacgtgcagatgtgcggggaggggtctgcccgtggtcactggggacacctgggcactcagggtcttagtgaactggggggaggggagctgggggcccctggggacctgtggagggggactctggaggtatgtgggccatggggggaacgggccctctgagggaattcatgggggtagcagcggttgcctaggatacttagacggggaattgggggttccggggctacggcgtcaggccgtgttctcccaggatatctggggaaatggggtcccctgagatatcgcgggcgaagagttgggcatccagggtgattagggggcagtcgaggacctcacggggtgttcggaggtgtctaggactattgcagtcaaacagcgatctccagggacaccgtgggagcaagcgggggtgcaccggctacccgcgacggtcggggatcgcgtgaggggagggacagcagtgacctccgaaactatcgagggagtggccaggggtcgccgggtatcctgaggggcatttctaggtcttcgagcgtccggaagcataggggttggccgaggccgagggtcggcgttgacctgtcccctcttgcgcgcaggccgcggcccctcaccgctcgcgggccctagcgcccggcagctcctggcgcggttggacgcgcgccccctggcggcgcgagctgcggtcgacgtggcagcgctggtacgcagggcgggcgccacattgcgcctgcgccggaaggagggtgagtgactggcgcagggcctccgctgggggagggttcggagaggagttgggttcagtgggacaggcctggggggtcagcagctactgccctgtcttgggtggggccaaggggcgcgacttggggcggggatcggagggtgcttcgagtgggaggagccttggggttattctag

SEQ ID NO: 43797 - DNA, 2300 bp, Homo sapien
acataacgagaccttgtctctactaaaaaataaataaatacaaacaaagtgtctacaaatgtcacccagccttgcaccccaggagccatccattcatcttgccaatcccccagaaataaactttcctattcctcatgtacgattgtgccgactggcccctctcttcagaaccaggaaactgaggcccaacatttagggccaggacttccttgggattgcagaacacagaatcagaccttgggctctctgggctctaacactactacaaaatatgtttttttaaaatagagacaagctctcactacgttgcccaggctggtctcgaactcttgagctgaagtgattctcctacctcggcctcccaaagtgctaggattacaggcatgagccactgctcctggccttgggctctaacacttgaaacaatgcttgccctatttctgagcaactcaatgctcaccaacccctattctcacacagcctttacactggcagggtcttattctcatcactgctcagaggtttattccactgtccacaatccattatccaaaaacaaaaagctctggaaactgatggttttcccacaagataggcactatttggttacaaaacctgacctgatctaacgaggaacaattttctttcttcctttctttttgtttttccttttttggagacagggtcttgctctgttgcccaggcaggagtgcagtggtctgatcatggttcactgcagccttgaactcccaggctcaagcaatcctcccacctcagcctcccgagtagttgggattacaggcacgtgccaccatgcctgggctaatttttttcttttttcttttttttttttttttttgagacggagtcttgctctgtcgcccaggctggagtgcagtggcgcaatcttggctcactacaacctccacctcccaggttcaagcgattctcctgcctcagcctcctgactagctgggattataggcgagcgccaccacacccggttcattttttgtgtatttttagtagagacggggtttcaccatgttggacaggctggtctcgaactcctgacctcgtgatctgcccacctcggcctcccaaactgctgggattataggcttgagccaccgcgtccggccgcctgggctaatttttaaaattatttgtagagatgaggtctcactgtgttgccgaggttgatctccaactcttgggctcaagcgatcctcccacctgaggctcccagagtgttgggattactggcatgagccactgcgcccagccgaggaacacttttcaatccttacccagttattgtgaacgttcataccttttcttgaagaaataccgtttttgttgttgttgttgtttttgagacgtagtttcgctcttgttgcccagactggagtgcaatggcatgatcttggctcaccgcaacctctgcctcccgggttcaagcgattctcctgcctcagccttccgagtagctgggattacaggcatgcgtcaccgtgcccagctaatttttgtatttttagtagagacggtgtttctccatgttggtcaggctggtctcgaactcccgacctcaggtgatccacccgcctcggcctcccagtgttgggattacaggcgtgagccaccgcgcctggcccttttttttttttgtaacgcggcagctccaaaccccgctgagagtatatgcatgggaaaactttctgaaatcaaaaatattccgaattctggcaacatactgggccccaagtctttcggatttaactctgcctcggccgttttattcagttaaggaaactgagtcactccatcccaaagccagattcccgcggttctaagctgaagctgtctcgggtgcatttgcattccaaaaaggcgaagggtcccgctattactgctcctggtacctggagctgccaagcacccctgcgatggggcgccccgggggctgtgcgccaggctgggagtatccttggggggcggggcgagggggcttccggggcggcagcacctggcccggctccggccccgcccgcgtcagctctgcgcggtgattcactccctccttcgccccggggcccccttcccggccagacggcgggcaagacagctgggtgtacagcgtcctcgaaaccacgagcaagtgagcagatcctccgaggcaccagggactccagcccatgccatggcggattctgagcgcctctcggctcctggctgctgggccgcctgcaccaacttctcgcgcactcgaaagggaatcctcctgtttgctgagattg

SEQ ID NO: 43798 - DNA, 2300 bp, Homo sapien
gggattcaggaatgggccaagccagggttccagacagggtggggcttagaatggggcttccatggtggtttcagaaagggcagcccctccccatggtgcagtgaagaaaatgttttacaatggctgggtttgggcagtggagaggggacttggataggagcttccagatgggttttgttaggggtgggggagaatggctctggctacgacttgggacggaagtggcctgagaagagtcgagtgatatggcttgtagggtgaggcgtgggatccagagagaagcaccccaccacacacacccttccccactcccgtgatgaaacagctaggttaataggaggacagaaccaacgggtctgtgggactggcccacccctcttcccccttcccctgcgccctccctccctccacacctccacccgtcctggggtggttggaggcctggtctggagcccctatcctgcaccctctgctatgtctgtgatgtcagtagtgcctgtgatcgtgtgttgccattttgtctggctgtggcccctccttctcccctccagacccctaccctttcccaaacccttcggtattgttcaaagaacccccctccccaaggaagaacaaatatgattctcctctcccaaataaactccttaaccacctagtctacccggctctgatttctcagtgtgtctttttcgggcgccggggaggaggttggccgggggagaaaggagggagaggtggtgagaacaagctccacccggacccaccgaccgcagttcagcttgctgcaccatttcaggccccttcaaaagtgttaggcagagcagcatcctctgggaagcctctcctgccaatcactctgtcactctctgagtagccctgctcaccctcccactactggccaccaaatgcccggtctttctaggagttggttctaattctggtcccttagccaagcctcttccgagcccctgtggaaccctctcctcaaatccccaaggggtccgaataggaggaaacctcacattgcctgaccccatccctaatcttcagaccctactgtctctcctttccctgcctccgcccaggctggagaaatgggagacaggttaggcaaggaggggaggtggggcgccggggtgactccttagttcattagttattctcttttacctctccactccacgggaagtgacagggacatgtgtaatggggggcggggagaggtccccggggcccgcgatgaagggcctggccgctgcagtctccgtgcatagagacccgggccgagttctgactgaggccatgggaccccctccccccagcccggaggcacagccaagcctgagagcgtgaaggagaggctccccgccctggaactgagctggggaaggggataactggagagagaaaaatgtgggtgggggagggaaggctttaagatctacttctcaagacttggggtggggggacggggctggacagctaggcttataaggatgaggggagagaggggacgagggctttggaacctggcctcgctgagaggggaatgagaagggaggagtgcgtataagatctagctctctggtggctagggccaggttcccaggttcccagcgagcaccagctggggctgcgggtgaggttggggcccattgttgcagcattcatcggggagaccctcggaacctcaccagtggggaggagccaagaggtgtctttaacccctctcccaaataagcatccgaaataaatcgacacaaaacgtcaacacaagcaccctagcgcgccacccctctcagtccagttggccacctctgagtctccccatcctccactacagaaccttcaagccccaggtcccgtgagaggccacgtggcacgccgggattctgggggtcgtgccttgtgacgccccgcaccggcccggagcgggagggcagaggcctttcccgcggggcactccgggctacgtgcagttcacctctaggcagggggcgccctggcagcggagagaccacatgcccgggggcgggccctgcggggcgcgctcctcccacgagggtgtcaggtttacggaaccgagttcccaggccggacgcgcggtggcctgacggtcgcaaggattacattcgcctgacccggcccggcttgaccctgcccgggcgcgccatgttcgcgcgtgggtcccggaggcgccgctccgggcgtgcggtgagcgggagtcagggcagcggtgggggtcgggggtaaactgaggcccaggcaagggggcaatggataggcatagcgaataggtg

SEQ ID NO: 43799 - DNA, 2300 bp, Homo sapien
ctgataagttagcacagtggctaagagtaacaggtgctggagccagacttcctgggttcatatcctggttctaccaatttaccagctgtgtgaacttaggaaaattcctctccgcctcttagtttattcagctgtaaaacaaagatagttgtcgtacctgtcacatagggttacagtaagaatttaagtgagtaatacaggcaaagttctctaaagagtacttgacagaaaacagccacaatttaaatgttagctattctctgtctgatataacccttctcttctctttgtacacaattaccacacagtttgacatcttgcattttttacttaactaaatatcttggcaatcattccatagttccatgttattataatgacagcggcatagtatcagagtttatttaaacaggctaccaacaatgagcactttgggagtgtccattctttatcctattataaacagccctggcctggcccagtggctcacacctgtaatcccagcactttgggaggccgaggcaggcagatcacatgaggtcaggagttcatgaccaccctagccaatatggcgaaaccccatctctactaaaactacaaaaaaaaaaaaaaaaattagatgggcgtggtggtgaatgcctgtaatctcagctactcagggagggtgaggcagggagaattgcttgaacccgggaggcggaggttgcagtaagcggagatcatgccactgcactccagcctgggcaacagagtgagactccgtctcaaaaaaaaataaaaaataaacagcccagtcatgtattatcttatacatatatcttttagcacatgtatgagtctatctgtaagatgaattcctagaagtatgaaggtgaaccaaacagtaaatgaatttgttattttttttttttagattttgcccgattgccttctacacgttataccaatgaaacttccacaggcgatttatgagaacgcttgtttctggccaacctaccaatacggaacgttatcaaactttttgatactcaccaccctgaaagatgaaaaacagtatctcagtatttttgtttgcttgtttgtttttgagatggagtctcgctctgttgcccaggctggagtgcagtggtgcaatctcgcctcagtgcaacctccgcctcctgggttcaagcaattctcctgcctcagcctcccaagtggctgggattacaggcgcctgccaccacagccagctaatttttgtatttttaatagagatggggtttcactatgttggccaggctagtctcaaactcctgacttcaagtgatccactgtccacttcggcctcccaaagtgctgggattacaggcatgagccactgcgcctggccgaagttgagcatcttaagccccaactgtattttggattttgcatcatagccatcactgttgaccttgatgggcctagttttagtcgcaggaaggagggttattccaattaagagagagctaaggaataaataggtaaagtggtagagttcgagtaggcattaatttgacaaagaggaagaaagaaataagggagatggctagatgggggcaggagtttcagggtgtgcttaaaatgcagactatgaaaaaggaacctggaaggccttgaaccgtgtttaaactgcagggactctgggcactgccagctagtagctggctgaccttgtgagagtcacttaagctctctggggaattattttcctcgtctgtaaaaacggcctaatagtccctacaacgtaggacttctgtaagcattaaatgagtgaacatgtttaacaaactcagaaaagagcctggcaaagttgtcacactgtaggaccgagcagggaggtctcctctccccggccctcgacttgtgttttcccaacgcatattcccgcacgctctcacggctccagcctccgggccggaatggctgccggtgagactgtggtacaacccgctgtgcgcaggcgcgtggcgggcaaggagggggcgcgaggggcggggctgcagccgcctgggctgttccaacgagcgcgcgccgcccccgccgcgccccgcgccgcccttgctagccgagcctcccgccccctgcattgctgatgctgctgctggcggacatggacgtggtgaatcaggtacgcgctccagcaccgtggacagagcccgccgccgcccggctgcctaggccgggtcgctcaggccagccgactctgggaggtggtggccagggtctggcagcggagacccggtccccggcgctggggatgggggtctgcggcaggt

SEQ ID NO: 43800 - DNA, 2300 bp, Homo sapien
atgtgaggcctggggtgagtgtgcacggaggttgagcttgcaatagctgctgggaactgtagttcttccacctgcagtccagtgggctcttccaagggaaaaaggaacaacccgtgtggtggggagtggaggggccggacagaaaggggcttcctgactcattcgtttaaggcggcattcatcttctaggctataaaagtgtacacattaagggcagaattttaacacaaagcgactacttccctgtgtcttagtctcctcatctgtaaaatgggactattgacagtacctgctttttaggattaaaacagaattaatttatataaagcacgttgtactatgtgcctgacacataagataagaaagcactatgtaagttatagttactagtgtccatgcattcaataaatgctttaatatgatacacatttgtacactccaaagaataattacacagcaaatatctatgtaaccggctgggtgcagtggctcacgcctgtaatcccagcactttgggaggccgagtcgggtggatcacctgaggtcaggagttcgagaccagcctggccaacatggtgaaaccccctctctactaaaatgagaaaaattagccaggcatggtggcacatgcctgtagtcccagctactcgggaggcttaggcaggagaatcacttgaactggggaagcgaaggtggcagtgagctgagattgcgccattacactccagcctgggcaacagagcgagactccgtctctaaataaataaataaagcaaaagaaatctatgtaaccatttcttgaacagccgacgcgcacctgcaatcccagcagttttggaggccaaggcgggaggatcgcttgaggtcaggagtttgagaccggcatgggcaatacagcaatacaccatctcttaaaaaaaaaaaaaaaaattgacacttgtccaagcagacgtccccagcagagccagccagcatgaccgagcgccgcgtccccttctcgctcctgcgggaccccagctgggaccccttccgcgactggtacccgcacagtcgcctctttgaccaggccttcgggctggtcgcagtggttgggcaccagctgctggccccgctacgtgcgtcccctgcccccgccgcggtcgagagccccgcggtggccgcgcccgcctacagctacgcgctcagccggcagctcagcggcggggtctcggagaatcggcccacagcggaccgctggcgcgtatccctggacatcaactacttcgcctccgacgagctgacggtcaagaccaaggatggcatggtggagatcaccagcaagcacgaggagcggcaggacgagcatggctacatctcccgatgcttcacccggaaatacacgctgccccccggtgtggaccccaccaaggtctcctcctccctgtcccctgagggcacactgaccgtggaggcccccatgcccaagctagccacgcagtccaacgagatcaccttggagtcacgggcccagcttgggggcctaggagctgcgaaatccgaccagtctgcagccaagtaaaagccttagcccggatgcccccggccgccgccactagccgtgcccccgcacccacctgtgtgttcttttgataggtttatcttctgttgttctcaaataaagttcgaagcaacccaaaatttaaaaaaaaaatagttgggcatggtagtgcacacctgcagtcccagctacagaggctgaggtcagaggatcacttgagcacaggaattcaacgctactgtgagctatgatcacgccactgcactccagcctgggtgacagagcaagaccctgtctctaaaaataataataattgataatatttgatcttttttccatagagatattgcacatatattaggtttttcctatatacttcgaattccatatactactggaaaatgacatcgtttttcttattttagtttgactgtttgctgcaggtatatatttggtaaatatttcatctgttgccaggctctggcccacaaacgtcccatttgcacccccaccgccaccctcccatacaacactgttattgccccgccctgcggccttaatccctccaaagctgggggaagagaggggggttgtgtgcagatggcccttcaatctcgaaagaaagatgtcggaatctgaaggcgggaaaggtgagagaatccttccatccctgcagacccttggagcaaggtagagcccctctgacccacccattgcccacccagaccccacccccagagagcctctaggggacaagaaccac

SEQ ID NO: 43801 - DNA, 2300 bp, Homo sapien
gggattaaggccgcagggcggggcaataacagtgttgtatgggagggtggcggtgggggtgcaaatgggacgtttgtgggccagagcctggcaacagatgaaatatttaccaaatatatacctgcagcaaacagtcaaactaaaataagaaaaacgatgtcattttccagtagtatatggaattcgaagtatataggaaaaacctaatatatgtgcaatatctctatggaaaaaagatcaaatattatcaattattattatttttagagacagggtcttgctctgtcacccaggctggagtgcagtggcgtgatcatagctcacagtagcgttgaattcctgtgctcaagtgatcctctgacctcagcctctgtagctgggactgcaggtgtgcactaccatgcccaactattttttttttaaattttgggttgcttcgaactttatttgagaacaacagaagataaacctatcaaaagaacacacaggtgggtgcgggggcacggctagtggcggcggccgggggcatccgggctaaggcttttacttggctgcagactggtcggatttcgcagctcctaggcccccaagctgggcccgtgactccaaggtgatctcgttggactgcgtggctagcttgggcatgggggcctccacggtcagtgtgccctcaggggacagggaggaggagaccttggtggggtccacaccggggggcagcgtgtatttccgggtgaagcatcgggagatgtagccatgctcgtcctgccgctcctcgtgcttgctggtgatctccaccatgccatccttggtcttgaccgtcagctcgtcggaggcgaagtagttgatgtccagggatacgcgccagcggtccgctgtgggccgattctccgagaccccgccgctgagctgccggctgagcgcgtagctgtaggcgggcgcggccaccgcggggctctcgaccgcggcgggggcaggggacgcacgtagcggggccagcagctggtgcccaaccactgcgaccagcccgaaggcctggtcaaagaggcgactgtgcgggtaccagtcgcggaaggggtcccagctggggtcccgcaggagcgagaaggggacgcggcgctcggtcatgctggctggctctgctggggacgtctgcttggacaagtgtcaatttttttttttttttttaagagatggtgtattgctgtattgcccatgccggtctcaaactcctgacctcaagcgatcctcccgccttggcctccaaaactgctgggattgcaggtgcgcgtcggctgttcaagaaatggttacatagatttcttttgctttatttatttatttagagacggagtctcgctctgttgcccaggctggagtgtaatggcgcaatctcagctcactgccaccttcgcttccccagttcaagtgattctcctgcctaagcctcccgagtagctgggactacaggcatgtgccaccatgcctggctaatttttctcattttagtagagagggggtttcaccatgttggccaggctggtctcgaactcctgacctcaggtgatccacccgactcggcctcccaaagtgctgggattacaggcgtgagccactgcacccagccggttacatagatatttgctgtgtaattattctttggagtgtacaaatgtgtatcatattaaagcatttattgaatgcatggacactagtaactataacttacatagtgctttcttatcttatgtgtcaggcacatagtacaacgtgctttatataaattaattctgttttaatcctaaaaagcaggtactgtcaatagtcccattttacagatgaggagactaagacacagggaagtagtcgctttgtgttaaaattctgcccttaatgtgtacacttttatagcctagaagatgaatgccgccttaaacgaatgagtcaggaagcccctttctgtccggcccctccactccccaccacacgggttgttcctttttcccttggaagagcccactggactgcaggtggaagaactacagttcccagcagctattgcaagctcaacctccgtgcacactcaccccaggcctcacatccggcatgcgccgtgctcgctcacagaactacactttccaactctccccacacgacccgtgacactctgtggaccgcgagcacggagcagggtttctacagctgctccccactttctcggacccggtcctggacccagcccccgactccgacacggctccaccatggaggaggcggaccgaatcctcatccattcgctg

SEQ ID NO: 43802 - DNA, 2300 bp, Homo sapien
gttattaactatgggaacatcagtgcaagggatcattaaccttaggaccatcactgcaaggggtcattaaccttggggccatcactagaatcagctccccaggactccttcctgacatgcatgctcctcaccccctcccttgctccctcccacatgccgtgacatctgttaaacacctgctgttcacagggtccctgcaggcctccaagcaggggacctcatcccaccttggtgcctcccctggctgtccaacacacccaagccatttttgggtctcagatgtgtcccaccaactcagaagcctcaaccagcgaaagttttgttttgaactaatggtggggagggttgggtgttttttttttttttttaattgttgttggctgatttttttaaggtctttttttttctattctttttttttttttttcttgtcttcacaaagccaggccatcaggcccattctgggcttttccagaagggtgagtctgagttgaggaaagaggccctcctttttacgagggcttagaaggttgggggaggaaagggggcaaaggggtgaaggggtggatcttggccaccagatttgtaccatgtaaataaaaagccctttccaatttctcttccccaggtctgaagccagtcttgtagagggctggagtggttgttggacgactagaaccctgggctttgcagggtgctgggagctggaagtcttcaccatggcctgtcaggagaagcccctgggggctggtctaccatgctgaccagtggttgaatagagtgcctgctgaggtcaagagatgcagccgccaattcctggacaacctaaaagcctcacaagcttcaagtctccaaggactctccaaatcccaggatctccctgccatcacatcctagaatttaaaacctgagaacatcaagttcaggaaagcttggggatttcaaagcccagcaccaaagaaagcgggacccacactcgccagctctgtgatcttgggcaagttgcttgactacttatacctccgtttccctcatctgtataacaggaatacaataatgatgagatggagctcaaggggccatggtgaggattgaacatgatcacttgtgagacatgttcagcactgtatctgacccatggaaaattcaagataaacatcagctactgagatgatggcggatatttggaatcctaaatccttggaaactggggctttttgaagtaaaagaccccaaaggctgagggcctcagaagcatcaggccatgatgttcctgaaacaagagggtcagggtcccaatgggcctctggggttcatcgtgaggatggatgcattaatattggggacctgctagggaccttcccagtgggacagtggctgggtcagggcactcaagccctaaaacgtgatgaggcgagacttttctctctttcctcattcagtaactgtcagtagattctgggagccagggattctccgactcttcaagtccatgaattttaggggatgacagtgggctctccgctttctcctccatgaagtaacttacatgcccctcaccctctgtgggaggggtgttgcagggggtgcagaactcccctcgccgggtagttcaagcaatggggaccatatcaattccatctatagggaaactgaggcctggagtagggcgaggcctctgggaacccagccctattctgtctctttccctggcatttcccatccacacatagagcttcagattctctttctttccccagagaccctcaaatatcctctcactcacagaatggtgtctctgcctgcctcgggttggccctgtgatttattttagttcttttcccttgttttttttttttcaaactctatacacttttgttttaaaaactgtggtttctcatgagccctattatctcattgatacctctcacctctgtggtgaggggaagaaatcatattttcagatgactcgtaaagggcaaagaaaaaaacccaaaatttcaaaatttccgtttaagtctcataatcaagaaaaggagaaacacagagagagagaaaaaaaaaactatgagaacccccccccaccccgtgattatcagcgcacacactcatcgaaaaaaatttggattattagaagagagaggtctgcggcttccacaccgtacagcgtggtttttcttctcggtataaaagcaaagttgtttttgatacgtgacagtttcccacaagccaggctgatccttttctgtcagtccacttcaccaaggtgagtgtccctgctctcccctaccagatgtggg

SEQ ID NO: 43803 - DNA, 2300 bp, Homo sapien
gatttaacaggaagcccctgaatgctgagtgtacaatggggtctagggcctgaatgtggaagcaggggaccagcaaggagctggctactgcagtagtctaggtgactggtgatagtgctggcagtggaggtggtgagaagaggatggatttggtaaatatttttaatagacagccaaaaggatttgttgaagactgagagtcttggagccagatcgggacagacaatgcccaaaccaggtgggcaggaaggagtccctggactatttgccagcttgaacttttaggtgagaaaaaaataaagttctgtcttgcttaagcccccattattttatgatttttctgttacttgcagctgaacatattcatttctaactcatggacatcctgaacatggagacctggggagaggggctgctggaaggatcacctccctcctaggatgctgtgaggttctaatgagataacagcatgctcagaacctggcactcagtaggtgttcagtaaatcttcccaggatggagaaggaatgtatgaatggatgtgttcagcggacaaaagctgcagttgagttcccacagaaggtgagaccccaaagggagagcgaaaggagtttactagatggaagcagcagaaggaacagcactcttgggagagggaacagtagaagcagagatggggggacagaaagaagggaggtgaggcccctgtggggtgtggagtgtcaggttgggcaagaaggacagggctttgattgtgattccattagtcagaagctacccatatgcccaatcaacttctggtagcacacagtcaggtcagtgtttgctgagctgaaatttaaaaaagtgaatccttcagaaagttaaatttcctattcggccattcattcaacaatagtatcaagtcctggagagtgcttgcggctaacaatcaggggcattcttggcttgtggcactgctcaagaaaaggttgtagttgggcagggaggacccagtaagtaactaactgcaacaggacagtcattttcactttcctagttcacacaccaaggtgtggtctaggccttcaggggctctgggtattcctggggcaatggggagtcacggagggttagggagagggtaaccccatccctgagaagcacatttttcctaatggctgcctgcgttctatggttctgctgtccggccacccaatacctcagactctgtctacacagcgtcctcctctccagcctccttattggctactcatgcctcccttcacaccacctacactgcccccgtcggctctgcttttttccccatcttgcctccaagtcctccctccgtcccgctgcactatctagcctcggcattggctcatcccatactagtactgtcctttgaggtctctacgccttcaccctggctccctcattggctatccgccagctctcgtcctcgctcccgccttcagcctccacctccattggctcggctccctacacacccgcctcttggtctccttttagccttcgtattggctagctccaccttggcaccaccccttcgaagccgcagtgcacgctcacaagcctccccattggctcgctgcagccattgtcgtcatcccacgcgtggctctccattggctgttctctctctctagctaccgttccaccgcctacgcaacccgcgggatctcccactttttgggcctctgcgttcgttcccggctgccctcatcgcctgtagccattccacttttcccaccgcccacatgcctctctcgctcagacttccgcattagctgtctgcttctgttttcttcatcatggatttcgcaccacccccattccggcctctccattgattcctcgatcatcccgccccctacaccgcccactcccgggcatccccattggctgcgtgcttctccggctctcaattcgctgtacgtcatccgtgcatggctgcccattggccctctgcaatacttgtcttcatctcaccgcctatgcccccgtgagccgtacccctccgcgctggccttcccattggctgcccgccccttcaggccctgcccccgccggtcccgccgccggtgccgtcggtgccgccgccgccgccgatatggcgcgtacggcccctgtggagcccccgctgcggcattccgcgcccccctcgccggccgcgggtgagccccgcacctcggtcgaggcggcggtggccccgcggagggtgctgttcgccgacgaggccttggggctgccgctggcgcagttgcgccgctaccggccgtggggcgggcccgggg

SEQ ID NO: 43804 - DNA, 2300 bp, Homo sapien
tgcctccctctatctacttctagaaaggatggagatgggttgggtaagaccccagtctccctcatccaagaagcagcagctgactgggtaagagccaaaaggcctgggttgtgatgtgaagtgtatgaccttgagccatttactcagcctctgttttatcctctgtaaaatggagacaatagtactgcctgcttcagaggattacaagtacctgtctcatagggtgattgtgaggattgaattaacacatgttgcccaggcaccgtggctcatgcctgtagtactaggacttcgggaggctgagatgggaggatcgcttgagtccaggagttcacgaccagcctggtcaacgtaggaagaccccatctctaaaaacaaaatacaaaaaaacaaaaacaaaaaccaaaaaaccccaaaaacttctttaaaaaaatgtgaagcacttagaacagtgtgtaatgccatagtaggtactatgtatgggtcagatggtgatactcgtttctgtgaaggtaattggttatgggttttcaaaaagtttcaaccaggccgggcacggtggctcatgcctgtaaccccagcacattgggaggccgaggagggtggatcacctgaggtcaggagtttgagaccagcctggccaacatggcgaaaccccgtctctattaaaaatacaaaaattagctggctgtgatggtgggtacctgtaatccctgatacttgagaggctgaggcaggagaatcacttgaacctgggaggcagaggttgcagtgagccgagatcatgctattgcactccagcctggcgacagaacgagactccatctcaaaaaaaaaaatttttcaaccattgtcagaagtatcaagaatgtcacattgcctcttaggaagaaaaaggtgtgggcattcgccccagctcctctcaggttttagtcaatgcttccctcatttaccttaatctgtagacacttgatactcattttcagaataagaacagtgacttctccatgatgagatgccacccctgggaggacccacctgaaatgcactcggcttatgccactcagggatctgactggcctggtgaaggaggagcaagacccataaatatctacagttgattcaatcccagctgtgtgtcaggccctgatttctggctgtccatcctcattcctcttgactgccctgtgcttagtgcacatcctgactccccggggctctgttttatgagtgaggaggtgaagcgacctgccaggctgatacggggacgagagggttagcatagggacccaggcctctgtgacctccctcccagtctccatttgcattccttcctctgcctcacagtcttgtctacctgccatttcttagaaaaggtgtttttgttttgttttgttttgttttgtttttgtgagataatctctcactctgtcgcccaggctggagtgcagtggtgtgatttcggctcactgcaatctctacctcttgggttcaagcgattttcctgcctcagcctcccaggtagttgggattacaggcgcccaccaccacgcccagctaatttttatatttttagtagagacggagtttcaccatgttggccaggctggtcttgaattcctgacctcaggtgatccacctgcctcggcctcccaaactgttgggattacagatgtgagccaccgcgtctggccctttttttttttttgagactgagtttcactcttgtcccctaggctggagtgcaatggcgcgatcttggctcactgcaacctccgcctcccaggttcaaatgattctcctgcctcggcctcccaagtagttgggactatgggcgtgcaccgccatgcccagctaattttttgtatttttagtagagacagggtttcatcatgttgcccaggctggtcttgaactcctaacctcaagtggtctccctgcctcggcctcccaaagtgctggaattacaggtgtaagccaccacgcccagccgaaaagatgggttcttctatcttttctctttccatagccaggaatgtatcctaaagaaatgatacaagtgtcgataaaactatgcccaatgctgtttgctggtttgctttgcaacctctaaatgaaagaacttagctgctcagtaggaagggaatggtatgatatgagtattaagcagccatttgaaatgtttgcaaaagtgtataatgatgtttcttactgttaaatggacaaagctagctgtgaaattatgtctgtagaatctaaatgatttcgtagaatatctggaaggaaattttccagaatgg

SEQ ID NO: 43805 - DNA, 2300 bp, Homo sapien
ctggtatgtagagacatcgttcttttttttttctttctttctttgtcctcttttgagacggagtcttgctctgtcgcccaggctggagtgcagtggcgcgatctctgctcactgcaaccccgcctcccggattcaagcaattgtctgcctcagcctcccgagtagctgggattataggcacccaccagcacgcctggctaagttttgtgtttttactagagatgggctttcgccatcttggccggggtgctcttgaactcctgacctcgtgattcacctgccttggcctcccaaagtgctgggattacaggcatgagcctccgcgcccggtggagacataattcttacatattggttttctatccagtggccttgtgaaatatgcttgtgaattctaaagtttacttctaggtcgttttcagtcttcaatatacagaaacatatcatcctggaataagagcagttttgtttccgccatttttttttcttttcccttttgtatttttttgtagagacggggttttgccatgtttcccgggctgttgttgaacttttgagtgcaagtgatgcacccacgtcatctcccacagtgctgggattactggcgtgggccaccgtggcgggcccgtcgttgccattgtaaagagttttatttccttttctgattttatggcattgcgcagacccacccgttacaatggtgacagtggacatccttgtcttatccctgatgagaaaccgaaaaatttcaacatttcaccatcctattcactctcctttttttgtagatggactttatcagagtgagtcattccattctgttccaaatttgctgagagtattcatttgaatatatgttgattttcatcaaacagtgcatctatttcgattaccacagcgttttttcccattcatgtgttaatatagtgaattcgattgataaatttgtacgtttttaggttcgattattaaaacttgagacagcgtctcactctgtcaccgaggctggagtgcagtggtgttatcagagctcgctgcagccttgacctcctgggctcaggcgctcctcccacctcagcctcctgagtagctgtgagtataggtacatgccaccatgcccagctaatttttcgatggttttttgtttgttttttgtagtgatgagattttctgatgttgcttaggctggtctcgaagtcctgagctcaggtgatctggccagctcagcctcccaaaatactaggattacaggcgtgagccttggcctggtctggtttttcttatataggggtcttatctatataaagactaaagttaatctgtgcctttgtgcgggtgggctaagagcatgatgacttttatcattctattgatttaaagaaaactatccttgacttaccagtgtgtaaggccatgaaagcataattctgttgaaagcatatattgttaatgggtgttgggaaccgtgcactttccgctgctgtgggagcatgtccttggaggtacctttcatctgttttctcaactccaaacatcttaggaccatgggttgtgactggtaggactatgtatcttgctgctttcaagacggagtatattttcacgtggtttcactctggctgtcctgtttccctaatactgtcacttcaccctctgtgattctgatgctacaaatgatagatatcgttttagcattttcttacgggtcctagcgattctattcatttttctttcagtctctttctctgacttgttcacaatgaacaatttccttttgggataggttgctatttctgttttcgcaggtggtttacctgtcttcccagccagtcacagtggtccttgtccccatggtgggtccggggcaagagagggccctgggttgggggtggggttcagttgaagatggggtgagttttgaggggagcactacttgagtcccagaggcataggaaacagcagagggaggtgggattcccttatcctcaatgaggatgggcatggagggtttggggcgtggcgctgggaacggcagccctccccagcccacagccgcgcatgctccctgggctcccgcctcagtgcgcatgttcactgggcgtcttctgcccggccccttcgcccacgtgaagaacgccagggagctgtgaggcagtgctgtgtggttcctgccgtccggactctttttcctctactgagattcatctggtaggtctgcaggccagtcatcccgggggctgaagtgtgagtgagggtggagagggccttgggtgggtcaggcgggtcccgcttcctggtct

SEQ ID NO: 43806 - DNA, 2300 bp, Homo sapien
gctggtatgtagagacatcgttctttttttttctttttttctttgtcctcttttgagacggagtcttgctctgtcgcccaggctggagtgcagtggcgcgatctctgctcactgcaaccccgcctcccggattcaagcaattgtctgcctcagcctcccgagtagctgggattataggcacccaccagcacgcctggctaagttttgtgtttttactagagatgggctttcgccatcttggccggggtgctcttgaactcctgacctcgtgattcacctgccttggcctcccaaagtgctgggattacaggcatgagcctccgtgcccggtggagacataattcttacatattggttttctatccagcggccttgtgaaatatgcttgtgaattctaaagtttacttctaggtcgttttcagtcttcaatatacagaaacatatcatcctggaataagagcagttttgtttccgccatatttttttcttttcccttttgtatttttttgtagagacggggttttgccatgtttcccgggctgttgttgaacttttgagtgcaagtgatgcacccacctcacctcccacagtgctgggattactggcgtgggccaccgtggcgggcccgtcgttggcattgtaaagagttttatttccttttctgattttatggcattgtgcagactcacccgttacaatggtgacagtggacatccttgtcttctccctgatgagaaaccgaaaaatttcaacatttcgccatcctattcactctcctttttttgtagacggactttatcagagtgagtcattgcattctgttccaaatttgctgagagtattcatttgaatatatgttgattttcatcaaacagtgcatctatttcgattaccacagcgttttttcccattcatgtgttaatatagtgaattcgattgataaatttgtacgtttttaggttcgattattaaaacttgagacagcgtctcactctgtcaccgaggctggagtgcggtggtgttatcagagctcgctgcagccttgacctcctgggctcaagcgcgcctcccacctcagcctcctgaggagctgtgagtataggtacatgccaccatgcccagctaatttttcgatggttttttgtttgttttttgtagtgatgagattttctgatgttgcttaggctggtctcgaagtcctgagctcaggtgatctggccagctcagcctcccaaaatactaggattacaggcgtgagccttggcctggtctggtttttcttatataggggtcttatctatataaagactaaagttaatctgtgcctttgtgcgggtgggctaagagcatgatgacttttatcattctattgatttaaagaaaactgtccttgacttaccagtgtgtaagtccatgaaagcataattctgttgaaagcatatattgttaatgggtgttgggaaccgtgcactttccgctgctgtgggagcatgtccttggaggtacctttcatctgttttctcaactccaaacatcttaggaccatgggttgtgactggtaggactatgtatcttgctgctttcaagacggagtatattttcacgtggtgtcactctggctgtcctgtttccctaatactgtcacttcaccctctgcgattctgatgctacaaatgatagatatcgttttagcattttcttacgggtcctagcgattctattcatttttctttcagtctctttctctgacttgttcacattgaacaatttccttttgggataggttgctatttctgttttcgcaggtggtttacctgtcttcccagccagtcacagtggtccttgtccccatggtgggtccggggcaagagagggccctgggttgggggtggggttcagttgaagatggggtgagttttgaggggagcactacttgagtcccagaggcataggaaacagcagagggaggtgggattcccttatcctcaatgaggatgggcatggagggtttggggcgtggcgctgggaacggcagccctccccagcccacagccgcgcatgctccctgggctcccgcctcagtgcgcatgttcactgggcgtcttctgcccggccccttcgcccacgtgaagaacgccagggagctgtgaggcagtgctgtgtggttcctgccgtccggactctttttcctctactgagattcatctggtaggtgtgcaggccagtcatcccgggggctgaagtgtgagtgagggtggagagggcctcgggtgggtcaggcgggtcccgcttcctggtct

SEQ ID NO: 43807 - DNA, 2300 bp, Homo sapien
attttctgatgttgcttaggctggtctcgaagtcctgagctcaggtgatctggccagctcagcctcccaaaatactaggattacaggcgtgagccttggcctggtctggtttttcttatataggggtcttatctatataaagactaaagttaatctgtgcctttgtgcgggtgggctaagagcatgatgacttttatcattctattgatttaaagaaaactgtccttgacttaccagtgtgtaagtccatgaaagcataattctgttgaaagcatatattgttaatgggtgttgggaaccgtgcactttccgctgctgtgggagcatgtccttggaggtacctttcatctgttttctcaactccaaacatcttaggaccatgggttgtgactggtaggactatgtatcttgctgctttcaagacggagtatattttcacgtggtgtcactctggctgtcctgtttccctaatactgtcacttcaccctctgcgattctgatgctacaaatgatagatatcgttttagcattttcttacgggtcctagcgattctattcatttttctttcagtctctttctctgacttgttcacattgaacaatttccttttgggataggttgctatttctgttttcgcaggtggtttacctgtcttcccagccagtcacagtggtccttgtccccatggtgggtccggggcaagagagggccctgggttgggggtggggttcagttgaagatggggtgagttttgaggggagcactacttgagtcccagaggcataggaaacagcagagggaggtgggattcccttatcctcaatgaggatgggcatggagggtttggggcgtggcgctgggaacggcagccctccccagcccacagccgcgcatgctccctgggctcccgcctcagtgcgcatgttcactgggcgtcttctgcccggccccttcgcccacgtgaagaacgccagggagctgtgaggcagtgctgtgtggttcctgccgtccggactctttttcctctactgagattcatctggtaggtgtgcaggccagtcatcccgggggctgaagtgtgagtgagggtggagagggcctcgggtgggtcaggcgggtcccgcttcctggtctgtggcctccgagggagaagggccacgaggtcgtcctccttcccttcacaggctgcgaggccaccggcggcttcgtggtcgtgaaggggcctggacggggaggaaggtgggccgtggaggggaggcggtcaggggctcaggtgaagacggggtgagtgctgttggggggatggaagtcccgaggtgccgggatccccgacgacacagggcagattccctgaatggggcccccggcgggggcgaggcgggcggtgaagaaggggcctggcacctgggaaggctgcggcctggcgagtgccccctcagcggtgtggagtgcggagcgcccgagtgagaagcactgcaaggtctcacctccgccatggaaggtccgaaaacagtgggaaggagtgggcgaggcagtgcggtccaaccaaacttgttgtgagtgggggtgaatggctctaggaagtgggagtgtgcccaaagcagcaatcacgagaattgtgattcactagggttttcgtggggagtgcacttgtgaaactaaacctcatcagaaatgacctctgtctgcggggcgcagtggcgctcgcctacgtattcccagttactggggacactgaggtgggaggatcccttgagcgggaggtcgaggctgcagtgagctgtgatcacgccgctgcactccagcctgagcaacacagcgagaccgcgtgtccaaaagaaatttagaaaaaaatgtcctctgccttttgccacacgccttaagatgattgctctgccagcctggccagcagaagtggctttgtaggcactcagacagcgtacacacgtatgcttaactctgggacttattttgagagtattttcaaaagtaaaacggcaagttaacatttatccatggaagtgatcgaatatagcagccctctggagcgcacgttcccaatcacggttgtctgttttcagtgtgaaatatgagttggcgaggaagatcgacctattattggcctagaccaaggcgctatgtacagcctcctgaaatgattgggcctatgcgggtgagtgcttaaacgttaattcgatgttttctattagtagaaattaatttttgtgatagcgtcgttgcattagtgtggaaatgctgataaaggtctttcctgctcataaaaaatgaggatggcatc

SEQ ID NO: 43808 - DNA, 2300 bp, Homo sapien
gctggtatgtagagacatcgttctttttttttctttttttctttgtcctcttttgagacggagtcttgctctgtcgcccaggctggagtgcagtggcgcgatctctgctcactgcaaccccgcctcccggattcaagcaattgtctgcctcagcctcccgagtagctgggattataggcacccaccagcacgcctggctaagttttgtgtttttactagagatgggctttcgccatcttggccggggtgctcttgaactcctgacctcgtgattcacctgccttggcctcccaaagtgctgggattacaggcatgagcctccgtgcccggtggagacataattcttacatattggttttctatccagcggccttgtgaaatatgcttgtgaattctaaagtttacttctaggtcgttttcagtcttcaatatacagaaacatatcatcctggaataagagcagttttgtttccgccatatttttttcttttcccttttgtatttttttgtagagacggggttttgccatgtttcccgggctgttgttgaacttttgagtgcaagtgatgcacccacctcacctcccacagtgctgggattactggcgtgggccaccgtggcgggcccgtcgttggcattgtaaagagttttatttccttttctgattttatggcattgtgcagacccacccgttacaatggtgacagtggacatccttgtcttctccctgatgagaaaccgaaaaatttcaacatttcgccatcctattcactctcctttttttgtagacggactttatcagagtgagtcattgcattctgttccaaatttgctgagagtattcatttgaatatatgttgattttcatcaaacagtgcatctatttcgattaccacagcgttttttcccattcatgtgttaatatagtgaattcgattgataaatttgtacgtttttaggttcgattattaaaacttgagacagcgtctcactctgtcaccgaggctggagtgcggtggtgttatcagagctcgctgcagccttgacctcctgggctcaagcgcgcctcccacctcagcctcctgaggagctgtgagtataggtacatgccaccatgcccagctaatttttcgatggttttttgtttgttttttgtagtgatgagattttctgatgttgcttaggctggtctcgaagtcctgagctcaggtgatctggccagctcagcctcccaaaatactaggattacaggcgtgagccttggcctggtctggtttttcttatataggggtcttatctatataaagactaaagttaatctgtgcctttgtgcgggtgggctaagagcatgatgacttttatcattctattgatttaaagaaaactgtccttgacttaccagtgtgtaagtccatgaaagcataattctgttgaaagcatatattgttaatgggtgttgggaaccgtgcactttccgctgctgtgggagcatgtccttggaggtacctttcatctgttttctcaactccaaacatcttaggaccatgggttgtgactggtaggactatgtatcttgctgctttcaagacggagtatattttcacgtggtgtcactctggctgtcctgtttccctaatactgtcacttcaccctctgcgattctgatgctacaaatgatagatatcgttttagcattttcttacgggtcctagcgattctattcatttttctttcagtctctttctctgacttgttcacattgaacaatttccttttgggataggttgctatttctgttttcgcaggtggtttacctgtcttcccagccagtcacagtggtccttgtccccatggtgggtccggggcaagagagggccctgggttgggggtggggttcagttgaagatggggtgagttttgaggggagcactacttgagtcccagaggcataggaaacagcagagggaggtgggattcccttatcctcaatgaggatgggcatggagggtttggggcgtggcgctgggaacggcagccctccccagcccacagccgcgcatgctccctgggctcccgcctcagtgcgcatgttcactgggcgtcttctgcccggccccttcgcccacgtgaagaacgccagggagctgtgaggcagtgctgtgtggttcctgccgtccggactctttttcctctactgagattcatctggtaggtgtgcaggccagtcatcccgggggctgaagtgtgagtgagggtggagagggcctcgggtgggtcaggcgggtcccgcttcctggtct

SEQ ID NO: 43809 - DNA, 2300 bp, Homo sapien
attttctgatgttgcttaggctggtctcgaagtcctgagctcaggtgatctggccagctcagcctcccaaaatactaggattacaggcgtgagccttggcctggtctggtttttcttatataggggtcttatctatataaagactaaagttaatctgtgcctttgtgcgggtgggctaagagcatgatgacttttatcattctattgatttaaagaaaactgtccttgacttaccagtgtgtaagtccatgaaagcataattctgttgaaagcatatattgttaatgggtgttgggaaccgtgcactttccgctgctgtgggagcatgtccttggaggtacctttcatctgttttctcaactccaaacatcttaggaccatgggttgtgactggtaggactatgtatcttgctgctttcaagacggagtatattttcacgtggtgtcactctggctgtcctgtttccctaatactgtcacttcaccctctgcgattctgatgctacaaatgatagatatcgttttagcattttcttacgggtcctagcgattctattcatttttctttcagtctctttctctgacttgttcacattgaacaatttccttttgggataggttgctatttctgttttcgcaggtggtttacctgtcttcccagccagtcacagtggtccttgtccccatggtgggtccggggcaagagagggccctgggttgggggtggggttcagttgaagatggggtgagttttgaggggagcactacttgagtcccagaggcataggaaacagcagagggaggtgggattcccttatcctcaatgaggatgggcatggagggtttggggcgtggcgctgggaacggcagccctccccagcccacagccgcgcatgctccctgggctcccgcctcagtgcgcatgttcactgggcgtcttctgcccggccccttcgcccacgtgaagaacgccagggagctgtgaggcagtgctgtgtggttcctgccgtccggactctttttcctctactgagattcatctggtaggtgtgcaggccagtcatcccgggggctgaagtgtgagtgagggtggagagggcctcgggtgggtcaggcgggtcccgcttcctggtctgtggcctccgagggagaagggccacgaggtcgtcctccttcccttcacaggctgcgaggccaccggcggcttcgtggtcgtgaaggggcctggacggggaggaaggtgggccgtggaggggaggcggtcaggggctcaggtgaagacggggtgagtgctgttggggggatggaagtcccgaggtgccgggatccccgacgacacagggcagattccctgaatggggcccccggcgggggcgaggcgggcggtgaagaaggggcctggcacctgggaaggctgcggcctggcgagcgccccctcagcggtgtggagtgcggagcgcccgagtgagaagcactgcaaggtctcacctccgccatggaaggtccgaaaacagtgggaaggagtgggcgaggcagtgcggtccaaccaaacttgttgtgagtgggggtgaatggctctaggaagtgggagtgtgcccaaagcagcaatcacgagaattgtgattcactagggttttcgtggggagtgcacttgtgaaactaaacctcatcagaaatgacctctgtctgcggggcgcagtggcgctcgcctacgtattcccagttactggggacactgaggtgggaggatcccttgagcgggaggtcgaggctgcagtgagctgtgatcacgccgctgcactccagcctgagcaacacagcgagaccgcgtgtccaaaagaaatttagaaaaaaatgtcctctgccttttgccacacgccttaagatgattgctctgccagcctggccagcagaagtggctttgtaggcactcagacagcgtacacacgtatgcttaactctgggacttattttgagagtattttcaaaagtaaaacggcaagttaacatttatccatggaagtgatcgaatatagcagccctctggagcgcacgttcccaatcacggttgtctgttttcagtgtgaaatatgagttggcgaggaagatcgacctattattggcctagaccaaggcgctatgtacagcctcctgaaatgattgggcctatgcgggtgagtgcttaaacgttaattcgatgttttctattagtagaaattaatttttgtgatagcgtcgttgcattagtgtggaaatgctgataaaggtctttcctgctcataaaaaatgaggatggcatc

SEQ ID NO: 43810 - DNA, 2300 bp, Homo sapien
gctggtatgtagagacatcgttctttttttttctttttttctttgtcctcttttgagacggagtcttgctctgtcgcccaggctggagtgcagtggcgcgatctctgctcactgcaaccccgcctcccggattcaagcaattgtctgcctcagcctcccgagtagctgggattataggcacccaccagcacgcctggctaagttttgtgtttttactagagatgggctttcgccatcttggccggggtgctcttgaactcctgacctcgtgattcacctgccttggcctcccaaagtgctgggattacaggcatgagcctccgtgcccggtggagacataattcttacatattggttttctatccagcggccttgtgaaatatgcttgtgaattctaaagtttacttctaggtcgttttcagtcttcaatatacagaaacatatcatcctggaataagagcagttttgtttccgccatatttttttcttttcccttttgtatttttttgtagagacggggttttgccatgtttcccgggctgttgttgaacttttgagtgcaagtgatgcacccacctcacctcccacagtgctgggattactggcgtgggccaccgtggcgggcccgtcgttggcattgtaaagagttttatttccttttctgattttatggcattgcgcagacccacccgttacaatggtgacagtggacatccttgtcttctccctgatgagaaaccgaaaaatttcaacatttcgccatcctattcactctcctttttttgtagacggactttatcagagtgagtcattgcattctgttccaaatttgctgagagtattcatttgaatatatgttgattttcatcaaacagtgcatctatttcgattaccacagcgttttttcccattcatgtgttaatatagtgaattcgattgataaatttgtacgtttttaggttcgattattaaaacttgagacagcgtctcactctgtcaccgaggctggagtgcggtggtgttatcagagctcgctgcagccttgacctcctgggctcaagtgcgcctcccacctcagcctcctgaggagctgtgagtataggtacatgccaccatgcccagctaatttttcgatggttttttgtttgttttttgtagtgatgagattttctgatgttgcttaggctggtctcgaagtcctgagctcaggtgatctggccagctcagcctcccaaaatactaggattacaggcgtgagccttggcctggtctggtttttcttatataggggtcttatctatataaagactaaagttaatctgtgcctttgtgcgggtgggctaagagcatgatgacttttatcattctattgatttaaagaaaactgtccttgacttaccagtgtgtaagtccatgaaagcataattctgttgaaagcatatattgttaatgggtgttgggaaccgtgcactttccgctgctgtgggagcatgtccttggaggtacctttcatctgttttctcaactccaaacatcttaggaccatgggttgtgactggtaggactatgtatcttgctgctttcaagacggagtatattttcacgtggtgtcactctggctgtcctgtttccctaatactgtcacttcaccctctgcgattctgatgctacaaatgatagatatcgttttagcattttcttacgggtcctagcgattctattcatttttctttcagtctctttctctgacttgttcacattgaacaatttccttttgggataggttgctatttctgttttcgcaggtggtttacctgtcttcccagccagtcacagtggtccttgtccccatggtgggtccggggcaagagagggccctgggttgggggtggggttcagttgaagatggggtgagttttgaggggagcactacttgagtcccagaggcataggaaacagcagagggaggtgggattcccttatcctcaatgaggatgggcatggagggtttggggcgtggcgctgggaacggcagccctccccagcccacagccgcgcatgctccctgggctcccgcctcagtgcgcatgttcactgggcgtcttctgcccggccccttcgcccacgtgaagaacgccagggagctgtgaggcagtgctgtgtggttcctgccgtccggactctttttcctctactgagattcatctggtaggtgtgcaggccagtcatcccgggggctgaagtgtgagtgagggtggagagggcctcgggtgggtcaagcgggtcccgcttcctggtct

SEQ ID NO: 43811 - DNA, 2300 bp, Homo sapien
attttctgatgttgcttaggctggtctcgaagtcctgagctcaggtgatctggccagctcagcctcccaaaatactaggattacaggcgtgagccttggcctggtctggtttttcttatataggggtcttatctatataaagactaaagttaatctgtgcctttgtgcgggtgggctaagagcatgatgacttttatcattctattgatttaaagaaaactgtccttgacttaccagtgtgtaagtccatgaaagcataattctgttgaaagcatatattgttaatgggtgttgggaaccgtgcactttccgctgctgtgggagcatgtccttggaggtacctttcatctgttttctcaactccaaacatcttaggaccatgggttgtgactggtaggactatgtatcttgctgctttcaagacggagtatattttcacgtggtgtcactctggctgtcctgtttccctaatactgtcacttcaccctctgcgattctgatgctacaaatgatagatatcgttttagcattttcttacgggtcctagcgattctattcatttttctttcagtctctttctctgacttgttcacattgaacaatttccttttgggataggttgctatttctgttttcgcaggtggtttacctgtcttcccagccagtcacagtggtccttgtccccatggtgggtccggggcaagagagggccctgggttgggggtggggttcagttgaagatggggtgagttttgaggggagcactacttgagtcccagaggcataggaaacagcagagggaggtgggattcccttatcctcaatgaggatgggcatggagggtttggggcgtggcgctgggaacggcagccctccccagcccacagccgcgcatgctccctgggctcccgcctcagtgcgcatgttcactgggcgtcttctgcccggccccttcgcccacgtgaagaacgccagggagctgtgaggcagtgctgtgtggttcctgccgtccggactctttttcctctactgagattcatctggtaggtgtgcaggccagtcatcccgggggctgaagtgtgagtgagggtggagagggcctcgggtgggtcaagcgggtcccgcttcctggtctgtggcctccgagggagaagggccacgaggtcgtcctccttcccttcacaggctgcgaggccaccggcggcttcgtggtcgtgaaggggcctggacggggaggaaggtgggccgtggaggggaggcggtcaggggctcaggtgaagacggggtgagtgctgttggggggatggaagtcccgaggtgccgggatccccgacgacacagggcagattccctgaatggggcccccggcgggggcgaggcgggcggtgaagaaggggcctggcacctgggaaggctgcggcctggcgagcgccccctcagcggtgtggagtgcggagcgcccgagtgagaagcactgcaaggtctcacctccgccatggaaggtccgaaaacagtgggaaggagtgggcgaggcagtgcggtccaaccaaacttgttgtgagggggggtgaatggctctaggaagtgggagtgtgcccaaagcagcaatcacgagaattgtgattcactagggttttcgtggggagtgcacttgtgaaactaaacctcatcagaaatgacctctgtctgcggggcgcagtggcgctcgcctacgtattcccagttactggggacactgaggtgggaggatcccttgagcgggaggtcgaggctgcagtgagctgtgatcacgccgctgcactccagcctgagcaacacagcgagaccgcgtgtccaaaagaaatttagaaaaaaatgtcctctgccttttgccacacgccttaagatgattgctctgccagcctggccagcagaagtggctttgtaggcactcagacagcgtacacacgtatgcttaactctgggacttattttgagagtattttcaaaagtaaaacggcaagttaacatttatccatggaagtgatcgaatatagcagccctctggagcgcacgttcccaatcacggttgtctgttttcagtgtgaaatatgagttggcgaggaagatcgacctattattggcctagaccaaggcgctatgtacagcctcctgaaatgattgggcctatgcgggtgagtgcttaaacgttaattcgatgttttctattagtagaaattaatttttgtgatagcgtcgttgcattagtgtggaaatgctgataaaggtctttcctgctcataaaaaatgaggatggcatc

SEQ ID NO: 43812 - DNA, 2300 bp, Homo sapien
ctaaaatttaccatcttaactatttttaagtggtacagttcactaaggagttacgtttgcaacattaccagccactaggcacaaaaactttgcatctgtgttttcctataccatgaaaactttatttatttaatgaatttatttatgtgtttatttatttattcatttatttatttattagcaatgaggtctcactgtgtttcccaggctgggcttgaactccaggactcaagcaatcctctcacctcggcctcccaagtagctgggactatgagtgcatggcattcagcccagctttagacctttctcctaaatgacaatctaaggataaaccacaggacatgtataatgcttatattcagccctagagtaccaacagcagtgtgcgtcagctgagaaatctgaagtctaccacgtgggtaggatttcagttacaattacaatgtcagtttctgaaggattgattagctggatggatttgaggactatggaaatcttacagtcacgacacccattacctattggggtaaagagaaacttcactttgttcaaataaagttatatttaggtccgaaggtcctaaaggtaatattccataaatgaaccccgtgaagaacaaagcaccaaatataacattgtttgtgaatcacagaaaatatactgtcccccgcactgagaataagggagtgggcggacagcaattaatgggcattgttgtcagtcagattctaggaacttttaacagtgcatccctggaataatccatgacctccgttacataaatgcttcctttcaaaacattttatctgggagaaattatttccatctcacgttaatctcaggataattccgtttttgcttttctaaccataaaaggatttaatcacctcctaaaggccgctgagaaaaatcactaaaccagctacctgtatggcagtatcctcatttatccagcttttatcaaacgtaccatataaaaatatcaatcaaaggaaacgggggccaacattcagcgactcggtttttggagctgctcctgctcctctgaactgggtctattcttgggtcagtactaagctaccttacagtaaagccttttgagttttaagcattttcagcaaaatcacttccttctttccagcaacatacatgataggaagacacaaaccttagaacacagtacaaatgttgtattcaccagtcaagggttcttggataacacacaatcctggcacctccattctctcattcataaagtcgagaacttttatcatagtgagggatttgcctaagctaagctgcaaactacatagcctcctcgcttttccagtcaatttcaggcattctttccattgttttctttcctcctcttcctcctatgtgacaatgcctaacacacacacacgtgcacacacacacaggaacacacacacacgcacacaccagcagacgttcttcttccctttccctcaccttgacctgcagatgctccctcatcctctccctcctgagcagctgcaggatcctgacattgagttgctggttccccttcttcaggtgttgctggttccacttcatcactgaactgctcgggctggggaatacgtgtgggtgtgcaaatagaaaataagtttcgttattgatacaaaattttacatatatacacagaatacatagctatttctggtcctaactaagcctaaagacatttctccaactctatgctctatgcccaataaggttactccacccacagggaggttactgtgagaaaagtgacgcacgaggactttgggggctattatactctgtgttggaatacatgtgtacaatctgtcattaacaaacaaagccggagaaagaagtcatgggcaaaagctgaagaacacgagaggaaaaaaaaaatcctccagaatcaatgtttccttcatgagatgccatcctcattttttatgagcaggaaagacctttatcagcatttccacactaatgcaacgacgctatcacaaaaattaatttctactaatagaaaacatcgaattaacgtttaagcactcacccgcataggcccaatcatttcaggaggctgtacatagcgccttggtctaggccaataataggtcgatcttcctcgccaactcatatttcacactgaaaacagacaaccgtgattgggaacgtgcgctccagagggctgctatattcgatcacttccatggataaatgttaacttgccgttttacttttgaaaatactctcaaaataagtcccagagttaagcatacgtgtgtacgctgtct

SEQ ID NO: 43813 - DNA, 2300 bp, Homo sapien
ctggtatgtagagacatcgttcttttttttttctttctttctttgtcctcttttgagacggagtcttgctctgtcgcccaggctggagtgcagtggcgcgatctctgctcactgcaaccccgcctcccggattcaagcaattgtctgcctcagcctcccgagtagctgggattataggcacccaccagcacgcctggctaagttttgtgtttttactagagatgggctttcgccatcttggccggggtgctcttgaactcctgacctcgtgattcacctgccttggcctcccaaagtgctgggattacaggcatgagcctccgcgcccggtggagacataattcttacatattggttttctatccagcggccttgtgaaatatgcttgtgaattctaaagtttacttctaggtcgttttcagtcttcaatatacagaaacatatcatcctggaataagagcagttttgtttccgccatatttttttcttttcccttttgtatttttttgtagagacggggttttgccatgtttcccgggctgttgttgaacttttgagtgcaagtgatgcacccacctcacctcccacagtgctgggattactggcgtgggccaccgtggcgggcccgtcgttgccattgtaaagagttttatttccttttctgattttatggcattgcgcagacccacccgttacaatggtgacagtggacatccttgtcttatccctgatgagaaaccgaaaaatttcaacatttcaccatcctattcactctcctttttttgtagacggactttatcagagtgagtcattgcattctgttccaaatttgctgagagtattcatttgaatatatgttgattttcatcaaacagtgcatctatttcgattaccacagcgttttttcccattcatgtgttaatatagtgaattcgattgataaatttgtacgtttttaggttcgattattaaaacttgagacagcgtctcactctgtcaccgaggctggagtgcggtggtgttatcagagctcgctgcagccttgacctcctgggctcaagcgcgcctcccacctcagcctcctgaggagctgtgagtataggtacatgccaccatgcccagctaatttttcgatggttttttgtttgttttttgtagtgatgagattttctgatgttgcttaggctggtctcgaagtcctgagctcaggtgatctggccagctcagcctcccaaaatactaggattacaggcgtgagccttggcctggtctggtttttcttatataggggtcttatctatataaagactaaagttaatctgtgcctttgtgcgggtgggctaagagcatgatgacttttatcattctattgatttaaagaaaactgtccttgacttaccagtgtgtaagtccatgaaagcataattctgttgaaagcatatattgttaatgggtgttgggaaccgtgcactttccgctgctgtgggagcatgtccttggaggtacctttcatctgttttctcaactccaaacatcttaggaccatgggttgtgactggtaggactatgtatcttgctgctttcaagacggagtatattttcacgtggtgtcactctggctgtcctgtttccctaatactgtcacttcaccctctgcgattctgatgctacaaatgatagatatcgttttagcattttcttacgggtcctagcgattctattcatttttctttcagtctctttctctgacttgttcacattgaacaatttccttttgggataggttgctatttctgttttcgcaggtggtttacctgtcttcccagccagtcacagtggtccttgtccccatggtgggtccggggcaagagagggccctgggttgggggtggggttcagttgaagatggggtgagttttgaggggagcactacttgagtcccagaggcataggaaacagcagagggaggtgggattcccttatcctcaatgaggatgggcatggagggtttggggcgtggcgctgggaacggcagccctccccagcccacagccgcgcatgctccctgggctcccgcctcagtgcgcatgttcactgggcgtcttctgcccggccccttcgcccacgtgaagaacgccagggagctgtgaggcagtgctgtgtggttcctgccgtccggactctttttcctctactgagattcatctggtaggtgtgcaggccagtcatcccgggggctgaagtgtgagtgagggtggagagggcctcgggtgggtcaggcgggtcccgcttcctggtct

SEQ ID NO: 43814 - DNA, 2300 bp, Homo sapien; identical to SEQ ID NO: 43809

SEQ ID NO: 43815 - DNA, 2300 bp, Homo sapien
gctggtatgtagagacatcgttctttttttttctttttttctttgtcctcttttgagacggagtcttgctctgtcgcccaggctggagtgcagtggcgcgatctctgctcactgcaaccccgcctcccggattcaagcaattgtctgcctcagcctcccgagtagctgggattataggcacccaccagcacgcctggctaagttttgtgtttttactagagatgggctttcgccatcttggccggggtgctcttgaactcctgacctcgtgattcacctgccttggcctcccaaagtgctgggattacaggcatgagcctccgtgcccggtggagacataattcttacatattggttttctatccagcggccttgtgaaatatgcttgtgaattctaaagtttacttctaggtcgttttcagtcttcaatatacagaaacatatcatcctggaataagagcagttttgtttccgccatatttttttcttttcccttttgtatttttttgtagagacggggttttgccatgtttcccgggctgttgttgaacttttgagtgcaagtgatgcacccacctcacctcccacagtgctgggattactggcgtgggccaccgtggcgggcccgtcattgccattgtaaagagttttatttccttttctgattttatggcattgcgcagacccacccgttacaatggtgacagtggacatccttgtcttatccctgatgagaaaccgaaaaatttcaacatttcaccatcctattcactctcctttttttgtagacggactttatcagagtgagtcattgcattctgttccaaatttgctgagagtattcatttgaatatatgttgattttcatcaaacagtgcatctatttcgattaccacagcgttttttcccattcatgtgttaatatagtgaattcgattgataaatttgtacgtttttaggttcgattattaaaacttgagacagcgtctcactctgtcaccgaggctggagtgcggtggtgttatcagagctcgctgcagccttgacctgctgggctcaagcgcgcctcccacctcagcctcctgaggagctgtgagtataggtacatgccaccatgcccagctaatttttcgatggttttttgtttgttttttgtagtgatgagattttctgatgttgcttaggctggtctcgaagtcctgagctcaggtgatctggccagctcagcctcccaaaatactaggattacaggcgtgagccttggcctggtctggtttttcttatataggggtcttatctatataaagactaaagttaatctgtgcctttgtgcgggtgggctaagagcatgatgacttttatcattctattgatttaaagaaaactgtccttgacttaccagtgtgtaagtccatgaaagcataattctgttgaaagcatatattgttaatgggtgttgggaaccgtgcactttccgctgctgtgggagcatgtccttggaggtacctttcatctgttttctcaactccaaacatcttaggaccatgggttgtgactggtaggactatgtatcttgctgctttcaagacggagtatattttcacgtggtgtcactctggctgtcctgtttccctaatactgtcacttcaccctctgcgattctgatgctacaaatgatagatatcgttttagcattttcttacgggtcctagcgattctattcatttttctttcagtctctttctctgacttgttcacattgaacaatttccttttgggataggttgctatttctgttttcgcaggtggtttacctgtcttcccagccagtcacagtggtccttgtccccatggtgggtccggggcaagagagggccctgggttgggggtggggttcagttgaagatggggtgagttttgaggggagcactacttgagtcccagaggcataggaaacagcagagggaggtgggattcccttatcctcaatgaggatgggcatggagggtttggggcgtggcgctgggaacggcagccctccccagcccacagccgcgcatgctccctgggctcccgcctcagtgcgcatgttcactgggcgtcttctgcccggccccttcgcccacgtgaagaacgccagggagctgtgaggcagtgctgtgtggttcctgccgtccggactctttttcctctactgagattcatctggtaggtgtgcaggccagtcatcccgggggctgaagtgtgagtgagggtggagagggcctcgggtgggtcaggcgggtcccgcttcctggtct

SEQ ID NO: 43816 - DNA, 2300 bp, Homo sapien; identical to SEQ ID NO: 43809

SEQ ID NO: 43817 - DNA, 2300 bp, Homo sapien
tttctttttttctttgtcctcttttgagacggagtcttgctctgtcgcccaggctggagtgcagtggcgcgatctctgctcactgcaaccccgcctcccggattcaagcaattgtctgcctcagcctcccgagtagctgggattataggcacccaccagcacgcctggctaagttttgtgtttttactagagatgggctttcgccatcttggccggggtgctcttgaactcctgacctcgtgattcacctgccttggcctcccaaagtgctgggattacaggcatgagcctccgtgcccggtggagacataattcttacatattggttttctatccagcggccttgtgaaatatgcttgtgaattctaaagtttacttctaggtcgttttcagtcttcaatatacagaaacatatcatcctggaataagagcagttttgtttccgccatatttttttcttttcccttttgtatttttttgtagagacggggttttgccatgtttcccgggctgttgttgaacttttgagtgcaagtgatgcacccacctcacctcccacagtgctgggattactggcgtgggccaccgtggcgggcccgtcgttggcattgtaaagagttttatttccttttctgattttatggcattgtgcagacccacccgttacaatggtgacagtggacatccttgtcttctccctgatgagaaaccgaaaaatttcaacatttcgccatcctattcactctcctttttttgtagacggactttatcagagtgagtcattgcattctgttccaaatttgctgagagtattcatttgaatatatgttgattttcatcaaacagtgcatctatttcgattaccacagcgttttttcccattcatgtgttaatatagtgaattcgattgataaatttgtacgtttttaggttcgattattaaaacttgagacagcgtctcactctgtcaccgaggctggagtgcggtggtgttatcagagctcgctgcagccttgacctcctgggctcaagcgcgcctcccacctcagcctcctgaggagctgtgagtataggtacatgccaccatgcccagctaatttttcgatggttttttgtttgttttttgtagtgatgagattttctgatgttgcttaggctggtctcgaagtcctgagctcaggtgatctggccagctcagcctcccaaaatactaggattacaggcgtgagccttggcctggtctggtttttcttatataggggtcttatctatataaagactaaagttaatctgtgcctttgtgcgggtgggctaagagcatgatgacttttatcattctattgatttaaagaaaactgtccttgacttaccagtgtgtaagtccatgaaagcataattctgttgaaagcatatattgttaatgggtgttgggaaccgtgcactttccgctgctgtgggagcatgtccttggaggtacctttcatctgttttctcaactccaaacatcttaggaccatgggttgtgactggtaggactatgtatcttgctgctttcaagacggagtatattttcacgtggtgtcactctggctgtcctgtttccctaatactgtcacttcaccctctgcgattctgatgctacaaatgatagatatcgttttagcattttcttacgggtcctagcgattctattcatttttctttcagtctctttctctgacttgttcacattgaacaatttccttttgggataggttgctatttctgttttcgcaggtggtttacctgtcttcccagccagtcacagtggtccttgtccccatggtgggtccggggcaagagagggccctgggttgggggtggggttcagttgaagatggggtgagttttgaggggagcactacttgagtcccagaggcataggaaacagcagagggaggtgggattcccttatcctcaatgaggatgggcatggagggtttggggcgtggcgctgggaacggcagccctccccagcccacagccgcgcatgctccctgggctcccgcctcagtgcgcatgttcactgggcgtcttctgcccggccccttcgcccacgtgaagaacgccagggagctgtgaggcagtgctgtgtggttcctgccgtccggactctttttcctctactgagattcatctggtaggtgtgcaggccagtcatcccgggggctgaagtgtgagtgagggtggagagggcctcgggtgggtcaggcgggtcccgcttcctggtctgtggcctccgagggagaagggccacgagg

SEQ ID NO: 43818 - DNA, 2300 bp, Homo sapien
tttttttttctttttttctttgtcctcttttgagacggagtcttgctctgtcgcccaggctggagtgcagtggcgcgatctctgctcactgcaaccccgcctcccggattcaagcaattgtctgcctcagcctcccgagtagctgggattataggcacccaccagcacgcctggctaagttttgtgtttttactagagatgggctttcgccatcttggccggggtgctcttgaactcctgacctcgtgattcacctgccttggcctcccaaagtgctgggattacaggcatgagcctccgtgcccggtggagacataattcttacatattggttttctatccagcggccttgtgaaatatgcttgtgaattctaaagtttacttctaggtcgttttcagtcttcaatatacagaaacatatcatcctggaataagagcagttttgtttccgccatatttttttcttttcccttttgtatttttttgtagagacggggttttgccatgtttcccgggctgttgttgaacttttgagtgcaagtgatgcacccacctcacctcccacagtgctgggattactggcgtgggccaccgtggcgggcccgtcgttggcattgtaaagagttttatttccttttctgattttatggcattgtgcagacccacccgttacaatggtgacagtggacatccttgtcttctccctgatgagaaaccgaaaaatttcaacatttcgccatcctattcactctcctttttttgtagacggactttatcagagtgagtcattgcattctgttccaaatttgctgagagtattcatttgaatatatgttgattttcatcaaacagtgcatctatttcgattaccacagcgttttttcccattcatgtgttaatatagtgaattcgattgataaatttgtacgtttttaggttcgattattaaaacttgagacagcgtctcactctgtcaccgaggctggagtgcggtggtgttatcagagctcgctgcagccttgacctcctgggctcaagcgcgcctcccacctcagcctcctgaggagctgtgagtataggtacatgccaccatgcccagctaatttttcgatggttttttgtttgttttttgtagtgatgagattttctgatgttgcttaggctggtctcgaagtcctgagctcaggtgatctggccagctcagcctcccaaaatactaggattacaggcgtgagccttggcctggtctggtttttcttatataggggtcttatctatataaagactaaagttaatctgtgcctttgtgcgggtgggctaagagcatgatgacttttatcattctattgatttaaagaaaactgtccttgacttaccagtgtgtaagtccatgaaagcataattctgttgaaagcatatattgttaatgggtgttgggaaccgtgcactttccgctgctgtgggagcatgtccttggaggtacctttcatctgttttctcaactccaaacatcttaggaccatgggttgtgactggtaggactatgtatcttgctgctttcaagacggagtatattttcacgtggtgtcactctggctgtcctgtttccctaatactgtcacttcaccctctgcgattctgatgctacaaatgatagatatcgttttagcattttcttacgggtcctagcgattctattcatttttctttcagtctctttctctgacttgttcacattgaacaatttccttttgggataggttgctatttctgttttcgcaggtggtttacctgtcttcccagccagtcacagtggtccttgtccccatggtgggtccggggcaagagagggccctgggttgggggtggggttcagttgaagatggggtgagttttgaggggagcactacttgagtcccagaggcataggaaacagcagagggaggtgggattcccttatcctcaatgaggatgggcatggagggtttggggcgtggcgctgggaacggcagccctccccagcccacagccgcgcatgctccctgggctcccgcctcagtgcgcatgttcactgggcgtcttctgcccggccccttcgcccacgtgaagaacgccagggagctgtgaggcagtgctgtgtggttcctgccgtccggactctttttcctctactgagattcatctggtaggtgtgcaggccagtcatcccgggggctgaagtgtgagtgagggtggagagggcctcgggtgggtcaggcgggtcccgcttcctggtctgtggcctccgagggagaagggcc

SEQ ID NO: 43819 - DNA, 2300 bp, Homo sapien; identical to SEQ ID NO: 43813

SEQ ID NO: 43820 - DNA, 2300 bp, Homo sapien
gaaaactgcaccaaaaacacagctattagaatgatcaaaatccagatcactgacaacaacaaattctggggaggacgtggagcaacaggaactctcattcgttgttggtgggaatgtaaaatggtaaagccaatttgaaaggcagtttggcagtatttcttacaaaactaaacaaactcttactattcagtccagtagttgtacttcttggtatctacccaaaggagttgaaaacttgtgtctggacatggatgtttatagcttttttaaactagcatctttaaaggctttcccagataatctcaacatctctgtctttgcattggtgtcagttgtctgtctttctccatttgaaattccataacttccttttttttttttgaaatggagcctcactctgtcacccaggctggagtgcagtggcacgatcttggctcactgcaaactctgcctcccgggttcaaggaattctctgcctcagcctcccgagtagctgggattacaggtgcccgccaccatacccagctaatttttgtatttttggtagacatggggtttcaccatcttggccaggctggtcttgaactcctgacctcgtgatctacctgcctcagcctcccaaaatgctgggattacaggtatgagccactgcacctggccaagatgcctaactttcatgcttcttcgtattctgagtaattttgaattatatgcttgacattttgaatatcaggttatgagacacttcaacaatttctttttgttttgttttagacacagggtctcactctgttgcccaggctggactgcagtgtgtgatcatagctcactgcagccttgaactcctgggcccaagggatcctcttgcctcagccttcacagtagctaggactacaggcatgtgtcatcacactcagctatttttaattgtttttttgtagagacaaggtctcactatgttgcccaggttggaaactcctagcctcaagccatctatcttcttacttcagcacgcaaaagtgctaggattattggtgtaagtcactgctcttggccacacagaacaatttctatttctctatctttgagttcacaaactcttttcttgtctccattctgctattgaatccatttggggagaattattttccttcgttatcatattttccacttctaaaatttccatttgcttcttctttaaatattctttttttgtgtgtgtgccaggactttgtttttacttgtttcaacagtgttcatgattgcttgtttaagcattttttttttagacggagtctcactgttgtccaggccagagtgcagtcgcgtgatctcggttcactgcaacctctgcctcctgggttcaagcaattctcctgtttcagactcccgagtagctaagactacaggtgcgcgccaccatgcccagctaattttttgcatttttagtaaagacgaggtttcaccatgttggtcaggctggtctcgaactcctgacctcaagagatccacccgcctcggcctcccaaagtgctgggattacaggcatgagcaaccgcgcccagcctaagcgtttataaaatagcatctttaaaggctttcccacataatcccaacatctctatcttagcagtgatgtctgctgattgtctttccctatttcagtggccctatgttcctggttcttcatattctgagtaattttgaattatatgctagacatttttaatatttagttatgagactcttagtcttgtataatgctatgaggtatgttgctatttctgttttagcaggtcgtctacctcacttcacaggcagccaccatggtccttgtccctatggcagggccagagcaagagagggccctggaggggaggggggctcagttgaagatggaatgagttttgaggggagcactatttgaggtatttgagtacccgaggcatatgaaacagcagagggaggtcggattccattatcttcacggggatgaaaatcgggagtgtggggtgtggggctgggaactgcagccctccccacctttgggtgctagcctcagtgcgcatgttcactgggtgccttcccgtcggccccttcgcccacgtggagaacgccagggagctgtgagagtgtgcagtcgcgttcctgctgtccggacacttttttcctctactgagactcatctggtagatccgcaggccagtcctcccaggggctgaagtgtgagtgagggtgaggaggagccagtgggcttcaggcggagccagtgggcttcgggcaggttcggtgggcccctc

SEQ ID NO: 43821 - DNA, 2300 bp, Homo sapien
atattcttcacacttggctctgtattgactctacatcttatctgtaggagagagggagagaaggagagggagatctggcaattctacttctgccatgggggatctttctaactctcaaagaatgtgcgcttctttaagggtaacctgcagagtctgagaacggtccaggtccaggcatgcacggacagaaaggatatttttcccccaggggtttagcgggggcaggagggggtggacagggatgtgcagggcaagctcctttctgtcttgcaggcacccatctaacttttgcccaaagcagtaacagtgggcttctgtccccctacccccaaccccccacaccttctctgacagcagaggatcagaccacctaggtgatggtgaagctctttgacgtgcaccaggtgcaggagacctatgacccctagcactgccttttatctgctgggttccccttggagaaccatatatctttggagccccagaacatgctggttgcacaagaacaaagcacacttactgtctgagaggaaggctggtggtgtggtagcactattgaacctctcttttcttttgagatcatattgtacatacacagtgctacataactggatgtttcaagttaataacttaaaatgaacagcaccactattacaggaaatattattcagcactggttttggtagtcacccatatttcattttcaagtgtgccataatttacttatatagcaagtccatgaccatgctattataaattaagctgttttggaagtcccatgtatccaaatttttgttcacatggttaaagaaaaaaaacattcagtggtagttgttaaagcacagtaaggaaaaccttatttaggactgtggtgatgggtatagggaccattgcaatgggatcttgcagtgggggagagagattgggctcaatactgaatacagcgcaggccagtgggaatgtatagcgaaggagcagtatggcggtccgtgggtggaaaattactaaaaggaaacatcaggggtaagggggattctggctaaacccacctagcaggattcttgctgaagacaggccaaggggaatcagacatcacctgggggatggtggaagatgaagaaccccatgcgatagcaagtatgatcagatattgaggatggagggttcatgccacattgacttagcagggctctttgctaaaactgggttttacaaggaaatgcacagatgggcctaggaggagaagtttcagaagcctgacttaaaagtttggccaagcaaggaatatttgtcaacattcaagacagtttccttaacattaaagtcctagaagtagaaatgctgggtcacaggattttttattttttgagacagggtcttgctctgttgcccaagctggagtgcagtggtgtgatcttggctcactgcaacctcaacctcctgggctcaagctatcctcccacctcagcctctcaagtagctgggactacaggtgtgcaccaccatgcccagctaatttttgtattttttgtaaagacagggtcttgccatgttgcccaggatggtctcgaactcctgggctcaagaaatccacccacctcagcatcccaaagttctaggattacaggcatgagctgccgcacctggcctggatttttgtgcaaatgtttaggcttatttatgtatgtgggtttatcatccttctcctttacatttttttctggattcctatcatgcttaaaatggctttgcactctctgagaacctaagctttcacgcatctctgggaagactgaataccctcttaagggccactgaggtagcagcactgagaaaaaattaaagggtaaatttgcaggtgaaatgcagagctgggaacattcctagatccagaaggacagaacattttgcaggaggggccagaagccagaaacaagcccttctcagcaccgagcaggcccttcctccaggtggcacagagcctctaggaggcgggagagggctggaaagacaacccacgtgacacacccccgaggtttgggattggctggtggggttgacactgctgaggtctaaacaaggaggcagaagtaggtaggtgccacttctcttcccttcattcttcgccaggctctctgctgactcaagtgtaagtgagaacaggtgtgagtgagtgggccggcgggcttctggtgggtcgggcactgtggtccctggcctcagagaaggaagggcctcgaggtcatcatccttctcctagcaggcagctatgcggcggggcagggacaggggaggaagga

SEQ ID NO: 43822 - DNA, 2300 bp, Homo sapien
tgggggatggtggaagatgaagaaccccatgcgatagcaagtatgatcagatattgaggatggagggttcatgccacattgacttagcagggctctttgctaaaactgggttttacaaggaaatgcacagatgggcctaggaggagaagtttcagaagcctgacttaaaagtttggccaagcaaggaatatttgtcaacattcaagacagtttccttaacattaaagtcctagaagtagaaatgctgggtcacaggattttttattttttgagacagggtcttgctctgttgcccaagctggagtgcagtggtgtgatcttggctcactgcaacctcaacctcctgggctcaagctatcctcccacctcagcctctcaagtagctgggactacaggtgtgcaccaccatgcccagctaatttttgtattttttgtaaagacagggtcttgccatgttgcccaggatggtctcgaactcctgggctcaagaaatccacccacctcagcatcccaaagttctaggattacaggcatgagctgccgcacctggcctggatttttgtgcaaatgtttaggcttatttatgtatgtgggtttatcatccttctcctttacatttttttctggattcctatcatgcttaaaatggctttgcactctctgagaacctaagctttcacgcatctctgggaagactgaataccctcttaagggccactgaggtagcagcactgagaaaaaattaaagggtaaatttgcaggtgaaatgcagagctgggaacattcctagatccagaaggacagaacattttgcaggaggggccagaagccagaaacaagcccttctcagcaccgagcaggcccttcctccaggtggcacagagcctctaggaggcgggagagggctggaaagacaacccacgtgacacacccccgaggtttgggattggctggtggggttgacactgctgaggtctaaacaaggaggcagaagtaggtaggtgccacttctcttcccttcattcttcgccaggctctctgctgactcaagtgtaagtgagaacaggtgtgagtgagtgggccggcgggcttctggtgggtcgggcactgtggtccctggcctcagagaaggaagggcctcgaggtcatcatccttctcctagcaggcagctatgcggcggggcagggacaggggaggaaggagggccatgaaggggaggagggtcagccaagatgctgtgagttttggagcgggacactatctgagtcctggaggcatatgaaactgtccataaaggacggatgctggggtcctcagtgggggccagggaaagggtgggacagcccgcgcttgacagcgcctgcctcagtgctcgtgttcactgggggtcttcccatcagccccttcacccacgaggtgaactgccgcggagctgtgagggtgccgtttgcattccaattgtcgggactctttcacctgagactgagactcagtgggtgggtccaccgatcgttcctccatgggagtttaagtgtgaagaggagctggtgggcttcaggagggtcgggcagcacagtccgtggcctcggaggaggaagggcctcacaggtggtggcgccgccatgaccttgtggttgtggcagggctggggcgagggaggaagttgggccacggaggggagagggatcagatggagcaaaacttggggggtactttttgaggtatctttgagtcccagaggcacctgaaactgccgaaagaggacaggtttcggagttctcagtggggacctggggaggaggggacctggggtggctgtatattaaaaaatctcttcataatggagtttagttatgaaattaagtctctttaggaaagaccccatgttttgatctaggacttgaagatcacttctctgccgagctggctgtggaagaaacaaagcagtttgcagatagatttatttgatgtgattggaaaccaggcgtagttattattaactcaggacctattatggaaatctcacaaaattaaaaaaaattacaatcagcagatggccatggaaagagtcaagtataattactcctttttattgcagtcttcagttcacgatcttctagttgcagcgatgagtgcacgagtgagatcaagatccagaggaagaggagatggtcaggaggctcccgatgtggttgcattcgtggctgtgagtacatttcagtatcttatttccattggcagaaatgtatttttctgaaagaaaatctaaaacattgttaaccaatatagatctgttata

SEQ ID NO: 43823 - DNA, 2300 bp, Homo sapien
ctctctttacttgaggccataaacggcgtcatatccagctccagaggaaaggaaatgtatgtagtgatcttgcgcctctgtttcgctgaatgttcaaaccgtttgaaatgaaaacaggcaacgacaggtaatttattcattgtgagctgtttggtagattcctggtagctttggcaactaccacatttgattttggcactgcttcctaagtgctctggcctcgtaaacctccgcaagcagtccgtgagggtggtgattcctggtatgtggctttccccgttcacactgctctccctccctgggctcatgggccagaaggaggtgcaagagccaggcaagtccaaactaatgtcccagcatgggtctatcgtggtggagacgccatggcaggcttgacaggtgacatcagactgcaggccacctgtgaagatttggtctatgatgcagttacagtggttgggattgttggccgccttcccgacatcatcacctttgcagtgcctgtgcaggacatctaacgctgcaatgaggaactcgtgggcatcctgttgcctgtaccctgctaaatggcgggcatgtatccacaccaggtgcagtaacttatagggcacatgaggagacgggtttccagaatacaactcccgaaacagcgacgacatctcacagaccagacacaactcgggactcggcatctcacatcggtgcctgtcagagagaaagaaatctctcagtatcggcgtgtgggtgagggcctggacaatgcagttcataaagcacgtgttgccaagattgatgagtcctcttaaaccgatcgtaaagctggaggtgattcttcttctcctcgggttgtgccccagcagttctaattctggtttggttgtttcccaggttgggaatttctcaccaaggcctggcactgaacactgctggtgagaaacctctgttgaggtggaggcttgtaatttcaaagcttctccttgctcttctttggcaatttgctcaatgtctttgtcatatacatagtccttacacataaagcagtatatacctccgtaatacaggtctactgctaagttgtgttgtttcgtctctgcgtgctcgtgaatgtgtttctccgtgaagcagccaaagaagacacaggaaaggcaagagtggagtctgttcagatgggtgccacacacatggcagatgcaggactttgccttgcttttcctggtctctggggttccacaccacacgaagcactggtagataacccgcagttcctgcctccagttctctcccaccttaaagctgttcacgtgagaacagcctggtggccccacggcaaaatccacatccaggcatccgcccccagggccgcgccggggccggggccggggcgggggccggggcctaggctgcggcggggtacggagccgggtctggggccggggccggggtcggcggcgcggcgcacgactgcgacgcggagagggatcggggggccgcggtggatcggagggaagggtggggggaggaacctcgtcgctgttgccgccaccgccgctccgcgctgggttctcatcctccagctcctgcttcggctcctgctccgcctcccggaccggctcgggttcgggctccagcttgagctcagcccggcggcccggaccctccgccgtctccaccttcccagcggcgtccaccttccccgccgtctccaccttctcggtggcgtccaccttccccgccgcctccgccttccccgccgcctccgccttcccctccaccttcgcctccgcctccaccttcctctccgccttctccgccgtctccgcctcctctacctcctccgcctccactggcggcggctcctccccctgctcgcagggctcgggcggccactgggcgtggcggcgcgggggccacgcagacctggggtgtcccccgcccggcctgagggagcgcggtggctgtggcagctggacccaaaagggactttcactgaaggaggcggcggcggaagcaggcgacgcccccgggaatcctcccgccgaagccccctagtggaggctgcttctgcagccaggccccgtttcctttaattcagtattttccaaacttgcttgttcacgagaatcacgtggggagcgtgttaaaattacagattccttggctccacccgcaggcctactgaatcagaatctcgaagggaggtactccggaacctgtatctctaactagggccccagaggctgcttatgatcaggcaagtttgggaaacacagctctaattcattgaggctggcgggaagggg

SEQ ID NO: 43824 - DNA, 2300 bp, Homo sapien
taagctccagtttcttttacttcaatgacaaaaaaaaaaatcaagcaaacaatcaaacctttccttgaacaattactttagattcaccttttaaaagatgaattccaaaagaggattgccttgctcagaaacctcaattctttctcagtcactttttgaattaggtataaatcttagtccaatattcaggatgctccaaaattgggccccaatttaccttctgggtattatcttccacaattcccctgtacttccttaccctaaacttcaaccacataggactactcacgggtcctcacatataacttcctgcctgctcacctttgccaacggtgttacctccacttggatttacctttattagaggcctgtactgatattttctagttatttgtggctatcccatacaccatgagtgcctgaaggaagggactgaatgttaccagctcagaaagcaaaaaaattttggactgaaaaaataaaaatccggccattcatcaggccggaataacacacagataaaaccagatgcaaatttaacagagaacaatatttctttggcggacatattgcagctgtaaagtggtaacgatgtttttatttcagtgaccaccacttttttattcactgagagactttgttctctaaaatcgtagattatcagaaacttttctgcttgaaatcgtatcagtaagaatgaaacatcccacatgcatctggaggacataagtttctttgacacagagaagcagcctcaatttccaacccaggtgcagagcttcagataaggggtatctggacacaacattccacatctatctttattttgtggttcccaaggaaacacaactctgggttcactttgcagttcagacctgatggtgaccccaaatgacagtactgctttgctttgagcttaccaaaaacactgctttgtttaaaattcacctaaactccactcttctctccaatcctataatgactccatgtttttctgtttgatgaaatgcctaccgtgtgcagtctctcatattgcaatgggtcaaagcctgactatgtcggattacaaatttgtccccggtagccttatgctgattgggctaggataggggtttttaaatccctgaccacttagcttgtccaaagtaggcattccaaattgttcactgcagtagagtaccctggttctagttagattacttggattatatggattccagtctcaggtctgccaagaactaattagctggatcatcttaagtgagtcagtgcaccccatttggcctaagttttctcttctgcaaaacggtgtgctgtttctttcaaacctagggtaagggctttggagtaagttagacctaggttggattcccagttctaccacgtactagtcctgtgacttcagcttttctgagcctctgttttgtaatgattaatatggagataatacagtactaacaactgcagtatagtttttgcagcgttgctggaaacatcaagttggctgttaaaagtatcactacgtttgatcactattcctattcctactattatatgagtttagacaagttacttaacctttctgtgcctgtgtatttttatgagtaaaaatggagaaataaccctcggggttattgtgaacaccaaatgagacgaaaaaagtaaaggggttaggagagtgcctggcacataagaagcagctcaaattatgtgatctaatgttattagtattagatttctactactaattactctgtgggccgaaagctcaggatagacagtttcattctaaggacaaaccttctccccagcaaaaaaaggcactgcaagctggaaatagtgaaacacaatggggcattgcgttttcaaaggcaactgacacgcccagcactgggataggacccgcccgcccagtcctcattaaatatggcagcgagcggggccgacgtactgcggctgcgcaagttgaaactcctcctggcagctcctccccggcgggcctcccctcatctcggctgggtagaggtgccgggtgtgagctcggcgtggcgcgcacgcgcagacgctggctgggctgagccgatactcgcgaggcgccctgtcacatgagccgcgcgcccgcttcgctccccctcctccccggctgggctgtgtgaatgaagctctgccggctacgtggggcgctcactcaacttggtgtcctggacgccagagccgaccgagcgcgctgcccaccggcggcggacacgggctccgccgctccggacctcggcgacaggtaaaggcaaacgggctgtccc

SEQ ID NO: 43825 - DNA, 2300 bp, Homo sapien
gagatggaaatcttaagaaagaatcaaaaggaaatgctagaaatcaaaaacaccataacagaaataaagaatgcctttgattgattcatcaataaattggacacagcagagaaagaatgagcaagctggaagaaatagcaacagaaacttctgaaactgaaattcaaagagaaagaaaatggaaaaggaacagaatgtccaaggactgtggaacaattacaaaagacatataactggaataccagaaggagaagaaagaaatacaagaagccaggcgtggttggttgctcacccctgtaatcctagcactttgggaggcctaggtgggcggatcacgaggtcaggagttcaaaaccagcctggccaacatggtgaaatcccatctctcctaaagatacaaaaaattagccaggcatggtggtgcgcacctgtactcccagctactcaggaggctgaggcaggagaatcacttgaacccaggaggcagaggttgcagtgagccgagattaagccattgtactccagcctgggcaacaggccaagacttcgtctcaaaaaaaaaaagaaagaaagaaagaaagaaagaaatagaagaaatacataaagtaataatgactaagaattgttccaaattaatgacagataccaaaccacaggtccaggcaggaagctcacagaacactaaggaggatgaatacaaaaaaatctatacctacgcatatcatatccaaactgcagaaaatcaaaggaaaaaaatcttcaaagttgccggggtaaaacaaataccttaccttttacctatggaggagcaaggacagaattacagcagacatcttcagaaatctcttcaagaatacagagatagacataacatgctactactagtcaaaacaaatgtggagtaggtatattaatttcagacagagcagacttcacagcagggaaaattatcagcgataaagaggggtactgcataatgataaaggggtcaatactctaaaaacacataataatctctaataaataagcacctaacaacagcgtcaacatatgaggcaaaaactgatagagatacaaggagaaatagatgaatgtactattatagttggagacttcaccacccctctattagtaattgacagatacagcagacagaagatcagtaaagacacaggtaaaccgaacagcatcatccatcaactagatcaagttgatgtctataaaacacttcatttaacaacagcagaatacatattcttctcaagctcacacagaacattcactaagacagaaaacatttgagccataaaacatactttaacaaatttaaaagaacagaaatcatgcaaagtatgctctcagaggacaatggaattagactagaaatcagtaagacaaagcttgaaaactcaaatacttggagattaaacactcttctaaatatcacatgggttaaagaagtctaaagaaaaattaaaaaacattttgaactaaatgaaaatgaagaaaccacttatcaaaatttgtgggatgcagtgaaaccagtgcttagagggatatttatagtattgaatgcatatattaataaagaagaaagatctataatcaataatctaagcctccaccttaggtaactaaaaaaattaaaagaattgaatccaaagtaagcagaagagaagaagtaataaaacttagagcagaaatcaatgaaactgaaaacaggacatcaacagagaaagtcaacaaaaccaaaagctggctcgttgaaaagatcaataaaattgataaacctctagcccggttaagtaagcatgaaaggcctgccggtggtgggagccagagaactcaggaggggaaaaggaaacgggatgacagagagagagagagaaacagagtgcaaatgagagagagataaatagatggaaagagtaagtaagagagaaactggaagagacagaaatcaaagaaagacacagaaggtgaaactacgaaaacgaagagtgtaaaaggaaggcagaaagttaaggcatgttgaagattgtgaaagttgtaagaaaagttatgaaaaggggctaatgtagggggaggagccaagatggccgaataggaacagctccggtctacagctcccagcgtgagcgacgcagaagacgggtgatttctgcatttccatctgaggtaccgggttcatctcactagggagtgccagacagtgggcgcaggccagtgtgtgcgcgcaccgtgcgcgagccgaagcagggcgaggcattgcctcacctgggaagcgcaaggggtcaggg

SEQ ID NO: 43826 - DNA, 2300 bp, Homo sapien
ttgtctggacccaggtttcctgagctgacccgactgcccgcagtttgatggcatttgtttagatgagactacatctttaaggcttctgtgcccggttaaaaatcttcctttctcccaggctggtccaaaggtctggtcacgtgactccaacagtgacatcacattctgaccgccagggaacactggtagttctttaggtggcgtttgttgctgtgaaaggcagagaatgcagcaagtgcccttctaaagcacttcagactggggcttcttttgtaaaagctccccaacctgaatgaccaaatgcgggctgccaaggttatttcttccttgaggcagaaaaaaagaaaactgtgattgaaggtaagcagacttgagcctgaccaaggactgaagcatgccccccgggagcaggggatctggagaattgcaagcagtctgttgtaggattctaatcactgcctgctctttgagaggggcctgacaattgcgtttctaaggaaaccagactacaaaggaggatgatgcggtgctcatgttacctagtgatgtaataggattctttctttcctgctagaagctgttgcagatcttcattttgccttaatatccttaaaggtgggggcctcatttgatatatagtgtatcattagatagctatcagatgatttttaaaatcagtttcacaaaatcctatttttccccttctgaaaggagaactcttaaaccagagcaaattcaactggagcattaacctgccttaaaaagtaaatatctggttgtttggtgtcatgtgttcatgtcagcattggacttgagaattgaaacagcttgccctcccccacctccacacacacatactttatcctctttctgccctcatttcctagctggctttttccctctaagctctcaagaaacacatcagctttcatctttatcagtatgacactgacatgataggaaatgctgggctggtgattcagcagccatccattttacagtcaggtacgaatgaagatatggaaaggactttggttggggtttaagattaacttgttcaccttttccactccacccccaccccgcccccaccctacagatgatttggactctgcagagctttttctttcaaatgtgcaccttgcctgtgaaaggcatgctgacttaggtattcagaagacttacaattggtaaaccaattgtaagtacagcttggggtgttccttcaaactttccccatgacattgctaaagttgtctgtttggagtttacagtgaagatggggatgcagatgggaggagagggagtcagctcaggcccactttggcctcctctgcagagggattcattaccaaacagtctggaggaagccttgtccctgccaaggttggtgctgcaaatgtgagctttggctgggtgaattaaatgatggcattactctgcacttttccccagtgtgcatttgcatagattcctcagtactgttttgtattttgtgtttaatagcaaaatcttattccatcagatgatgttgctgaaatattttgaatcaagtttaagccttgtgtgagtatagcttgtgagtttaaaactttctcccccattcccaccgttcatcaaacaaattttggttcagctgatatatactgattcttggatatgtgctagacactgtagagaagggaacgatgaatcagacatcaggctaccagcaaagagcttgtagtctagaaaggaagataaagcatgcacaaaagtaattgtaatagaagtacccaaagcaaagtagataagggactatgatgggtgggcaggtggatatgtttcttgcagttgaaggatcagggagggacatttcatcactgaatcatacactgttctttaaatctctgcttgtaaatcttagactgtgctgacatacttagagttcctacaagcctgttacatcagagatcaagtcttatacctattgaagggaaatttgtacattccagccaacttaactcgtgaagaggcccacatgctttatttggagtccccagccaggcaaaaaccacttcataggattgaattattgccttataaatgtaaaatggttcttgatgtgatatggctgcaagtgcctttgacccttttgtctcccttccataaactgaaatacctaagctgctccaacctcctttttgtcttttgtttcataaatcctttcccattgcacatcaactcctgtctctctttgtactgtcactctcatctgttgctttccattcacactgcctttagccactcatcattttgtg

SEQ ID NO: 43827 - DNA, 2300 bp, Homo sapien
gcagtgcctggttacacacaacgggtaagaagtcttgagtgaagtcaaattgaattgtgggagaaagagaatgcagagatagaaagaagtagaaagaagtagaacccagtttaaatgaacattagtagcacttttaggacttcttgaagctctgagatgaaagtggataggtttttttaaatcataattaatgtaaagggagtttgggaaagaacatgtgtttgagagatgtgaactgctggttgcatattataaataacccagttcctccctgacaaaggaaacacctgtgttttgtgcataggcagcactgaaattacagtagcatcaggtaatagtgtatttgctgggtgtttgttccctacaatctccttattattacttgaggatgagaaaaccaagtttcagtgaggtgagatttatacaaagttctccagctaataaatagtagagaaaggctttaaacacaagtcttctgactcccaagcccatggctctttccttcctgggatagttcttatccagtaaagggaacccttctatttttattggaaaagaaaggaggttgaggagaggggtggatttttttcccaaacatgctacgttaatccagcaattatataagaatttcacatctgaaatttctaaatggtgtaacagatgccttgcaggatttaaatcagtaaggggagttccctaactggttcattcaacatctgctgaatccctgctccatgtaagaaggtactccactggattccagggagacacaaaaattaataagacccttctgtgccctcaaggagcagacagtgttttaaggaaggcaagaacctagcagtggttatagtacaatagcaaagaggacaagtgccactgaggaggcctgcaaagaatgtgcatgctgttgctgtgaggagggcagagttcctgctggctcatagaatcagggaaggtgctctggaataggggcgtttgaactgggctgcagtagataagattcagatatgtagcgaagagtatttaaaccagaggaaatcgcagggtctgagacctagaggtagaaacacttgcatacatttaggaatccacacatcatcctatttgcctggggcacatgtcctactcctgtgatctcatactgaaagggcagctagtgatcaaagacaaagttgaaaaggactgaggaggacaagtatcacctttgggaatgctattttaactacagatttatttttgtttttttgtattgtgtttgtcttttaggcgattgcttggaatcattaccaaaaaggatgtgttaaagcatatagcacagatggcgaaccaagatcctgattccattctcttcaactagaatcatagagttctggatgtaaagcgggaaggacattacagaccatggatatgttgtattaactgggtacccaaaacacattttccatatttggatggtgaagtcacattagtgtgttgtctctttcctacaagttaaccagttgcactacataatctctggaaattaattttctctttaggagaaattatagttaggcttccatgatgttacattaggaagatatcatgaaagaataaataagattgctatggtttaattatatttgctttttaaaagatttttttaacttaaaaagtagttagccaatatgcaatcactgaaaactatgcaagagaaattccaaccgtcctgacctataacctgtaggaaaccgacgaaaaagtcactcttttgggatctaactgttgttactggaagacgaagtgtaaactaaggggctttgcttttcaaaccagagaaaggaaagccagaaggaaaagagtaatggtattttctagactgtgaagattcagttcaaatgttatccttgttcctgttacaatatttagcattattagtttgttatgtgtgtatgtttatgttaattttaatttctgattataagacaatgctgctttggttaatctcttctaaatgaatttagagagattgacttttatagcttgcttgttgctggtactcttttgaagtgcacaaagataagttatagagctttctccttgtctgcaaaaacggtaattttccaggtggcatttgttagctggtagacaaggactttgccgtgaatttgttagtagcaaggaatgatttcttccagcttccttgaaatgaataattagtaaacttctaagcaaagtcaatgactaggagtttcacatgtttgtgaggtcctaactaattctcttacccagatgccacctccatgaatgatggtgcttta

SEQ ID NO: 43828 - DNA, 2300 bp, Homo sapien
aaaagcaacaaagaccctcttcatgatcaaactttagtcaggcttctctaagcccacttctcagctaggcctcaactttggcctataagaactgcaactttcggcacaatttcatccacctgccccccaatacatacacacactaagagacttgaacaaacaccagcgtagtttctatcagctcaaggccatttccctaggatgacaatctcagcccttttaaaatgccttcctgagacagttcaaagctgccaaaaggccatttccctagtatgacaatcctagccccccttaaaatgccttcctgagacagttcattgctgccaaaagaatttactgtttgttcaggccaaaacctgactacaggccctgactcccttccttacagcatgtactttagaaaacttgcaattgtaaattctttctctcttcttttaagatgtatcttctacaacccaggactgtctttctcaacaacctggaagccatccctttgtaatgtaatgatcaagaaaaatagggtccatgtctccctgtctctatgggaaggtaggagcttagctttcttttcttttctttttttgattttactttctttcatttctttctttatagttcttaattatgtttttctttataaacctgacattgtgaacatagggaacctaactttaataagcacccattagcaaacacagatgccccaatacattgaccaagctcacccccactcaatgtccttcggtacttttccttagcacaccctgccttttgtttcagtggagttgagatctgttcatcagaagtctctctcctctactgcagtggcctgaataaaatctgtcttgccgcctctaacaaattccaggctctgtttctgtttgacaccatgagctaacaggatcaaaataatatagcggagttagagatgcaatctcaggggcaacaggaaaaagaataaatggaggtagaaccaagaatatggaactcttttaggggatcatctcaactgattgttaattcagatgcatttatttacatgcatgcagtattaaagtggagacatggagaaaagacaaggaaagatgagacttgggcagagtgagagacatttggttgtgggataatatttccaaactggggctaaactcagtaagatgagatgaaggcatctcaaagtgtaatggataaatctctaacacatactgcagccaacaaaccagcactggccagattgaaaagattaagtggagcttaagtcttttcatggcctagggagtctgtaaaagacagaccctgtctcaactagatcagcctttctctggacaacttatttctcatagggaaggtcagagcctgctagaccacttagagcacacagaatccttagagccctccatctttgtgctgtcactgttctctatagaaacggtgatgtcaagaagaggtaactctggtaccagctggcagtcaaggctgtaggagggcatggagagttgaagaaaaaagcagtatcttgaggcagactggaagagtcatcacagcatccaaatcaacaagaaaacatcattccagggtcctacatgatggcgtactctgatactacaatggtagggacatctgacttctttttgactagctaagggggcatcttaatggtgaggtgaaactacagaagctgctgaggcagcctccaagtttctattttcatacttttatttgggatacccagaaaagattttgatcaacatttctctgtttctacgtaaatctaaagatctcttgcaatataactctgattctctagtaggggtatgattagattgttctggaggtctcgcaggaaatgaaaagagaagggatatcttgatggactgtgagccagagaaaatgtgagaaaaatggtgtgtaccctcatagagataacagaaaaagtttgtcgcaccacaggcagcctgatgtgcttttgatgggaataggtttctgagtttgccaacatgcccacctttgcttaggttgtgacagttcaggcattgtgacccaacaaactctgttgccacaccccagggtcagaggcagcaggggaaagcctggcccctcagtctggtccaacagctgacaggggtggcagccaactgcaggtgcccaagaacttggcacttctcagttccatctaaaggggcacatctcccttctgggtgtcacgttttcagccaaacatctaaaagaacttcatcatcaaggtaatgagttcataaattttatttttcacagttcttttggacttggacttaggctgt

SEQ ID NO: 43829 - DNA, 2300 bp, Homo sapien
ccttctcttttcatttcctgcgagacctccagaacaatctaatcatacccctactagagaatcagagttatattgcaagagatctttagatttacgtagaaacagagaaatgttgatcaaaatcttttctgggtatcccaaataaaagtatgaaaatagaaacttggaggctgcctcagcagcttctgtagtttcacctcaccattaagatgcccccttagctagtcaaaaagaagtcagatgtccctaccattgtagtatcagagtacgccatcatgtaggaccctggaatgatgttttcttgttgatttggatgctgtgatgactcttccagtctgcctcaagatactgcttttttcttcaactctccatgccctcctacagccttgactgccagctggtaccagagttacctcttcttgacatcaccgtttctatagagaacagtgacagcacaaagatggagggctctaaggattctgtgtgctctaagtggtctagcaggctctgaccttccctatgagaaataagttgtccagagaaaggctgatctagttgagacagggtctgtcttttacagactccctaggccatgaaaagacttaagctccacttaatcttttcaatctggccagtgctggtttgttggctgcagtatgtgttagagatttatccattacactttgagatgccttcatctcatcttactgagtttagccccagtttggaaatattatcccacaaccaaatgtctctcactctgcccaagtctcatctttccttgtcttttctccatgtctccactttaatactgcatgcatgtaaataaatgcatctgaattaacaatcagttgagatgatcccctaaaagagttccatattcttggttctacctccatttattctttttcctgttgcccctgagattgcatctctaactccgctatattattttgatcctgttagctcatggtgtcaaacagaaacagagcctggaatttgttagaggcggcaagacagattttattcaggccactgcagtagaggagagagacttctgatgaacagatctcaactccactgaaacaaaaggcagggtgtgctaaggaaaagtaccgaaggacattgagtgggggtgagcttggtcaatgtattggggcatctgtgtttgctaatgggtgcttattaaagttaggttccctatgttcacaatgtcaggtttataaagaaaaacataattaagaactataaagaaagaaatgaaagaaagtaaaatcaaaaaaagaaaagaaaagaaagctaagctcctaccttcccatagagacagggagacatggaccctatttttcttgatcattacattacaaagggatggcttccaggttgttgagaaagacagtcctgggttgtagaagatacatcttaaaagaagagagaaagaatttacaattgcaagttttctaaagtacatgctgtaaggaagggagtcagggcctgtagtcaggttttggcctgaacaaacagtaaattcttttggcagcaatgaactgtctcaggaaggcattttaaggggggctaggattgtcatactagggaaatggccttttggcagctttgaactgtctcaggaaggcattttaaaagggctgagattgtcatcctagggaaatggccttgagctgatagaaactacgctggtgtttgttcaagtctcttagtgtgtgtatgtattggggggcaggtggatgaaattgtgccgaaagttgcagttcttataggccaaagttgaggcctagctgagaagtgggcttagagaagcctgactaaagtttgatcatgaagagggtctttgttgcttttcctataccatccttttgtcaaggggcaacttttgatgattaaagacaaagttggagctcctgtgtctggctcatctctgtggaatatgaagcaaaggaagaaaatgtttacctattctccaagcacaagaaatcatatctctaagagattaaaaataaaacaaaacaaaaacaaaaacaaaaactctgtgtctcccagcccggaaaggaacaaccatgattcatgcctggaaaatgtcttagtaatccccagatgacaaagagagaactactatggatgattagagcactctcccagggcacctgaatcctgtcatcctggaggctaaccaggagcaggtaagggcagcatttggatgtgaaaccaatgagcaaaatgtaagggaagaatcaaggcagacctggctcagtcataggtcacggtacatttactgcctcttc

SEQ ID NO: 43830 - DNA, 2300 bp, Homo sapien
aaaaatgatgaccaaggcttttgtgtttaatatctcaatatttggctattaaaggcaaacctaagtgcagactattcacacaccttcacacactaatacaatatattccttactttgactatttgaatatcccttatccctcacctgccctccaccccctctactcagtacagaccaatttgagagcctcgagaagagaaggaagaggcagtaaatgtaccgtgacctatgactgagccaggtctgccttgattcttcccttacattttgctcattggtttcacatccaaatgctgcccttacctgctcctggttagcctccaggatgacaggattcaggtgccctgggagagtgctctaatcatccatagtagttctctctttgtcatctggggattactaagacattttccaggcatgaatcatggttgttcctttccgggctgggagacacagagtttttgtttttgtttttgttttgttttatttttaatctcttagagatatgatttcttgtgcttggagaataggtaaacattttcttcctttgcttcatattccacagagatgagccagacacaggagctccaactttgtctttaatcatcaaaagttgccccttgacaaaaggatggtataggaaaagcaacaaagaccctcttcatgatcaaactttagtcaggcttctctaagcccacttctcagctaggcctcaactttggcctataagaactgcaactttcggcacaatttcatccacctgccccccaatacatacacacactaagagacttgaacaaacaccagcgtagtttctatcagctcaaggccatttccctaggatgacaatctcagcccttttaaaatgccttcctgagacagttcaaagctgccaaaaggccatttccctagtatgacaatcctagccccccttaaaatgccttcctgagacagttcattgctgccaaaagaatttactgtttgttcaggccaaaacctgactacaggccctgactcccttccttacagcatgtactttagaaaacttgcaattgtaaattctttctctcttcttttaagatgtatcttctacaacccaggactgtctttctcaacaacctggaagccatccctttgtaatgtaatgatcaagaaaaatagggtccatgtctccctgtctctatgggaaggtaggagcttagctttcttttcttttctttttttgattttactttctttcatttctttctttatagttcttaattatgtttttctttataaacctgacattgtgaacatagggaacctaactttaataagcacccattagcaaacacagatgccccaatacattgaccaagctcacccccactcaatgtccttcggtacttttccttagcacaccctgccttttgtttcagtggagttgagatctgttcatcagaagtctctctcctctactgcagtggcctgaataaaatctgtcttgccgcctctaacaaattccaggctctgtttctgtttgacaccatgagctaacaggatcaaaataatatagcggagttagagatgcaatctcaggggcaacaggaaaaagaataaatggaggtagaaccaagaatatggaactcttttaggggatcatctcaactgattgttaattcagatgcatttatttacatgcatgcagtattaaagtggagacatggagaaaagacaaggaaagatgagacttgggcagagtgagagacatttggttgtgggataatatttccaaactggggctaaactcagtaagatgagatgaaggcatctcaaagtgtaatggataaatctctaacacatactgcagccaacaaaccagcactggccagattgaaaagattaagtggagcttaagtcttttcatggcctagggagtctgtaaaagacagaccctgtctcaactagatcagcctttctctggacaacttatttctcatagggaaggtcagagcctgctagaccacttagagcacacagaatccttagagccctccatctttgtgctgtcactgttctctatagaaacggtgatgtcaagaagaggtaactctggtaccagctggcagtcaaggctgtaggagggcatggagagttgaagaaaaaagcagtatcttgaggcagactggaagagtcatcacagcatccaaatcaacaagaaaacatcattccagggtcctacatgatggcgtactctgatactacaatggtagggacatctgacttctttttgactagctaagggggcatcttaatgg

SEQ ID NO: 43831 - DNA, 2300 bp, Homo sapien
aaccccaagaggccatctgtaacccaagaggccatcttactctgtgactgctcagccttcagcccttctaactacatgttgggtttagtaaaaagcaaaatttaaatgtgggatatctgccccttctaaggacagggattccattaaggtgtgagagccagaaaagtgatctccagtcctggacttgctggttggtcagatctggcactttaatgcaccagatccaataatgagatctggcacctgtatatttcagtcctgaactcttagggttaaaggcggcttggctacttgagtgtgggataggggaaaggagaacaagcccaaggagggtgaagagagtgggctcctaaggtgaatttactggaaggaggactgccacgtgagggaattgatagggctcacttctcctggtcttcccatccccagagtttaaggacggtccctgcactagcttagtagctgccaagcagtgttaacacatctctggaaaggtgggcttaggctgtgaggctgcagcgaggatctgggaaatgcagacctcaccagagattctggtctttggagggatttaggtgaaactgtgctcttatggtattatttattgctgagacatagtataggcaacagaaagatgttgcagattctagaaaattctggctaggtcagtgtccgttggcaaaagaagagggaatagtgggggatatggtctgggagtagatggctagagaaggggctgcagaaagaaggctgctacccacaactgcagcattatgtgtatgggagataaattcacttgtcatatttcaaatcaggtttacaggtatttctcccccgtccgctccccccacccagctgtggcttaacaggtagtcttctcaaattttaattacaattggtaatatattggcgtctaaagtctaggtctgactaagatgatggtttgtgtgtatgtgtacgtgactataacagaaagagcttctaaagtcttccgatgtggtgggaaaggtgctgcgctaggcatcagtcgttctcttcccaagagaatctcccatctctaatgtcagactgcttcaggaggtgaaaagggtgtgggtgttgcagtgaatttccccagcccaagacacacacacacacacacacagacacacacacacacgcgcgcgcgcgcgcgcgttaacaagtttggggggggcggaaaaacaaactcctgctgatggctgggaaatccagctaaaagcacaaggcaggctcctatagcataggcgagccagacagacgcccagatagcctcagctcccgagcgcgaagcccagctgctgccggggcactctcgacttgctctcggggaggctgcaggctgcggaaagccggggcgccagcctccctcatcacactcctttcccgaatcacctcaaactctgtacccaacggcaaagctcagaaatgcaaaaaaccgaagagggtcaaattgtacttcaatccaaaggaggctgaacacccgccccccccgcacccccccccccccaccacacacacaccatgccgcttaatttcttttcccggcttagataaaaagcattacttgcccatcgaggcttggagatggggggcaagaggttggtccgaggctaagctcacctgctgctgaggtgagagagcagacacaggatggaagctattctgaccagcagctaagtggttgggggattgcaaagaccctcaacttcgcctctggcttttttttttcattcgtgtcactaaagggttaaacacggcaaggctccagcccgccccccaacctccacgccgctccactccccctcccctttttgtctctcccctcccctcccgcgcgtcgctaggaggtcatcaagcgctctgcccagtccgcgttcgcaagcccctctgcttcccgcccatcggacccgtggctgcttacgaagaggtgtgcgcacactgaggggcgtgttccagcatagggagacgctgagcgcccacgggttagacctcagagccaagccagccatggagtgggatgggggaaagtttggcaccctgcgaggggctgccggactggagtgggcggggcgcccgagggtactttagccttccaggcttagggactcaggctgcccagacctgaagcggtgtgcggccatggaccgcggagctgccgcagcccagggcactgccccgcctcaggatggagagcagcccgctgagtctccagagcctccgccgccttggccgccgccgccaccaccaccggctccgccgccggctccgccgctgctctc

SEQ ID NO: 43832 - DNA, 2300 bp, Homo sapien
ttatttctgttgttatcacagtattgaagcatggtatttttctactcagaaggatctcaggatcacagccctgccctttagctcactgatatatttcttcctctctggttactcagtggcaacatcacatccagtctaaccccatgtttagaatgcagaaaaagtcaacaataggtgtaatctcaggtatagacctaagcagtatacagagtctagttctggagtctagcctgatcgaaggtaagccattctttctagacttcttccaatcttgaattctgtctagtattttcatcttacttctagctgatagtccaatctcacaccttcatgctcagctccctggaaagcaagggccttggtgatctgctctccaaggcaacctcaaagattagactcaaatgtattccaggaagcaactctgacattgaaaagctttcttttttcgtgatccatattctgttcacattccaactatcctccttctactcaagatatccattgtggtagagtagaaagagtccagctttggcattagaatgaactgtgttcaaatcctggttctgccacttattcaatgaacctgggctactagctcaacttctgaggtcattttcttatctgtaaaatgggaacagtattatcttgcttgcagttattgtaacttgaaaataataaataaaagccactaacaatccaagaagttattaggcagaatcccaggcccaccccaaacccagtgatagcagtctgaattttaactagatttccaggagattcatgaacatattacagcatgggaagtactgacttgttgaaaacatattcagtacatggtaaccattattatagtcctgatctactcaattcattttttccttatcccaggcatattcttgctcttctcgtgttgctcacaactacctgcctggatgaatttaggaaagttgcaggatacaaggttaaaacacaagatcaaatgaacaatccgaaaatgttattaagaaaacagttccggccgggcatggtggctcacgcctgaaatcccagcactttgggaggccgaggcaggtggatcacgaggtcaggagatcaagaccatcctggctaacacggtgaaaccctatctctactaaaaatacaaaaaattagccaggtgtggtggcacgcaccagtagtcccagctactcgggaggctgaggcaggagaattgcttgaacctggaaggcagagattgcagtgagctgagaccacaccactgcactccatcctgggcaacagagtgagactttgtctcaaaaagaaagaaagaaagaaagaaagaaagaaagaaagaaaagaaagaaagaaagaaagaaagaaaacagttccatttacaatagcatcaaaaagaaaaaagtacttaggaataatttaacaaaagaagtgcgaaacttttacactgaaaactataaaacattgttgaaagagattagagaagatcaaaataaatggaaagacactccatgttcatggattggaagacttagtattgttaagatgaaatgtgccccaaattgatctacagattcaatccagtgcttatcagaattccagtggcttccttgtgtaagtttacaagctgattctaaaattcatatggaattacaagggacctggaacagtcaaaacaatctttaaaaagaacagttggagggctcatacatcccaacttcaaaacttactgcaaaactacagtaatcaagacagtgtggtacagacacaagggtaggtgtataaataaatggaattaaattgagagtccagaaataaatcctcatgtatatggttagttaatttcaacaagggtcccaagagaaattgaggagagaatagttttttaacaaatgatgctgagacaactgggtatctacatgggaaaaaatgaagttttccttaaatcacatgcaagaatcaactcaaaatggattatagaatgtaagagtcaaaattataaaattcttagaagaaaacattgtaataagtcttcctaatgttaagacgatttgcacaagtgatacaagaaatagaaataaattggagtaaatcaaaattaaaaacttttgtgctaaaaatataccatataaaaaagtgaaaagacaagcaacataatattaggagaaaatatttgcatatcagatacttcaaaatatgaaaaggactcttacaactcaatgataaaaataaccaattaaaaatgggttaacagattgtaatagacatttcttcaaagaaaatatgtgttttagtatgcttgggtt

SEQ ID NO: 43833 - DNA, 2300 bp, Homo sapien
accgtcccctgagcacaggaggtcatacttgatcatgttatctggaactcagctccgctaaatgggagcatatgcccttttccctccaccacctctcccaacctcttccccaaatcccaaactggctaaaccgctcaagtttctctctcatcttccctcaacgaaggatttcttgagtatacactatttgtgcccacctgcctactcctcatctgatgacatcccaactctcatcttcgcaccctttctccctacctcagccagctccatgaacatgcttgcacctctagtcacaatttcttcagcctcacctggccactggcagggtcacactgataacaaaccagttgctctttattttgttaggaagtggggattggcaaacttcttcaggcaagcgtttgcatgggctgggccactgagcaaaaggagaaagacatttggcgaccagaagagcaagggcggccggacacccaggcctgaggaatgaaatgaaaagagattttaacctgatgcattttttggaccagattatgtcctggtatattgccactcagaatgtggttatcacaccaggagcatcagtatcactctggagcttattaaaagtcagaacctgggcctcgctgaatcaaaatctgcattttaacaagatccccaggtaattagtatgcccactacaatttgagagtgctgttccagagtgtactgggtttggcatttgagccttctcttaactagtcctttctcttttatcttcatttggattgaagaaatcagttttcttattgctaatggtacctcgctcattattattttgcatacgggtaatattaaaaacagatagcatttattgagtgccttttacatgccaggcatgttttatagatgaggaaaccaaggttctgtgacatgcccaaggccaaacaactagtgaatggtagagctgagactgtaagccagatccatatgctcctcaaagctcccaaactttcccctatacagttgataaaagtcaacccagactctcctgtgagatacagagggaagaaaggggaaggggcctccaggcatgatttccccagagaggaaaggccctagcatacatacttcatgtcctaagggagtttgcataagccctctcaggagccagaaattactggaattgaggccagaggccaagggaaactggagtagggaattgggagtgttaatgaaaggaaaaccctgactctaattccccaagataaattaaatcctggtgcctgagcctgggcttagggggtgcaacaaatccacatagggctgctctggattctggctactgcgctaatcacttagggcatcatttggaacctcagcctggggcctaggactactacatcatagcatgctagagtgggaagggtcatttgtgacgattgaattcaatgttttattttacagggaggaaacagaagcccagagagtgggagtaagttgccagaggtcagagtgaattcatggcaaatccagggacactgaccccaaacaccacatttccagcattgctaatgggcaccttttctggagttgaagtctctggtgtaaaattgggttttctttggatctgctcaagtccgcacaggaagtgcagacccctgtaaatacatccgaaaatgtttgtgagccttcgtatctcaccaggaccttcaccttggaaaatctctcagtcacttgcccccagctatataaaatcagctggagtgctactcctctggacctggaggctgctagtcctggcttatctgtacttttctggggcccagaggacctgcagagatggctgggtggggtcaactcagtccaggaagcacaggaattcttttaagtgtatgtgtctggggtatttttctctctcacttacgtgtatttttaaaaattctttttagacacccgctttatctttcccaaacatcatttccttgctcctttcctgagttctagcagtggctgggggcccagcttccttattggcctctgagctgccgagggggtgggccagggctcagaggaggttggagtagggagcaggggggctgtttatgctgctggaagtgcctttcatccttccctttgccaccagggtgctggctggttcctggagcagcgtcttcactcctatccagctcttgacactggctttcgttccctaaggctgtggccatatctaggtccatccaggctgatggtcataccttgccttcagtgctactccttcctgttcttagaactggaacctgactgtgcctgagcccctt

SEQ ID NO: 43834 - DNA, 2300 bp, Homo sapien
tctcaacagtcctgggaggtaggaaagtcagggcttattagctaaagtttacagaggaagaacaggagactgaaaagagttagctcagtgatttgcccaaggtcacccatctagttagtgacaaggccagggctcagatgtgtgtctactgcttccaaacgtctttcctctagtctagacacataattctaatagtccttgagtgatgactatatatcctgtgaactgaactttacagatatgctgggactgaaacacgctggattctaccaagttacaatcatagaaatattatccgaaaaagaaaaaaaatgctgagtttcaaggtggggcagggcaaatgaatgttataacataggttaacacaagtaagaatcaacaagttgagttgccattttatcaaattttctgctttcaaataaggaaaatataaaacaataaacatgatcaagacggtgtttgtaggcctaaaagatcgaggatggtttcccatgtgcatcatctctaaggactttaaaaaggcaggctataaacacctaaattgccattttattaaagaaaagtcagggcagcatcatatatgcagacagtccaggggggtgctaagaaaaaaggattgatggaggggggtgactttgagagacatttcagtggcctgctgcagcacaccgcaggctgctgtgcgttgaagaggcagtgacaggtgaggaagtagaagtagagagtggaaaccttgaccgcagaaagctggctgtgaaggaaggggccgcagtgtgtttgttggccatgaagaagaagctgcacaagaacaggggaagaaactgaacaggcgagacagagtgggaacatcctgttgagtcacaactgagttgtcaacactttctccgctagtgcgaggccctttaaaaattcactgcccgcatgtggctccagagaaaacacctcaaagagagaagataacctgtccaagtgaaggcagagaaatcagcacaagattcagtaacaaattcgcttttcaggactattattgtggctgtttggtctattacaaaagcccagctcagaaactacaaggtcaagcttgaacagatgtgcagagatgttctggacccagtctaaaagctgattcttcccaaaggcacaacattattaattggccagcttatcaatggatgctctttcctgtaggtttgtttagagacaatactgctagtcataaagtttgctgattgctggcttgctcatctcggtggggcaagtgcaaggccgtgccaggaactccagatgactggaacatacacaagcacagtgctagccatagacaccaacactgagccagggtgcgggggagcccgagcagggggcatcctcaaagtgcttctttatttaaactatgctctggggcaatgtttcataatgaccccacacacctagcgcgtacacacagagcagtctacacacacagcctcactatgtccgctggcctgctggctttgctttccacccctctaggcaaggtccacaaattagcagccttttaaccctcccaggtctccgttctcgggaccttcagaagaaaaaggcagtcagagaaacatgaacgcgctaatcaggaaaccagcgtttcagcccactcagccacgcgggccgtccacactaacgactttcacctcccctcgcctgggctggctggaggggcggggaacccggcagtaaagaggaggaccaaagaggggccctgcttgaatgaaacaatgtaacaattgatgtgaggcctcgcctcgctcccactccccagcgatcctataggcgaggtcccagtgactgcccctccccattgctccgttttcttgtccattacgcgctatccctccgcctctccttctttcttttcttttctttttttcccttctccttttcccccctctctccccctttctccagctccgtgtcatttcctccttgcgctcgctcgctgcctgagcgtctccagccgggagagtaggcggagcagggcggtgcggggtggcgtagagctggagggcgatggtggcggagctgctgggggcggaggcaacgtagccccctcggaaaaggagcccggcggcgcctgagcccagccgaggatggagaaccggcctgggtccttccagtacgtccctgtgcagctgcaagggggggcaccctggggcttcacccttaaggggggtctggaacactgtgagccgctcacagtgtctaaggtaagaactggcggctgatgtcctaacggcgcctaactttgaatggacaagcgggtg

SEQ ID NO: 43835 - DNA, 2300 bp, Homo sapien
ttgtaagtcacagacaaaagtatctaaaactgctactgctttagcaatagcattgctgaattgtatatcttcaaccttaacagagataatgccagattgctctccaaaattattataccaaatcacactctcaacagcagtgtgagatgttccatatctctctatatagaatctctctatatagaatatctatatagatattctatatattatacctatgttccatatcctcacctgaacttaatagtgccagacttttaatgtgctatcgatccatttaatgtgctatcaatactgggtgttgaatagtatcttaatgttgttttcagttgcgtttttctgatttccagtacatcttttcatacatttgaccatctaaattttgcctattgtgaatcatctgtttatatcccttacttgtatattatacaatacaaccctcacaacagctctctgaaggagccagcagtatagatgaagaaactaagtctgggagaaatgttgcttaaagtaacccagctaatgagtttttgagctgaaatttgagtccagatgtagaggacccgtaaacctatgccttttgttttacactacatgccagggcccaaggtcatgttagaaaaaaaaacagaggaagagcacaaataaatttgaacatgtaaccctatgtcttgtgtctaattaggctttgtgcaattaacatagattatttccttgcttcctcacaacaacctgtgaggtaaaacgtgttatctccattctacagatgagaaaactaaggtgtagggaagtgaagaaatttgtcttggaagggttaaattacagctagaaatttgccttggaaaggttaaattacagctagggacagaattgcaactcaaacacagatctgcctgattaccaagtccacgcctgttccacagtaatgtctgtccatagatactcctggtgtaaggtaaaggcctcccacaaatcaagcctgactcatcatctcctagagccaggtcttgacctgcttccccagtttctctccagatccccatatgtttctacttcggtacggccaggactatacctactatctttctgcagaataatggtctgaggcagccttaaaactggccgagccctgctgcttcacattaaccatctgggctaggttagctcccatagattactcttccccttcctcaggcttctctaatgaagcccaataaggatctcaacaccttccaaggtaaaccagaaaattataagtcagagtccttaaacgtggctgcacattaaaatcacttgtgaacttaaaaaaatcctgatgcactagttacaacccaggcccattacatcagaatggtacccaggcattcataatagttaaagcttcccagatgattccaatctacagccaagattgagaaccactgttacggcatcttcttcaagctccagcagccatactcagtagtttccacattttaggttttcataggaacttcttggagcactggtaaagagccagatttctggacgccatcccagagaatcctggttcagacccaggagtctacattcttaataatcaccccagatagtttcactgcagattattagcagacaatattttgagaaatgctgcattagaggcatggaagtaggatgggaacaggaggcctctggccctttaaggatggattaagggactacttttaaggctgtaggggcaagtaggatcaggctgctttttttcattctagtggataagttaaggaagtgggtcctgaaatggacctctccttttaagttacctgagcctctcaataggtactatcttgttctcagcccgggagagcgggaggggcatgctgccttgtcccaccttctgtttctgtttcttttgatgcaaagaggccaagttatgaggcaactttggtccaggagatcctcttagagaaagcaacatagggcctgcctgcctttctttttcttgccccatccttggttgtggagccaggatgcagttatctgcatgaaaggaaatggtcagagtgacgtcccttgggcttgtgttggggcctgttgttgaacactaagcctttcaagatggtcctcctcagtattcttagaattctttttctttgtgaactcgtgcttttcatggaacacagggcccaaatggcagaaggagggcagtcctctattgcccttctggctgaggcccctactttgcccctgattgaggagctgctagaagaatcccctggcgaacagccaaggaagccccggctcctagggcattcact

SEQ ID NO: 43836 - DNA, 2300 bp, Homo sapien
tgctctcttatgacctaagtagttctgcttgtgggcgaatggtctaggatggcctcacccatatgttgggcaacggtttcactgtcagctggggtgaaagggaagaatctgccacaggtatctcatcatccagctagcctggccagccttcctcacattgctgtcacaatgtttcaagagcgaaaagagagaggataccccagtgtgcaagcacctttcagttctctgctgacttctgttcacatttgttattgtcccactggacacaacaaattacatggccaagaccagaaacaatgacagtgtggaaggagatacaggcttccacgaacaaattgcagtttcactgtaacaatctactactacagtgattcctgaattacactgctcatcattggagaaatacttaaatatgcaaaaccagacagaggaatgctgttctcttaaaaaggatttttactatcgttacaaaagtcttagcttttcttgccttgttactatattatagatgaataataaagttattaggccattctcacattgctataaagaaatacctgagactgggtaatttacaaagaaaagaggtttaattggctcatggttctgcaggttttacaggaagcatggtgccaacagttgctcagcttctggggtcgcctcaggaagcttacaatggtggcagaaggcagagggggagtagatgcatcacatagcgaaagcatgagcaagacaggggaaggtgccacttgcttttaagtcaccagatcttgtgagcactcactatcacacagacagcaccaagccatgagggatccgccctcatgatccaaacatctcccaccaggccccacttccaccattggggattacaatttaacatgagatttgggcaaggacaagtatccaaactatgtcagctgtgaaagtttggggaaaaggtaattaaaaaattcccttgctattgtattaagcctgttttaagttgtgggtctccatatccagacttttccagtagggtttcagtctgtgcctctttccatgttataatgtcctattcctcttccctgccacaagtatgcccccggaagggacctattgcagaggcacggtgtgatgtagaactgatactgatggaatagactagaaaatggcacctctttcttgtgagacaaaggagacagtacctggcaattgtgaagcagccctgccctgtggccggagcctggattggcccctctcgaacccagacaccccactagtctgctagttttgctagagtgtctcgtgattcattcaaatcatgtttcaaagctctgagtagaagttcaaccattttgtactactaagtcctaaccacatttttaggaccccttagtattttatttgttttgtggtggttaatagtacactttgggaggccgaggtgggcggatcgcgaggttaggagttcaagagcagcctgaccaacatggtgaaacccgtctcttctaaagctacaaaaattagccaggcgtgatggcacccgcctgtaatcccagctactcaggaggctgaggcaggaggatcgcttgaacccaggaggcgaaggttgcagtgagctaagatcgtgccacggcactccagcctgggcgacagagcgacagagtgagactccatctcaaaaaataaaataaaataaaattgtgaaataggacgggatctccatgtgcatggtttcccaaacaccaagtggtgcttatcaaagagaaagatagagaagggtggagtgtgtggagaataggagaacgtctctgggctttaacgcaggactactagatgggtggtgctctggtctttaaggtgtactgcatcgaagtgcaaatggctgcaacacggaggcgaggagtgtacccatgaggaaactgaggtgcagggaggtcaggcaggttgtgaacaggggtttaagaaaagcgttaaattactggctgcgccaagatgctctgcaaggtgggaacctgttgaagaaataaaactgcatcatgtgactcagcaaagatgcccggctactgtgccaagaatcccgtgggttgtgcagacaacactagggcccaggtcccatgagtaagccagaatggttgatagtgggggaggatgatgacgacgctgcctttgcccctgtcttgtgtgaaacaactgcctgtgggtttcctgcagcgcagtggggagtgagaggagaaacgtcctgccgtgccacagtgagtttgggtcaaaggcacacatggaggcagtcttggccaaagtcacaatgcggtgaattt

SEQ ID NO: 43837 - DNA, 2300 bp, Homo sapien
catggttctgcaggttttacaggaagcatggtgccaacagttgctcagcttctggggtcgcctcaggaagcttacaatggtggcagaaggcagagggggagtagatgcatcacatagcgaaagcatgagcaagacaggggaaggtgccacttgcttttaagtcaccagatcttgtgagcactcactatcacacagacagcaccaagccatgagggatccgccctcatgatccaaacatctcccaccaggccccacttccaccattggggattacaatttaacatgagatttgggcaaggacaagtatccaaactatgtcagctgtgaaagtttggggaaaaggtaattaaaaaattcccttgctattgtattaagcctgttttaagttgtgggtctccatatccagacttttccagtagggtttcagtctgtgcctctttccatgttataatgtcctattcctcttccctgccacaagtatgcccccggaagggacctattgcagaggcacggtgtgatgtagaactgatactgatggaatagactagaaaatggcacctctttcttgtgagacaaaggagacagtacctggcaattgtgaagcagccctgccctgtggccggagcctggattggcccctctcgaacccagacaccccactagtctgctagttttgctagagtgtctcgtgattcattcaaatcatgtttcaaagctctgagtagaagttcaaccattttgtactactaagtcctaaccacatttttaggaccccttagtattttatttgttttgtggtggttaatagtacactttgggaggccgaggtgggcggatcgcgaggttaggagttcaagagcagcctgaccaacatggtgaaacccgtctcttctaaagctacaaaaattagccaggcgtgatggcacccgcctgtaatcccagctactcaggaggctgaggcaggaggatcgcttgaacccaggaggcgaaggttgcagtgagctaagatcgtgccacggcactccagcctgggcgacagagcgacagagtgagactccatctcaaaaaataaaataaaataaaattgtgaaataggacgggatctccatgtgcatggtttcccaaacaccaagtggtgcttatcaaagagaaagatagagaagggtggagtgtgtggagaataggagaacgtctctgggctttaacgcaggactactagatgggtggtgctctggtctttaaggtgtactgcatcgaagtgcaaatggctgcaacacggaggcgaggagtgtacccatgaggaaactgaggtgcagggaggtcaggcaggttgtgaacaggggtttaagaaaagcgttaaattactggctgcgccaagatgctctgcaaggtgggaacctgttgaagaaataaaactgcatcatgtgactcagcaaagatgcccggctactgtgccaagaatcccgtgggttgtgcagacaacactagggcccaggtcccatgagtaagccagaatggttgatagtgggggaggatgatgacgacgctgcctttgcccctgtcttgtgtgaaacaactgcctgtgggtttcctgcagcgcagtggggagtgagaggagaaacgtcctgccgtgccacagtgagtttgggtcaaaggcacacatggaggcagtcttggccaaagtcacaatgcggtgaatttcgctgtgcgccaaggaggttcctggccccaggagtgcgaagcgcctgcgcagtgggccccaggcgttgcgcgctgcgggagccaggagacccccgcccctggcccctcgccccggttcctcgcccctcagcccacgccctcccctgcgaacgcgcacgtgaacgggagcgcggacgcgcccgagaatgcgcttcacctcgcagaagcgggtgggctctgtggagagtcgcgggctcgcgggcagcagcgcctcctccactccggcgggcccgggttcggccggccgcccatcggactggcggactggctgactgacacgcctcgcttgcccccgcctccgcccgtgccccgcccagcttcatctctccctccgctccccgggctcgggggcagacggcagacggaggcgcctctctctccccgcccctctcctcggccctttctcttcccagcacctcggctgctgcccggcagcggcagcagctgcgtcggcggcccacacagcagcgagaggcgagaggaggctgcctcgaggatgaagtgcaaacccaaccagacacggacctacgaccccgaggggttcaagaagcgggcggcgt

SEQ ID NO: 43838 - DNA, 2300 bp, Homo sapien
tatttcatagtccatttatttcaggccattgcacattttgttccgttctatattccttccaattttgatttccttttattttctttaatattttatttcatactgtattgcactcattccttttctcatatatttttattttattccatatgacattagatatttctttccattttctgttccattccattttccaattaaattccattaaatttccaatattccattccacatcctgttcaaacccgtattctactccccattttattccagtttccattgcagtctccatttcatcccatcctgcataccatttcaaatccattttccatactatattatttaacactccaaataccattccattctatttttgtgttgcatttcagcccaattgttcaccaattccattaaatatccgattttattgtgctcaaaatgttataacagtgacattcaggagactagtttgccaatatttttaatcaaagaattacaaatgtggctgggcgcagtggctcacgcctgtaatcccagcactttgggaggccgaggcgggcagatcgcctgaggtcaggagtttgagaccagcctggccgacatggtgaaaccctgcctctactaaaaatacaaaaaattagccggccatgggtggcacgcgcctgtagtcccagctattcgggaggctgaggcaggagaattgcttgaacccgggaggcagaagttgcagtgggccgagatcatgccactgcactcgagcctgggtgacagagccagaccccacctcaaaaataaataaataaattaattaagtaattaaaataattacaaatgttcatagacttgtaccaagaattttctcttctgggaatttatccacaatgacacatttaaggatatgaacaatttttaatgagaaggatgtgtctcacaatgatgtaaaatgttggaaacagcataaacggtggccaatatgggaatgtttgaaaatgtaaacttcttttataaatggagtattttgtaatttaaagtggcctcgtagaaatttgtttactgacatagaaaatgtgctttctggaacccaaagcaggttacaatgcagtatctatggagaaactattccatttcataaaataaaaaatttaaaaaactatgaaatatgtatgaatagggcctttctaccaaagtctaagtaaaaatttccagcactttcccatgggtgcctgaggacttaggtgtagttttcttacatttgcttttctgttttgagtactgaacatgacaccttttgtaataaataatgactaaaaatgagtggccaaatattaaacttcaagtctatacattacagcatatttatattaattaggagctagagaccacactaaataaattaatatatgttcatcagcggattactacgcagcccataaaatatttaaggacggtgtcacccttaaccttaggcaatccctaactgtgccttgggggaaaaggcacagttctaaatccccctctggtgtgtgggacctgaggtgtgtgggacctgggggaagcagcagtgctgaacatccggaggcaagacggtgtgggccccttcccttttctcgccttcaggcctctgtataaccctaaaacccaccagaccccacatggggtcatctagatgcctggaggagttccagggtggtcccttcgggcgtcatgcctggtttcattgtcctgaccgggtgcgaggagggacacctggccaggagatataacctgccggccagtgtggcatttctttcaaatgaccacttaagcctcagccacgatttggggtgactcaaatcgttcatgtggaacacacacacacacacacatatacacacacacgtgtcttagggacggacacacacaaacacgtgtcttaggggccccgtgtgaggagaggagattcacactactgacccagcaaccagggtcgaccccagagggctggagcacacactccgggttgacgataggcgcctggctctgggttgcacggctccggattggacggctcccgggaagagagaggagtcatctgacgtccagctcgccaatcagagtcgaggactggctgggctccacccaccttcttgctctaccagttcgcgctctcctccggcagaagtagcagctgcgctcttgctctctgggggagaacctggcgttatggccactcagtcagacatggagaaggagcagaagcaccagcaggacgaggggcagggagggctgaacaacgaaaccgcccttgcctccggggatgc

SEQ ID NO: 43839 - DNA, 2300 bp, Homo sapien
ttttttgttcttgcgatagtttactgagaatgatgatttccaatttcatccatgtccctacaaaggacatgaattcatcattttttatggctgcatagtattccatggtgtatatgggccacattttcttaatccagtctatcattgttggacatttgggttggttccaagtctttgctattgtgaatagtgccgcaataaacatacgtgtgcatgtgtctttatagcagcatgatttatagccctttgggtatatacccagtaatgggatggctgggtcaaatggtatttctagttctagatccctgaggaatcgccacactgacttccacaatggttgaactagtttccagtcccaccaacagtgtaaaagtgttcctatttctccacatcctctccagcacctgttgtttcctgactttttaatgattgccattctaactggtgtgagatggtacctcattgtggttttgatttgcatttctctgatggccagtgatggtgagcacgttttcatgtgttttttggctgcataaatgtcttcttttgagaagtgtctgttcatgtccttcgcccactttttgatggggttgtttgtttttttcttgtaagtttgtttgagttcattgtagattctggatattagccctttgtcagatgagtaggttgcaaaaattttctcccattttgtaggttgcctgttcactctgatggtagtttcttttgctgtgcagaagctctttagttgaattagattccatttgtcaattttggcttttgttgccattgcttttggtgttttagacatgaagtccttgcccatgcctatgtcctgaatggtaatgcctaggttttcttctagggtttttatggttttaggtctaacgtttgagtctttaatgagggatagcattgggagatatacctaatgctagatgacgagttagtgggtgcagcgcaccagcatggcacatgtatacatatgtaactaacctgcacattgtgcacatgtaccctaaaacttaaagtataataataataataaatgtttcttgccataaaaaaataaaaaataaaataaataaaaataaataaaaatcaaagtgtggaataggaggggatctccacgtgaatggtttcccaacccccaagtggtgcttatcaaagagaaagacaagggtggagtgtgtggagaatgagagaatgtcttgggctttaacgcaggaatactagatgggtggtgctctggtctttaaggtgtactgcatcgaagtgcaaatggctgcaacaaggaggcgagaagtgtacccatgaggaaactgagacacaaaggggtcaggcaggttgtgaacaggggtttaagaaaagcgttaaattactagctgcgccaggatgctcggcaaggtgggaacctgttgaagaaataaaactgcatcatgtgactcagcaaggatgcgcggctattctgccaagaatcccgtgggtcgttttgacaacaccggggcccaggtcccatgagtaagccagaatggttcatcgtgggggaggatgatgacgacgatgcccttgcctctgtcgtgtgtaaaacggctgcgtgtgggtttcgtgcagcgcggtggggagggagaggagaaacgtcctgccgcgctacagtcgcgtttgggtcaaaggcacacgtggaggcagtcggccaaagtcacaatgcggtgtatttcacagtgcgcgaacgacgttctcggcccccaggggtgcggggcgcctgcgcagtgggcccgaggcgtcgcgcgctgcgggagccaggagacccccgcccccgcccctcgccctccgccgcgaacgcgcacgtgaacgggagcgcggacgcgtccgttaatgcgcctcacctcgctcaaaccctacccggcggcggagggagggagacgcgcccccgacaagcgagtggggtctgtggacagtcgcgggctcgcgggcggcggcacctcctccactccggcgggcccgggttcggccggccgcccatcggactggccgactggctgacgcgcctcgctgcccccgcctccgcctgcgccccgcccagcttcatctctccctccgctccccgggctcgcgggcagacggaggcgcctctctttccccgcccctcgcctcggccctttctcttcccagcacctcggctgttccccggcggcggcagcggcagcggcggcccacacagcagcgagaggcgagaggaggctgcctcgaggaggctgcctcgaggatgaagtgcaaacccaaccagacgcggacctacgacc

SEQ ID NO: 43840 - DNA, 2300 bp, Homo sapien
gaggacattcacagactatttctgacttctcctttatcgttctaacagtgaagtatcctctgttctctgagatatcactaagtagcagtcataccaatatgttcatgaccaatgcattcgacccaggtgaaggaaaaatcccagatgtctcctgcttccttgcatgaattaccttatgtgaacacggctgccaaaaccttgacaggttctcccagaaatgtccattctaggttcacacaatgtccaagaaggctccagcacttgtgtggagggtctctctgcacattctacctctcagttcttcctgtttattgtgaataggtgtgcacattctctttatgtcactgtaaataattaatccataaccggaggcaaaaagaatgaaggtgtggaaacagtacagagctagtataatagtggcagccccagagtgaaaacatcaagggtccaagtctgtcttttttcctacccctaaagtctggagaacacaattctcaagttataatcaggtacttggttttataatattttgctttgttgttggatttaaatatccaactatgaggccaggcgtggtggctcatgcctgtaatcccagcactttgggaggccgaggcaggtggatcacctgaggtcaggagttcaagaccagtctggccaacatggtgaaaccctgtctctactaaaaatatatattaagaaaaattagctgagcttggtggcggacgcctgtaatcccagctactcaggaagctgaggcaggagaattgcttgaacccaggaggcagaagttgcagtgagctgagatcatgccactgcactccagcctgggcaacaaaagtgaaactttgtctcaaaataaaaaaataaatccatctatgtgacaccatcttgtactaagcagattgtttggactgaatagtctttctaggtatgtcacaaaacctgaattcataaaagcaaaaggtgacagatttgagtacatgaagactaaaaacagattcagagaataagtttgtattttctatgtcagtttgcactaaattaatttacaaacaaggtcgctgaggctttgactcaactgttaacactttctgagagtgagattcttttgattagggtcttaaggtctttgttcatctcagaagtcttaattggtttaattaggctgacacctacagccctgtctcattaccataaactgtagaggggttcaacatgacactgattgtttcttagagcaaagccagtgcagtgagtaggattccaggccccccggaatgaagcaggaaaacccgaggcctgtggatgcaggatgtactagggaggtgctggggagtagtgcagataaacccagaattcagttggttggtaaaacaagagtgatctgagtcctgtgcttgtctacgtgatccaccattgaatggcaggccagccattgtgcaggcatctgcatatgaagtgactggaagcttcactggaacaaggatctccttggaaattctctcccctcagacagccagggtgcttaacatgaaaagaagttgtaaccctatccttaaactatagaagccatcagcagaagttacaggcttatgggggcccactggaaagggaaaatcaaaaggcctgtggatttcaaattaatgagtgatcttaagttgcatttcctaagttcggctacagactcatatatttcatgagtccctccctacccattccttgcctctcccttcagttgctgggtttctgaatttctgtatagttaacccttatcttgcctcccatttgttcaatagaaatgatcacttttacttgaatcttttggtagaattgtataccatgtgttcctgtctaggtttaatcatcagattgtggtcaaattgctctgccagactgtgtgaacaaaaaagtgaatggaaattttcgttttaaaaaataatacttttggacttagcccgtggctaagaagaagtaaggaagccaagcgtacggatagcagcgaggggtcaatccacgcccggcgttgggtcgggggtggaggagtcggaagtggttggggtttgggggaggagatccgctcacacacaagaggagagtgttgagccgccatatctgctgctgccgccgcagttgcgaatgcagcatcggcgcttagctgcctccgcggtgcagctaaggttcgtgtcgctaccccttggcccttcgctcttgctgccttaaccccgccggcggagcccgctcttctggcctgttgagcccgctccctcactgccacacagcaagttccgagaccatgg

SEQ ID NO: 43841 - DNA, 2300 bp, Homo sapien
taaacttttcataaaacatcaatgatttcaccatgcatccacccagcttcaccataaatatgaggtttttcttgtttcaattgtagcagaattcatgttactctcacaggcgctctgttcaaactgatgtcctatccttcatagcgcttcaagctagatcctgttcggacatgttagtgtttattttggtgcaaaaaatttttgaaatccaggcatagttttttttataatatgtatttccatgaacagtttgaagacccctcatatataaagcaaaatctcagaggctgaaagaacaaatagacaaattcacaaatataatcagggacataaacactcctctctcaataattaatataatattttacatagtaaataaccaaggatacagaataactgaatattatcaattatctctagctgatatttatagagcatttcactcaacaacaggagaatgcatattcacattcttttcaagtgtacatggaacattcaccaaattgaccatatcttcagtcataagacaaaatttaacaaatgtaaaagaactgaaatcatatattgtaagtttgctgatcataatggaattaaaaaaacaatagtggaaaataacaggaaaatctccaaatacttggaaattaaacatgcatttctaaagaacccatgggtcaaagaggaagtacacactggagacagtggctcatgcctgtaatcccggcactttgggaggctgaggcaggagaattgcttgagcccaagagttcaagaccagcctaggtaacaaagcaagaccccatctctacaaaaaataaaaaaagattagctggacatggtggtgtgcttctgtagtctagctactcgggagactgaagcaggaggatcacttgagcttaggagtttgaggttatagtgaactattatcatgccactgcactccagcctggacaacagagtgaaaccctgtctcaaaaaaaaaaaaaaaaggaggaactacaaaggtaaaattagagatcattttgcactaaattagaatcaatatacaaaaatatcaaaatacaaaatataaagattggtgggatgcagctaaagcagtgcttagtggggaacgtgagtcaaattgttgaaataaattgtaaaagtaccagcaaaactaaggaccgaccttattgctagtttccttctttgctctgaccacattttggtcatttattcatttaacaaacattgataaacacgtattttatgctaggctcttaagtgtttaaatgtcatctttagctctaggctctgggatcctagtgtagtgtctctgggtgtagcatagtatttgggacatggtaggtgctcagtatatacttgtggactgactaaaaataaccacaagagatcctcccctgtggtgagaattgtggcgcagatttgggggccaggagaactttctggaggtagtggcaataaataattcagttctaaacttgttctgaaagtatttaaccagagtacggatttttattattgaaacattttttttcagttttcattttcttccttttcttggggagtatgtaaaataatgcaagaatgctttctaaatgagtccacgtttattctttggatatttgaatatggtatgtaactctggatacgatctcaaagcaaaaatgatttagattgaagatttttgtaaaaagcttgaaattgaagtataccgctaatacaaatgaactttttaaaagtggtgtgccagaaaacagtaaatcagtttggtaaatatgtaactgtagacatccaagacagagaaaatgaggcctgagttaagggactaagatgaagggagatatttctaaggcgaatcaacaaggagaggtggcgaattgtacatgagggatttggcagagatactgcagctcctggcacgacaagaattaggatttgtaaaaagttagtgattctctctccctgccggtttacatcacaacgtaggtgttgatctagggagggagtcaatgagatagagcattgcagagcttgctagagaggcacaggaagttgcctgaagtgaaggagggggtagcggctgcagaagctaaagcttccgccaaacaaaagaggacagcacttccggtcacgccatcgttgctgccttcttcgtcaaggtgagtgtaaagaaggggacttggtaattctcacaaataaatccccatacactccagggaaacctccttttgtgcctcaacgtggggtggaaaggagaattcatccccgcgtgcgttgtatgaaggatgcttctgacgcct

SEQ ID NO: 43842 - DNA, 2300 bp, Homo sapien
caggtttcttgctttagcaatgggatggagagtgcgattcattcatttaacaaatatttattgaggatataaaaatgtgccaggcatggttctaggtgctggggaaacaacaatgaataaaacaaaaatctgtctccctaagaggtttacactctaaatgggggagaaaggcataactagaggagaaacactgtgttggtgggaaggaggaggcgtatgaaggaatcggtttgggacctgttaatttagagaatactgagagatatccatttggagaagtgaggtaggtagttactatggatctagaattcataggccaagtcatgaccgaagatacagatatggaaacagatagcatagaaaatggtgtttctgacctcctttcctgagtctgatcacgtctcactgcagacactttacagaggaagtgctgaggaaaaacaggcagctgacagaggaggttgctatgcaacagatgaggaaagtcatccagccaggcagaactgatgttggcccttggggaccaaatgctgcagtccttcctagcattagcttcctttcatgttcaggcttctggcatgagttgatgccagaacaaatgtgaactgcacaaagatctgtcttgaattttggaactgtaccagtttaatttgagtcacctcacatctgtatttaattttctgcctttttgagtttctccagttatcctggaagcatagcagcgtgtgtgtccttgggtaggacccacttgctgtgcattccactttgcacattgagaaaccaggcccagagaattgagtgacccgtgcgggctcacacagctcgagacagacaggctgggcactccattcctggaattctgaagcccagcccagtttctctccataaaaccacagctgccccaggccccagccctgaaaggaaccagggcttgccatggctcagacacacaggtctgattgtcctggctgctccagtgggcaccaggaaggcctcagggacagtgtgattgtatccctgataaggaagaggcctgatgttctgagcacagagtggaccccaaggagcaattcccacgcctggatggacccacacagggcagggggagggtgggggcctctgcttgtgtcctcctgaatgcagagcatgagcttgggcctcctagaacacaaactttgcttgtttggtacaaatggggtgccgtggtctgttgctcaaatggaggagggaggggtacccttagtccccaggccagcatgagcagaatgtgggctttggagtcaggaagacccagacccaaattttgcattttgtttcctggctctgtggccttgtctagttcatgcaatgtatctgtgcctcagcttcctgatctgcaaaataggggtgctgacatccacttcccagggctgctgtgacaggaagacaagccccagcacaaatcctgctgtgatgtacaagctgtgcccttccctcctttcctcccccaacacacacaaaatgagtccatcaccggagctgcagaaagaaagggaagaaactaacgttctttctgcgtctgggagcttgtgggggcgggcagggggtgagggagaaatcatggagtcacgtggcagccacagacttactactactactttgttagctccaatagtgtatcctctcaggccattccgtttcctcagcagaggtctaacacttgttgcaattagagaccccaaacagagacctaagcatgctggacaagggggtggagatgcaagccggcctgacaggaggggccttgaataggggagggacggaatagagacgcattgcggaaaaggtagggggccggtgtgtggggcaaggggtgggaccaagaggcacagcgcatctgtgggggagggggcgtagaggaaggggaggtgctgttgtatagtgtcgacctggttggtggtggggtggtgtgttggcaaagggggcgggaccgccttccagcgcacatgcgcatcatggtctccaggacgaagcttttgttgggaaagcaggcgggactgactttggctcttcagtgtttgcgcatgcgcgtaacgtcctgaggcggtgggtggtatattaggcgaagaggcggggtcgcccaagctgccgcgctggcattttctcctggacaaggagagagtgcggctgctgagagccgagcccagcaatcccgatcctctgagtcgtgaagaagggaggcagcgagggggttggggttggggcctgaggcaaggtgagaattagcccccagactgggcatctgccccctggtgcgggcc

SEQ ID NO: 43843 - DNA, 2300 bp, Homo sapien
ctgtatttaattttctgcctttttgagtttctccagttatcctggaagcatagcagcgtgtgtgtccttgggtaggacccacttgctgtgcattccactttgcacattgagaaaccaggcccagagaattgagtgacccgtgcgggctcacacagctcgagacagacaggctgggcactccattcctggaattctgaagcccagcccagtttctctccataaaaccacagctgccccaggccccagccctgaaaggaaccagggcttgccatggctcagacacacaggtctgattgtcctggctgctccagtgggcaccaggaaggcctcagggacagtgtgattgtatccctgataaggaagaggcctgatgttctgagcacagagtggaccccaaggagcaattcccacgcctggatggacccacacagggcagggggagggtgggggcctctgcttgtgtcctcctgaatgcagagcatgagcttgggcctcctagaacacaaactttgcttgtttggtacaaatggggtgccgtggtctgttgctcaaatggaggagggaggggtacccttagtccccaggccagcatgagcagaatgtgggctttggagtcaggaagacccagacccaaattttgcattttgtttcctggctctgtggccttgtctagttcatgcaatgtatctgtgcctcagcttcctgatctgcaaaataggggtgctgacatccacttcccagggctgctgtgacaggaagacaagccccagcacaaatcctgctgtgatgtacaagctgtgcccttccctcctttcctcccccaacacacacaaaatgagtccatcaccggagctgcagaaagaaagggaagaaactaacgttctttctgcgtctgggagcttgtgggggcgggcagggggtgagggagaaatcatggagtcacgtggcagccacagacttactactactactttgttagctccaatagtgtatcctctcaggccattccgtttcctcagcagaggtctaacacttgttgcaattagagaccccaaacagagacctaagcatgctggacaagggggtggagatgcaagccggcctgacaggaggggccttgaataggggagggacggaatagagacgcattgcggaaaaggtagggggccggtgtgtggggcaaggggtgggaccaagaggcacagcgcatctgtgggggagggggcgtagaggaaggggaggtgctgttgtatagtgtcgacctggttggtggtggggtggtgtgttggcaaagggggcgggaccgccttccagcgcacatgcgcatcatggtctccaggacgaagcttttgttgggaaagcaggcgggactgactttggctcttcagtgtttgcgcatgcgcgtaacgtcctgaggcggtgggtggtatattaggcgaagaggcggggtcgcccaagctgccgcgctggcattttctcctggacaaggagagagtgcggctgctgagagccgagcccagcaatcccgatcctctgagtcgtgaagaagggaggcagcgagggggttggggttggggcctgaggcaaggtgagaattagcccccagactgggcatctgccccctggtgcgggcccccatttttttttatcccgatcccttcaccctggattctgaatccccttccaccccccaaaccccaattcaatgcccctcccgatccttcctgattcaaaacccctgtccgatccctcccatcgttcgaaatcctcagattccttgacctcgatctgtactgttagatgattcctcctgactcaaaacctccatgcaacttcccaaatgcgaatcccaacccaaccgcacccccgctccgaattcagaactcatctgcttcccgatccccatttgaagcttcgccctgtcagtagcttctcggggttcagaacctccatctggacgcccattcacttttaccgctccgatccgttcctcctcacattcaccttatccgcccgcacagtcagaccacagtcacccccctcccaattaggtccttcgtatttgccctctgtagtataacgccctgcccctctcccacagcccccaggctccgctcttgccagagggacaggagccatggctcagaaaatggactgtggtgcgggcctcctcggcttccaggtgagatctccactccccaccccaccatttccccagccgacagtcacccctccccgcgggcctctttggtctcccaaacgccgggatccggtttgaccctatttagtgactagactcc

SEQ ID NO: 43844 - DNA, 2300 bp, Homo sapien
gtctcttgattccgttggaatatattttaaaagcctacaaaaacaacgatacttacgggtgacatgttgacagctttccctctgagatcagggggaaaaaaaaaccagatacatccactgtcaccacttacagtgccatgaaggaagaaaaagtaatcaaagcagtcctgcaagcacagccttaaatgcatacgcatgttaaccaaaggacatccttgtgaacgtgcaccacaataataacactaacactccagcgctggaaactactgaagagcccattagaaataaaaggcatgaataaattgtggcatcgtcatacaattcaaaacactgcgcaggaatgcaaagaaacgaaattcagctacacagcacgacaaaagtgaatagcaaggagaaaaacctaatgttgccaagagaaacccggattataaaatacgtactgtactgagtctactcatgtgtaatgcgttcacaaacaggcaggattatcgtcaagtgttaaaagtcacaagagtggttagatttgctgaggtggaagacaagagtgactggcatgagagtgcttttgagctgccggcaatacactacaccatttcttaacccagatcgtaggggatcagacgtccctgtggaaccatttactgagtggtaccctcattttgcgtgcaactccatttttgtattatattccattacagtgtacatagagatatttaaatgaatactatcccaggaatgtccataaacaatggattcttcagcgatttgtatattctctgaccacaatgccacaatgggatctagaaattaataacaaaagatcattacaaacccccgtatatgttggtaaattaagaaacatcctcctaagtaacccatggctctaagaaaaactaacgttgaaataagaaaatattttgagcttactaatgaagcaaactccagaggtctttgcctgccaatattactaagtctcctctctggggaagtttagattacacaggaagactctcctgcatctctgagaaggggcaagatgccagcaatctggacgccaaactccagcggaggtgagggactgaagattgctgtagacagcaactgaaatccctacgccgggttgggatgtatgccttgaagtgagcctgaagttccaaagcccataaatctgctggttcatgctctgcagagagtacatttgtccgccatctcccagagtggggggagagcgatttgtcatgctacgaggagctgagaggggatctgggcgtctaagtgatttgtaaatacactttctagagcaatcgtgcaatttacagcccccaccattaccaacaacgtgccgggatacgtggcaatgccagtgttgcagacagttggaaggtctggtgagaggggataagtcagttgctttcctgccatcctcactgccagttgatgctcaagctctcttggcaacacaagtgagactccgtctgtaaaaaaacaaaacataaaaaaaaaattaacatgtactcccagctactctggaggctgtggctggaggatcccttgagctcagcagttcgaggctacagggagctatgatcataccactgaactccagcctgggcgacagagcgagaaccccccacaccctcaaaaaagatcaagctctcttaatcagctaagtcagtgtcactcacctgtttccttcccatcttctgctactttctttctcttgtctcctcagccagtttctttgtctttatggggtaaagccttaggagaaaaggatgcagccaggaaagagggagggggaagagaggtgagaagtgaacgtgagaaagagaaggggtgagtgaagtacatgaccaaaggtgccctggggaagctgggagcaggaacaagggtccccgggcgagttgaaactacccctcatgctctttggtctgttgggtgctcaggttgcaggaaatgggcatccggttggacttcatgagaactcacaccttggggtgtggagggcaggacaccatgagaggagtcccaccctgctgcaaaagatagaagaggagagttgcccccaacataaaagggaaggcagtgacagaaagaggcaagcagaggatggtggatggcagaacaaggactatcatcaatgacattttcttcactgagcccaccccagaaatgagctcccttcctgtgcgctctcacagctccttgtcgttgaatctcgtatcactgatggtaatttgcagaggaataattaagttggtgattcactttaggatgtactgccctccgaggctgaaagc

SEQ ID NO: 43845 - DNA, 2300 bp, Homo sapien
ccctttgtttctctcttccccaatgcattccctttgggactcttcggaccccagccctccagaacaccccctcgtcaaatctagccgctgggatggcgagcctgcccatcctaaactccgctttcagtgcggcgcctcctgcgacctcctctgtccctttccttgggctctgtccctgaccaggtctaccccatcagaaagccaaaccgtctcccccccgctcctcctccccccccccgccccctactgcctaatattgcctagtaacctgatgattgtcgcccctcacctcccgggagatcccgcctcccattggatcccgccccctccccctgcagctgcttcaccctccctctcaggctgagctctcatctccctgggacccgcagcatggctgagggaagcttcagcgtgcaatcggaaagctacagtgttgaagacatggatgagggtagcgacgaagtcggggaggaagagatggttgaaggcaacgactatgaagaattcggtgcgtttggtggctatggcaccctcaccagctttgacatccatatcctcagagccttcggaagcttgggtccaggccttcgcatcttatcggtgaggccccttcctggacacctgctggcctgggcctttcccctgtgaatgggggagggaggaggggggagccaggagggttgtgtgggaaaggactgcccagcttcccaagccttccctcccctgctcggaagaagaagatttgggaaggtcttggggtgttcagggctgactgctgggaagaggctggccagcacagggaagctaacacaagtatgtcgtcgagtggcctgccttccccaacccctctctctggccttgcagaatgagccctgggaactggaaaaccctgtgctggcccagaccctggtggaggcattgcagctggatccggaaacacttgccaatgagacggccgcccgtgctgccaacgtagcccgcgccgccgcctccaaccgtgcggctcgggccgctgccgccgctgcccgtaccgccttcagtcaggtggtcgctagccaccgggtggccacgccgcaggtctcaggagaggatacccagcccacgacctacgccgccgaggctcaggggcccacccctgagccaccccttgcttctccgcagacctcccagatgttagtcaccagtaagatggctgcccccgaggctccggcaacctccgcacagtcccagacaggctccccggcccaggaggctgctactgagggccctagtagcgcctgtgctttctctcaggctccgtgtgccagggaggtggacgccaaccggcccagcacagccttcctgggccagaatgatgtcttcgatttcactcagccggcaggtgtcagtggcatggccttcccgcgccccaagagacctgccccagcccaagaggctgccacagagggccccagtgctgcctctggtgtgccccagacgggacctggcagggaggtggcagccacccggcccaagaccaccaagtcggggaaggcgctggccaagactcggtgggtggagcctcagaatgttgtggcagcagctgctgccaaggccaagatggccacgagcatccctgagccggagggtgcagctgctgccactgctcagcacagtgctgagccctgggccaggatgggaggcaagaggaccaagaaggtgagatccccctgccccctgccacctccacacccccttgctcctgtcctttccttctcctccctttcctgctcctctcctccctctcctctcccccttcttcctctcttctcctctttcccctccttctctcctcacctcccctctcctcccctcctctcctctcagctagtccatgtttctccaacacaagtttgctgagcatgttttcactccacgtagtccctaccctcaggactggtgggagaagaggctggctcagtgcctggcacttagtaagcacgcagcacatgccagccgctgctggtactgctctcatttccaagagcctgctacgggtgaggtgcgtgccgggtgctttggcacggggagcctggtagccctgggtctctcctctctcaaatgatacagtccaagcacctggatgatgagtatgagagcagcgaggaggagagagagactcccgcggtcccacccacctggagagcatcacagccctcattgacggtgcgggctcagttggcccctcggcccccgatggccccgaggtcccagataccctcaaggcacgtactgtgcctgcccccccgcaacgtgaccct

SEQ ID NO: 43846 - DNA, 2300 bp, Homo sapien
cgcctaaatacctataaaccaaaaaaattataaggcttaacgtcatggcaccacctgcatacgggacagtgatccctgagagaaagggaacctgaccaggtgagccctctgatcgcccaattccaccaacttcttgcccggatagagtttgcaggctgcagcacaggggagctgaacacaacagagcccggtggaccgtctgagtgaaggagacagagttgagagctcaagaggtccataggaccagaatttgccgggagtaatggagagaagacagctgcacagagaggcagctctggagacccttcagagcttgcccttctggatgcagcgtatcagaaacggggagtggtgatcgatgactcccagtttctggagtgagtggttgtgtggataatggcgccatttactgagactgtgaagatgggttggggggggggggaacaggagcgatggggatgtgtgagtgtatgggaggagtgagtataccaagtgaccagttttggacaggcaaaccatgaagagcccttgagacttccaagtggagatgccacgtaggtgggtgaatgtatgtacttggacctcaaaagtgaagttcagactggggttgtagattttttggagtgattagcacgtagcactttctgaaggctttcgtttgtagggtgtgttcctctcccgcagaggatatgttacaggggaagggctaaagaggcacaagcagctgacaggagagattgatatataacagctggagaaaaccacagagccaggcagaatggatactggtcagcggagagtaaaagctgctgtcctagcaataccttccattcatacacaggggtcctggtgaggctgacataaaaacaaatataaaaatctactacgaattttacaaacagtccaggttcgactgcagatgagaccacagcattttctgcctcaaaagacatccaagtggagatgtcacgtaggcaggtgaatgtactatgcacttggacctcaaaagtgaagtttgaactgggcttgtagattgtggagtaattagctcagacacacaggtgtctaattgtcctggcggacaccaggagggtctcagcggcagcgtgattgtatcgctgataaggaagaggcctgacaatctgagtagagagtggacccggtggagcaattctcatacctggatggacccacatagagccgcagaggctgggggcgaggcggggggaggctctgtctccctgtgtcctgaatgcggagcatgaacttaggccttctacagcacaaaccttgcttctttgggacagatgttggggtgggggaggcctgtcactcagacggaggaggcggtgcctctgtccccaggccagcaggagcaggaggtggactttggagtccggaagacccaggttcaaattttgcattttctgtttcctggctctgtggtctagttcatgcaatgtgtctgtgcctcagcttcctgacacgccaaatggggatgctgacatccacttcccagcgctgctgtgagaggaagaaaagccccagcacagatccctctgtgacatacaagctgcataaagggtagctgaggaagcagatgttcccagtatgtctgggggccagagagttggctagtggagaagcacacaaagcgaagtgccatcctctggccatgtccatttcgtagccccgcaggttgaggatttccacttgttgcagttagagacccagcttattaattgtgagacctcactaattgtgacctaaggggtcttgccggggaaacggggcatagtgtatcccagaccaggctggaggagtttgggtgaaagggcagggcaggacagagaagcattgtgcaaaagtggggggactgagaagagatgattgggtgggtcgagctgcactgcagggtatgagtgtgcgcgcccgcggtaggaggaggaggaggaggagaggtgaagtggatctggcgggaagagccccccgcaccctaccttcgaccccaccgcccacccacccgcggaatcgcatgcgcactggagacctggaggaaagggcttttgttgggaaagcgggcgggctggaggggtccgcgcatgcgcaggctacccagccgcggggggtgcacggagaaaaggggcggggtggtccgggctgctgtgctggcagcagtaggcgagggcgcggctgcggggttcctggtgctgaggacggacgccattggagttcccgagaaggtaaggatccagccccagacaggaccgggagagggcgagtggaacccgacacgctgc

SEQ ID NO: 43847 - DNA, 2300 bp, Homo sapien; identical to SEQ ID NO: 43846

SEQ ID NO: 43848 - DNA, 2300 bp, Homo sapien; identical to SEQ ID NO: 43845

SEQ ID NO: 43849 - DNA, 2300 bp, Homo sapien; identical to SEQ ID NO: 43844

SEQ ID NO: 43850 - DNA, 2300 bp, Homo sapien
aactgctaggtaatataaaagtaataagaacaggagtcatggacatagtttactgtctacattaacaagagtttatattccactgtcttcattatcataattttactaatacaggaatctcttaccaaggaaaataaaagtttcaaaaaaactttattgttctttccagcaattgcctgaaagatccatcaactcctcaataaaaagtgtcaaatgacatttttcaatcccaaaactctttgaacccattgcctaaaaagtcttgttgcatccaccaatcctaaatcattgtcattcctacccaattctaaccaaaccatcccccactttaaaatacccactttataccggacatgaaaagcacaacaaatatacccaaagcccttccacatctgacatactagtgcctctgtggaggtagtgctctaccttatagctttatttaaataatgtcagcgctgtcttatgaacaggttatttggctgctatttggggagtagagtatatgatgagcacagtcaccactgctgtacatcatgtcacaataaactaagtttaaatcctaggaccaatgttgtattagtccgttctcatgctgctataaggacatacctgagagtgggtaatttataaaggaaagaggtttaattgactcatagttctgcagggctggggaggcctctggaaacttaacaatcatggaagaagtggaagcaaacacatccttcttcacatggcagcaggagagagaagagtgagcaaaaggggaaaagccccttataaaaccattagatcttgtgaaaacttactcactatcaggggaacagcatgaaggtaaccaccccatgattacattacctcccacagggtcctttccatgacatgtggggattatgggaactacaattcaaggagagatttgggtggggacagagtcaaaccacatcatatgtatggatatttctgaaccatacactgtctgaatgacctacaggtatattcagggaaatcagttaccagtccagagattaaaatgtgcaataataccacctaaaaaaggaagaggtgtgaatttatttagtctacagaagtggttctattcattggtagcatggcagaaaacctcagaccagagaaggaagtgattaatcaaagtatgaataaaaattggccaaggtgggaggatcactcgatcccagaaattgagaccagcctggacaatgtagtgagattctgtctctaagtaaataaataaataaaatagctgggcatggtggcacacacctgtagtcccaactacttcggaggctgcgtcttgagtattgcttatgcccaggagatccaggctgcagtgaggtaaagtcatgccattgccctccatccagggcgacaaagtaacaccctgtctggaaaaaaaaagcatgtataaatataaacattaaaataatttatttctgtcacaaaaggtctttctgagacacatcaaccactaagggtgacatgggactctctgttcccaaagtttctggatgcatgagaatggtaggacaagagagagagaaaaaaaaatatctcttaagtccctttctttctactacaaacatactggggattctggttttgggacagtgggaaaaccctggctggccttgcatgtgcctgactcagtgtgaacgccccttactgcccaagtcccttgttgcccatgcgccttactgtctgccttctgtcccagcagagctgtgcaaagagacatcgtgacttccttctgtcttgccgactaggagtcagccagtaggtctgcagttcagtagtcctagaagtttgagtgtgagtgagtgtgaggaggagcctgcgggcacgatccatggcctcctaggtggaagggctttgaggtccccgtccttctaacacgcagcgatgcagccatggccttgctgtggtgggggtgccggacaagggagggagaaggaccatagatgggaggagggtcaggtaaacaagcagtgagttttgaagggggaaactatttgtggtatttgagtccgcgaggcatatgaaactgcttacagacgatgcattccagagtcctcagtgggaaccagggaggggagggaggactgcatgacgcgggatggggtggggcgaggcggggcactgcagcacacaacgcaggcaccgacttcagtgtgcatgttccttggacacctgcctcagtgtgcatgttcactgggcatcttcccttcgacccctttgcccacgtggtgaccgctggggagctgtgagagtgtgaggggcac

SEQ ID NO: 43851 - DNA, 2300 bp, Homo sapien
tgaaaaaaagagaagatttattatatccagggactgcatgaagctgcaaactatactcttcacttttccagcctactttgagcaagtgcttgagatcctttcctaatgttttctttcctcctattactggtcatggcataaggcatgatggacacataggcctccttccccctataggcattatttctttcctttcccagcaccttgaatctcagctgcaccctgatcatcttctctcttctgatcaggtgtaggattccgacttttagtgggtggtttctcttctttaggctcttcatcagtgggttcctgggacaaaggggaggcagtatgtgtgcagataaaaagttttgttagtaatacatgtcaataatacaaatatacagaatacacaggtatttctaatcacaagtaagtctaaagacacttctccaacactgttccacatacttattcttcacaaagttactcttcccaaagagaggttactctaagacagttaccctcaaaggctttggaaaccattttaatctatgttgggttggatgtgtgcaatctgttatcagtaagcatgaggaggaagtcatgatggggaacacaagattatccatgaaggcaaaatcagattgtaatactcttggattagtctttccttcatgagatgcatgatcatttttatcaacatggaagacctttatcagtgtatctatactagttcaacaacactatcacaaaagaaatttctgctaataaaaaacatcaaaatattaaagcactcacaagcatagccccaatcagctcaggaggctgtaaacttcttcttggcctaggcctatatgttgatcttcctcgccaactcatatttcactctgcaaacagaatactgtgattgggaaagtgtgtttgagaggatagctgtatttgaccactttcatggccaaatgttaaatttcagtttttaaaaaagtttggaaataatttgaaagtaagtcccagggcaactagaagtgtgtacatcttctgaatcgaatgcttgcatagccacttaagttgggcaatctagcagagcaatgtcttaatgctcctggcaaaagatacaggatatttctgatgagatttggtttcacagttggattctccatagtggagacatttaagtttatacagctagagaattaaaactgcagtgaccacggctttcgtcacacacccatttgtttggacgatttccctccctaaaatcaaggttttgttggaaagcacagtcccgcccattcgaacctccagggtggagttgagaagttgtgacacatcactggacgctcctcgctggacatttctacccggagctctacagacctcggggtcgcggtcaccagctcatagcattcccacttcccaggcccctttcttaccgcttacacagcccattcctgggtccctaccaagaagtctggaatctgtcccattgggagttccaggcactttcgggactcagatacctccaacagcaccccgagcattcaccctatcttcatctggctccccttcactccgcggcccaccttccttatgacctggaagctttttactctctgaggccacagaccacgccgcctgaccctctggaagcccgctcactcctcctcacattcactcacatttcagttcctgggaggactggcctgcggacctataggctgcgtctcagtaggagagaaagagtccagacggctggaacgtgcccctcacactctcacagctccccagcggtcaccacgtgggcaaaggggtcgaagggaagatgcccagtgaacatgcacactgaggcaggtgtccaaggaacatgcacactgaagtcggtgcctgcgttgtgtgctgcagtgccccgcctcgccccaccccatcccgcgtcatgcagtcctccctcccctccctggttcccactgaggactctggaatgcatcgtctgtaagcagtttcatatgcctcgcggactcaaataccacaaatagtttcccccttcaaaactcactgcttgtttacctgaccctcctcccatctatggtccttctccctcccttgtccggcacccccaccacagcaaggccatggctgcatcgctgcgtgttagaaggacggggacctcaaagcccttccacctaggaggccatggatcgtgcccgcaggctcctcctcacactcactcacactcaaacttctaggactactgaactgcagacctactggctgactcctagtcggcaagacagaaggaagtcacgatgtctctttgcaca

SEQ ID NO: 43852 - DNA, 2300 bp, Homo sapien
aaacaaagcaaaacaaaagataacgttatagattattaggctgtttttcattttcaaggctaaagtgactttctcttgaggctttctaaatcttacctggtggtagaactctcctttgttaatcttttgactactggtacaaaaatacagcattcaaatatgtgaagtaaaagataatccaggggctagctgactatggcttgagatctaaatacagcccatggcttgttttgcatagccattgagataaggatttttttccatttaaaagtattattgctaaaaaacacaacactacgccacagaaactacatgacccacaaagactgaaataattacgatcagatctgttaaagcaaaatttggtgatgccgtattaatcaaatacctgttattctgctttgcattattgcatacatcttttcatccattaattaatttatttacacacggattgaaaatatggatgttactctatcccctcaagaaagcgtccagctttatgataccatgatttcagtctgggaaacttgtcccagggatcaggtcaatacacaaacatacatttgaggtaggagactggcaggacttgttttctggtcataactgagcctagagcctacagtcagaatctatggctatttctgaaacatatactgtctgaatgacctacaggtatattcagggaaatcagttaccagtccagagatttaaatgtgaagtaacacaacctaaaaagaaaagagtaaacaggtgtgaatgtatttattctacagaagaatttattcaattacgtttattggaagcatggcagaaaacccagaaccagagaacaaagtgattaataaaagcatttataaaactggccaaggtgggaggatcacttgagcccaggaaattgagaccagcatgggcaacacagtgagaccactatctaaaaaataaataaataataaataaaccaattacccaggtgtggtgtctgcacctgtagtagcagggactggggaggctacatcgggaggattgtttgagcccaggagatggaggcttcagtgaggtatggtcatgccactgccctccagcctgagcaacagagtgacactctgtctggaaaaaaaaataaataaaaacggctttataaataaagatatgaaaataatttatttcttccacaaaaggtcttcctgagacacatcctccagtaagggactgtctgttcccaacgtttctgaatgcatgagattggacaaagagagacgaaagctctcaagtccctttttctactacaaacgccatggggatgcgggtctgggaacagcggaaaaccctaccctgccctgaaaagtccctggctcaatgtgcatgtccctttctatgaaagttccttgctgcctatgcgccttgctctctaacttctgtccctccacaactgtgaaaggagacgtcgtgacttccttctttcgtgctgactatgacttagccagtaggtctgcagatcagtcctcccagaaagtgaagtgtgagtgagtgtgagggggagcgtggggggcttcctgtgggttgtgccacttggtccatggcctctgaggtcgtcatctttctactaaaactcagcgatactgccatggccttgctgttgtggggtcccgggcatgggacgaaggagggccatagcggggaggagggtcaggtgagcatggagtgagtttttttttttttttcacggagtcttgctctgtcaccaggctggagtgcagtggcgcaatctcggctcactgtaacctccgcctcccgggttcaagtgattctcctgcctcagcctcccgagtagctgggagtacaggcgcgcacaaccacacccagctaatttttgtatttttcagtagagacgggttttaaccatgttggcgaggatggtctcgatctcttggccacatgatccacccgcctccgccccccaaagtgctgggattacaggcgtgagccaccgcgcccggtcatggagtgagttttgaaggctgactttatttgaggtatttgagtcctggtgggggggaacccacacacagagaggagggattccaaagtcgttaatggggacctgggaaggagcataggacagggcaaggcgggataaggaggggcaccacagcccttaaggcacgagggaacctcactgcgcatgctcctttggtgcccacctcagtgcgcatgttcactgggcgtcttcccatcggccccttcgccagtgtggggaacgcggcggagctgtgagccggcgactcgggtccctgagg

SEQ ID NO: 43853 - DNA, 2300 bp, Homo sapien; identical to SEQ ID NO: 43852

SEQ ID NO: 43854 - DNA, 2300 bp, Homo sapien; identical to SEQ ID NO: 43851

SEQ ID NO: 43855 - DNA, 2300 bp, Homo sapien; identical to SEQ ID NO: 43850

SEQ ID NO: 43856 - DNA, 2300 bp, Homo sapien; identical to SEQ ID NO: 43852

SEQ ID NO: 43857 - DNA, 2300 bp, Homo sapien
aacaaagcaaaacaaaagataacgttatagattattaggctgtttttcattttcaaggctaaagtgactttctcttgaggctttctaaatcttacctggtggtagaactctcctttgttaatcttttgactactggtacaaaaatacagcattcaaatatgtgaagtaaaagataatccaggggctagctgactatggcttgagatctaaatacagcccatggcttgttttgcatagccattgagataaggatttttttccatttaaaagtattattgctaaaaaacacaacactacgccacagaaactacatgacccacaaagactgaaataattacgatcagatctgttaaagcaaaatttggtgatgccgtattaatcaaatacctgttattctgctttgcattattgcatacatcttttcatccattaattaatttatttacacacggattgaaaatatggatgttactctatcccctcaagaaagcgtccagctttatgataccatgatttcagtctgggaaacttgtcccagggatcaggtcaatacacaaacatacatttgaggtaggagactggcaggacttgttttctggtcataactgagcctagagcctacagtcagaatctatggctatttctgaaacatatactgtctgaatgacctacaggtatattcagggaaatcagttaccagtccagagatttaaatgtgaagtaacacaacctaaaaagaaaagagtaaacaggtgtgaatgtatttattctacagaagaatttattcaattacgtttattggaagcatggcagaaaacccagaaccagagaacaaagtgattaataaaagcatttataaaactggccaaggtgggaggatcacttgagcccaggaaattgagaccagcatgggcaacacagtgagaccactatctaaaaaataaataaataataaataaaccaattacccaggtgtggtgtctgcacctgtagtagcagggactggggaggctacatcgggaggattgtttgagcccaggagatggaggcttcagtgaggtatggtcatgccactgccctccagcctgagcaacagagtgacactctgtctggaaaaaaaaataaataaaaacggctttataaataaagatatgaaaataatttatttcttccacaaaaggtcttcctgagacacatcctccagtaagggactgtctgttcccaacgtttctgaatgcatgagattggacaaagagagacgaaagctctcaagtccctttttctactacaaacgccatggggatgcgggtctgggaacagcggaaaaccctaccctgccctgaaaagtccctggctcaatgtgcatgtccctttctatgaaagttccttgctgcctatgcgccttgctctctaacttctgtccctccacaactgtgaaaggagacgtcgtgacttccttctttcgtgctgactatgacttagccagtaggtctgcagatcagtcctcccagaaagtgaagtgtgagtgagtgtgagggggagcgtggggggcttcctgtgggttgtgccacttggtccatggcctctgaggtcgtcatctttctactaaaactcagcgatactgccatggccttgctgttgtggggtcccgggcatgggacgaaggagggccatagcggggaggagggtcaggtgagcatggagtgagttttttttttttttttcacggagtcttgctctgtcaccaggctggagtgcagtggcgcaatctcggctcactgtaacctccgcctcccgggttcaagtgattctcctgcctcagcctcccgagtagctgggagtacaggcgcgcacaaccacacccagctaatttttgtatttttcagtagagacgggttttaaccatgttggcgaggatggtctcgatctcttggccacatgatccacccgcctccgccccccaaagtgctgggattacaggcgtgagccaccgcgcccggtcatggagtgagttttgaaggctgactttatttgaggtatttgagtcctggtgggggggaacccacacacagagaggagggattccaaagtcgttaatggggacctgggaaggagcataggacagggcaaggcgggataaggaggggcaccacagcccttaaggcacgagggaacctcactgcgcatgctcctttggtgcccacctcagtgcgcatgttcactgggcgtcttcccatcggccccttcgccagtgtggggaacgcggcggagctgtgagccggcgactcgggtccctgagg

SEQ ID NO: 43858 - DNA, 2300 bp, Homo sapien; identical to SEQ ID NO: 43857

SEQ ID NO: 43859 - DNA, 2300 bp, Homo sapien
aaacccgccccccccgtggggatttgtaatctgtggggattacaattggagatgagatttgggtggggacacagagccaacccatgtcaagccacaagccaagaaatgctggcaatcaccggaagctggaagaggcaaggaacagattctctcccagagcctctggaggactacagccccgctgacaacttgatttcaactcagtgaaactgatttcagatttctgggctccagaattgtgagagaataaattgatgttgtttatgccacaaagtttgtggtaatttgttacagcagccagagggaatttggggtgattgtaaggagttatgtaaattatgttaaagaaccattgcagttgtaagatgcattcattcattcaacaaatagtcgaggcaatatagaagagtaattaaaagcactgactttgaggccgggtgtggggtggttcactcctgtaatcccaatgttttgggaagccaaggcaggaggattgcttgaggccagcagttccttccagatcagcgggggcaacatagcaagaccccatctctaaaaaatattattttaattaaaaataaataaatacataaataaaagcacagactttggactcaattcatcttgggggtgaatcccagctctgtcacccactgactatgtgaacttgagcacactgcttaattctctgagcctcagtctcaacatctgcacactggggatgataatagtatttaactcaagagaagattgtgaaaatcaatgggaagatgcacataaagggctttgtgctgggctcaagggccattgccctgtccctgccctaacagagcttgctgtcatcctgggaggatcttagagagatcagggctgtagatggaaagcccagagaggaaaggggacttgttggaggtactagggatgggggtaggggaaacttcttagacaaattgacttatgagctccctgatgaacacagtgggccttaattacatactctttttaaaactattattataaatatttttaatatcaatgggtaaaatatatttctgcttctttggtcttttagaaaaaaacatacatagaagtgtagaagtggtttttttgtttaaatttcttttttaaaaatttttttatagagacgggggtctcactatgtatcccagattgttccagaactcctggcctcaagtgatccttccacctcctgcctcagcctctcaaaaagtgttgggattacaggcatgagccactgggactggctcactgaaatttttctttctttctctctctctctctctctttttaaagacaagatctcgctctgtggcccaggtaggcagcagtagccagatcatggctcactgcaacctcgtactcctgggctcaagctatcctcctacctcagcctcctgagtaacggactacaggcacaccaccccacctcgctaattttatttattttatttttttgtagagaaaagagacagggtattgctgtgttgcccaggctggggtgcagtggcatgatcgtggctcactgcaacctctgagtcccaggttcaagagatcctccagctgtggcctcccaaagtgctgggattacaagcgtgagccaccgctcaggcccaaatttcttacgtcactacagagttcctaggaaaaattccatacctgaaaaagttaggaactgacaggaaggatttgagatgatgacctgcttcatatacactccttattaaaactgaacaacaatccaccactgggggggtaagggagataggaaaaatggaaagagaaaatcagcgcatgcgtactctgattttggaagaatctaaagagaaaatcagagcatgcgtactctgaacttggagtagccaatcccaggggatgctttaggcgggaaaatcagagtctctgcctccattttgagaaggttctgtccctggagcctggactgatagaccccacatcagcttggcttttcccacctactgttctgacttctgattggccagatggagttcactaactgccctgattggtccatcatcctggagcagtgacattgcaggatattttctcctcctccagccacactttgtcaccaactgctgccaactcgccaccactgctgccgacctcgccaccactgctttgtctctgaagtaggttctctttaagggacaccctagatgggctaatcggggcagatagaaaaggaggaagcttctgtagggccgtcaagtgcttggggttccgaaaatcttgaggactgaaagacaactaatgccttt

SEQ ID NO: 43860 - DNA, 2300 bp, Homo sapien
tcacctgaggtcaggagttcaagaccagcgtggccaacatggtgaaacctagtctctactaaaaatatgaaaattagctgggcatagtggcacatgcctgtaatcccagctactcaggaggccgaggcaaggagattcgctagaactcagcaggcagaggttgcagtgagccaagatcgcaccattgcatactgggcaaccagagtgaacctctgactctaaatacatacatacatacacacatacacacaataattctcttcctcttacagcagttacagcatcagaaggtagcttcatgggttcatttctcaagagaatacctattgttttctgtattttcagcaaggttttcttcttctaaaacctcaagggctgcgatggccactcggcagcctagtggattgccaccgtatgtggacccatggtcgcctggcttaatgctcagcattatgtcatcgtcccacagcactgcagacatagagtatcagcccccagaaaaggcctttccgaggaggactatatcaggtctgacattttcatgatcaacagccagccatctaccagttctggccaatcctatctgtatttcagcagcaatgaacagaaccaagctgggagcacgagatgggatgagggtaagttaatataccacaaagcttactgtttttacagagtttcagctggttcgttcgttccttccttccttccttccttccttccttccttccttccttccttccttcctttcttttctttcttctttctttcaagtatggatgtatttatttatttgacagtcttgctctgtcgcccaagctggagtgcagtggtgtgatctcagctcaatgcaacgtccgcttcccaggttcaaatcattgagcgagcccagaaagtcaaaagcagccggggaaaaatagcaaaaggcagggcggtgcatgcctgtagtcccaaggctgaagcaggaggatcgcttgagcccaggaggtagggaccagccaggacaacatagcaaaactgtctctgctagaaaaattaaaaatattagtggtggtggggtggtgtgagcctgtagtcaccaggctgaggcgggaggattgtttgagcccgggaggtagaggccagcctggccaacatagcgaaaccccatttctactaacaacaagaacaacaaaaaaattgcgtgggtgggatggctcactcctgtagttccgaggccaaggtgggaggactgcttgagcccaggaggtcaataccagcctggccaacgtagcgaaagcctgtctttcctataagtaaataaataaataaataaataaataaataaataaataaataaaataaaataaaataaaataaaataaaaatgagcagggcagaatggcagtagtcctgaggccgtggtggaaggatcccttgagcccaggaggttgaggccagcctggccaacatagcgaaaccgtctcttttaaaaaatccaaaaacaaaaaatattagtgggggtggggtggttcccacctgtagtcgcgagaccgaggcgggaagattggccaaggcggatgtaaccaataccacaatcacatcccataagtaaatacattttcctctctccagggctacaggtaaaggatggtaattgtgcacaccacacttagattccctttcaaaaatgtaatcagaggttggagggccttggactgttttttcagtagcaacagatatagaagccactgaagaatgaaagccactactaagtacagcaaagctctgcaaatgtgctagtctggaaaacattgtgtctttcaagtagaaaaatcacagatccgactatttttttcttctcgctgttcagactagaaaacagatttttaacccaagatccagggacggtcttcagagagttcaaaatctcctgacggcgcctgaggaccacccactttgtcgcagtggcaacaaagtgttgctggaggaggagacaatattgtgcaatgtcactatgcagggatgatggaccaatcagggcagttagtgaactccatctggccaatcagaagtcagaacagtagcgtgataagcgaagctgatgtggcttctatcagtccaggctccagggacagaaccttctcaaagtgggggtggagactctgattttcccgcctaaagcatcccctgggattggctactttaagttcagagtatgcatgctctgactttctctctcgattcttccatactcagagtacgcacggtctgattttctcttttgattcttccaaaatcagagtaagcatgcgctgatt

SEQ ID NO: 43861 - DNA, 2300 bp, Homo sapien
tggccaaggcagatgtaaccaataccacaatcacatcccataagtaaatacattttcctctcttcagggctacaggtaaaggatggtaattgtgcgcaccatacttaagattccctttcaaaaatgtaagcagaggttgcggggccttggactgttttttcagtggcaacagacatagaagccactgaagaatgaaagccacgactaagtatagcaaacctccgcaaatgtgctagtttggaaaacatcgtgtctttcaagtagaaaaatcacagattgactatttttttcttcccacagttcagactagaatccagatttttaacccaagatccaggaacggtcttcagagagttcaaaatctgacggcgcctgaggaccacccactttttcgcagtggcaacaaagtgtggctggaggaggagacattattctgctatgtcactgcccaaggatgatggaccaatcagggcagttagtgaactccatctggccaattagaagtcagaacagtaggcggaacaagcgaagcggatgtggcttctatcagtcccggctccagggacggaaccttctcaaagtgggggtggagactctaattttcccgcctaaagcatcccctgggattggctactttaagttcagagtacgcatgctctgactttctctctctttcgattcttccatactcagagtacgcacggtctgattttctctttggattcttccaaaatcagagtaagcatacgccgattttctttttccattcttcctacccctcccctcctccgcggtgcatttgctatctagttttaataaggagtgtatatgaggcaggccgccatctcgaatctttcctgtcagtttctaactttttcaggtacgggatttttcctaggaactctgtagtaacttaagaaatttgggccgggcgtggtggcttacacttgtaatccctgcacttttggaagccacagctggtggatcgcctgaacctaagaggcggaggttgcagtgagccatgatcacgccagtgcactcccgactgggcaacagagcgagaccctgtctgaaaaaacaaaaaccaaaaaagctcactcaaatctttcctcctgggctcaagtgagcctctcgcctaggccttggggctacaggcgcgcaccaccccgcttctgctaaattttgtttgttttttttagtagagatggttttgctacgtttgcgagcctggtctcaagctcctgggctaaggcgatccgcccaccttggccttccaaagtgctgggatggtacaggcctgctccaccaaccccagctaactttttgtgtattttgtagacgggggttttgctgtgtttcccagccgggtctcgacctcctgggctcaagcggcctgcacgcctcggcctcccaaagtgctgggattacaggcgtgagccacggcgcctggctgattgctgcatcttgaaatgccccacattctctctaagtgatggcgggctcttgtagtctcagaaattctagctctcttccttctaataatttacaaatcaccgagtaatagcctctgaacacgttcatattagcgatgctcatttctcttcaacagaacagaaccccccatccctctgcctgatcagatccatcgccaaagagaccatgttatctctgggactaacttcccttcctttatttattgagtgggggtgtcagcatgcccccactgaataaaattacacagtcatgtccctgcctccccaaaaagggtccgtacatctttcagggtaagcctagctccagggaaactactaacaacattagccaaccccctcccaaagactcaaggctgctttgcccataggaaacctgtcattccctatcaatacttctcccagagacccctggttccctgttttcatctgatttctccccatatccttactcagggacagataagccccggatggagaaatgcagcagctgattccaggtgactgagggtggccggccttcactgacttctccctccacaggatcaaagctgctgtggctggaaagactcaggctatttctcttgcaggtcagactgctcccggtgccatgaacggagacgacgcctttgcaaggagacccacggttggtgctcaaataccagagaagatccaaaaggtgaggtgacctggagggagcagagtagtggcccaggggacagtgtggggtgacccggtttctgaggaggggaggacagagatactggagacaaggagcagggtctcgggggagatctggacccttgggag

SEQ ID NO: 43862 - DNA, 2300 bp, Homo sapien
tcactcagcagcctagtggattgccaccgtatgtggacccatgttcccctggcttaatggtcagcattatgccatcgtcccacagcactgcagacacagagtatcaacctccagaaagggcctttccaaggaggactatatcaggactgacattttcatgatcaacagccagccatctaccagttctggccaatcctatctgtatttcatcaacaatgaacagaaccaagctgggagcatgagatgggacgagggcaagtaaaaataccacaaagctcactgttcttacggagattcagctggtctctctctcgctctttctttctttctttctttctttttcagtcttgctctgtcgcccaagctggagtgcagtggtgtgatctcagctcaatgcaacctccacttcccgggttcaaatcattgagtgagcccaggaggtcaagaccaacctgggaaacatagcaaaaggcagggtggtgcatgcctgtagtcccaaggccgaggcgggagaatcacttgagtcccagaggtagagcccagcctggacaacatagcgaaactgtctctaatagaaaaattaaaaatattagtgggggcggggtggtgtgagcccatagtcccgaggccgaggcgggaggattgcttgagcctaggaggtcgaggccagcctggccaacatagcgaaaccccatttctgctaacaacaagaacaacagaaaaatagcgtgggcggggtggctcactcctgtagttttgaggccaaggtgggagcattgcttgagcccaggagtttgataccagcctggccaacaaagcgaaagcctgcctctcctaaaaaataaataaataaataaataaataaaaatgagcggggtagaatggcacacgcctatagttctgaggccgaggtggaagcatcatctgagcctgagaggttgaggccagcctgggcaacatatcgaaacccggtttccactaaaacgaaacaaaacaaaacaaaaaatagcttgggcagggtggtgcatggctgtagtcctgagatgggaggatcccttgagtccaggagcttgatgccggcctggccaacatagggaaacacggtttctactaaaaaaaaaaaaaaaaaaaaaagcgtgggcagggtggtgcatgcctgtcgtctcgaggccatggcggaaggatcccttgagcccaggacgatgagaccagcctggccaacatagcaaaacctggtttctacttaaaaaaaaaaaaaaaaaaaagcgtgggctgggtggtgaatgcctgtagtcccgaggccgaggtgggaggatcgcttgagcccacgacgtcaagaccagcctggccaacacagcgaaaccttctctattaaaaaatcaaaaaataaaaaatattagtgggggtagggtggttcgcgcctgtagtcccaagacggaggctggaggattggccaaggcagatgtaaccaataccacaatcacatcccataagtaaatacattttcctctcttcagggctacaggtaaaggatggtaattgtgcgcaccatacttaagattccctttcaaaaatgtaagcagaggttgcggggccttggactgttttttcagtggcaacagacatagaagccactgaagaatgaaagccacgactaagtatagcaaacctccgcaaatgtgctagtttggaaaacatcgtgtctttcaagtagaaaaatcacagattgactatttttttcttcccacagttcagactagaatccagatttttaacccaagatccaggaacggtcttcagagagttcaaaatctgacggcgcctgaggaccacccactttttcgcagtggcaacaaagtgtggctggaggaggagacattattctgctatgtcactgcccaaggatgatggaccaatcagggcagttagtgaactccatctggccaattagaagtcagaacagtaggcggaacaagcgaagcggatgtggcttctatcagtcccggctccagggacggaaccttctcaaagtgggggtggagactctaattttcccgcctaaagcatcccctgggattggctactttaagttcagagtacgcatgctctgactttctctctctttcgattcttccatactcagagtacgcacggtctgattttctctttggattcttccaaaatcagagtaagcatacgccgattttctttttccattcttcctacccctcccctcctccgcggtgcatttgctatctagttttaataaggagtgtatatgaggcaggccgccatctcga

SEQ ID NO: 43863 - DNA, 2300 bp, Homo sapien; identical to SEQ ID NO: 43862

SEQ ID NO: 43864 - DNA, 2300 bp, Homo sapien; identical to SEQ ID NO: 43861

SEQ ID NO: 43865 - DNA, 2300 bp, Homo sapien
tgtgccaccacgccggactaatttttgtatttctagtagagacagagtttcaccatgttggccaggctgggctcgaactcctgatctcaagtgatccacctgcctcagcctcccaaagtgctgggattataggcatgagccacctcccttgctggacccagtgattgcattttaaagtcttcccgcagtgagaccttgaatgactgaataataaaatggaaagagacagtcaagtttttgtgacccaagaagtagggagcatgcatgtaggtcagtgatgctcaaggtgtttgtaagatgcctgggctaagcatgctccctgccctcctgtcagtcttcatgagctactgtgtataattagattgaagacacatatggtaacctctaaccatatcagaggttatatattacaggtttctgccttgagtcatcagaagatacgatttaaagttcaaagactataacatactaagtcctgagtagtccacgtaagtatcttttacacatgttttccaaattgctggcttaattagaagaacttctgaatttaaaggaagcactgcatgtttaggggagaaattacctaaatgtttttactccacacttctgaaccactccattaggctattaacattaaaagattgttttcagatgatttccaggaggctactgaacaagcctcagttgtattcttaggacagtcatagcattaaatgtatatcttattaaaatagatagcaaattccatgacacaagaaaataatattaagaaagagcaaaataataagagtcacagaataaacttaagggaaaaaggcagtaaatgaaaggtatgcatcattaacaaaaggaaaactaatttgatattaataaatttaatagaatgttcttttgagaaatagctaggaagagcatccagtagattaaacaatcttgaagaaaatggaaaaggcacaacacagaatatgaacaagacacagatattgaatgtagggcataattgaaagggaatacattcttgaacactaatgttttcagagtgtggatgatatggttgatatgctcagaatgcctacactatttaatatatccctgaaatacctgaatatctgaacatcacaaagactgtggaaggacgtgaaatttgccagttgtacctcaaaacacagtcacctttttttttttttgagatggagtctctctctgttgcccaggctgcagtgcagtggcacaatcttggctcactgcaagccccgcctcccgggttcatgccattctcctgcctcagcctcccgagcaactgggactataggcaccagccaccacgcctggctaattttttgtatttttagtagagacggggtttcaccgtgttagccaggatggtcttgatctcttgacctggtgatctgcccgcctcggcctcccaaagtgctgggattacaggcgtgagccactgcgcccagccaaaaacagtcacttttagaagcaaatatttagctttccagatgtgttactctccgattttgtttccctctccatgtctttttctttgccacactgcttatgatgtataactctttcacgtcttaatgccaataatgatagtgataccttaaaacttatattaccatttaattaattatacaaatgggaatactttccggtgaaaaatgtgtcattattcatattgacatgatgactataggtgaaaactggatgcaaatttctaatatataacttctactagataaacatacaattgatttatatgttgatcgcttactctgcaatcttgctaacctcaattattgtagaagcattttttttagattgattttctacatacactctcatgtagtctttgacaaaagatacttttacttctcccttccaatctgaatgcatttttttttgtcactggacacaatctccagtgcaaagcttagctatgcccacattcttgcacatattagtcttagattgcagtatcctgcaggtaaatactcaggacaacttccagcacttgaatatttactccttcccccaccccacatactggtagaattcatgttgggatactacatttactatgaacatacacccctgatttgaaacaagactaggatgcaaggtaaagaatgttaattcactaaagttttgacagactgaggccattgtttcagattggaaataggaaacttaaaagaactacatggacattgggtaaaagaacatgggttgaaatttgcctggcagtagcccaagagtaaatggtcttcaaggtgcatatgaaggaa

SEQ ID NO: 43866 - DNA, 2300 bp, Homo sapien
acatcctccgaaaaaaaactaagcatgtgtgaatatatttagtctgcagaagagtttattccattacattcattagaagcatggcagaaaactgagaaccagagggaaaaagtgactaatcaaagcatttataaaaattggtcaaggtgggatgatagcttgagcccaggaattcaagaccagcatggcatcagactgaaacaacgttctaaaaaataaattaattgctcaggtgtggtgttcgcacctgtagtaccatccacttgagaggcttcagcatgaggattatttgagcccaagagacccagacttcagtgaggtatggtcatgccactgccatccagcctgggcgagaaagccataccccgtctgaaaaaaaaatttataaataaagatataaaaatagtttatttctttcacaacaggcttttctgagacacatcttccattaagggtgacataggactgtgtgttcccaacgtttctcaatgcatgagattgtttgggcaaaaaaaaaacaaatgctctcttaagtccctttatttccactacaaacaccctgtggatgcgagtacgagaacagcaggaaaaccacggtcagcctgcaagtggcagactcaatgggcatgctccctgctaagcaagttccggctgcccatgtgccttgctgtctgtcttctatccctgcagagctgtggaaggaaacgtcatgacttctttcttgccaactatgacacagcaggtaggtcagcagaccagtcctcccagaagttgaagtgtctgagtgtgagggaaagcagaagggcttcccgtgggttggaccactcggtccatggcctcatataggttgtcatccttctactaaaaggcagcgacatcaccatggccttgctgttgtggggtcctgggcaggggaggaagtaagggcatagaggggaggagggtcagatgaacacggaatgagttgaagggtgacattatttgcagtatttcagtctcagaggcataaaaaaaccacacagagaggatggattccaaagtccttagtgggggaccttggaaggagcagagaacagggcacggggggacactgaaggggcagtgcagctcttaaggcaagaggcgacctcactgcgcatgctccttgggtgcctccttagtgcgcatgttcattgggcaccttgccattggcccttcgcccacccgggagctgtgatcctgcacttcgggtccctgaggtctggattctttctcccctactgagacgcagccagtaggtccacaggccgatccaactgggagttgaagtgtgagtgagagtgcggaggagccagcgggcttccggagggtcggggcgcgtgattggtgactccgagtgagaagggccttgatgtcgtcgtccttctcgtgcggccccgcagctatgggccttcttgtcttgtaggggtcaggacgaaggaagaaggagggcttcggagtgcgacgggggttaggtgaagctggggcaatgctggggtgctgttggtggtattccagtcccagaaacgcctggaactcccaacagaggacaaattccagactcctcaagggacatcaaggctggaatgtcgtggacggtaaggaaggggcctagaaagtgggaacactccggactggtgaccgccaccccaaggtttgtataacgaaccgcagaggtgcccgcccggtgaggactgcccagtgctatgtggcaacttctcaaccccatcttggaagttcgaatgggtggaaggggctatgcattccaacaaaactcgattttaggggggaaacgggcctagcaaatgggtgtgtgacaaaagccatgggcactttaattttaattctcaagctgtattttcctaaatgtctcacgatggagagtccaattgcgaaaccaaacctcattggaaataccgtgtgtctcttgccataagccctaaggattgctcagctagcttgacgaacataagtggctgtacaagtattcgattcagaaggcatacacacttatacatgccctctgacttacttttcaatgtcttaccaaatttttaaaaattgcaagttagcatttggccatggaagtgctcaagtgtggtatacactcaggtgcatttttccaatcacaatattctggtttttgctttggtttggtttggtttttttgagacagagttttgctcttgttgcccaggctggagtgcaatggtgcaatctcggctggctgcaacattcgccccccggttcaagtggttctcctgcctcaacttcccgagtag

SEQ ID NO: 43867 - DNA, 2300 bp, Homo sapien
aacttatacaacccacttcattggagtcattttttcaaaattatatggaaaggaaaatgaacgagaaaaaccaaaacgattctgaactataactttggggaaatcacactacctaatttcaagagtcatgttaattctatagtaatccagggaatgtggtactggggaaaaatcaacagatcagaatggagtccagcaataggttcacagacatgataaactcattttcaaaaaaggtgcaaaggcaatggagaaatattatcttcttgagaaattgtgttgttttctcccttgcttcttggccacgacattcattgttctttactcccctgggtccgttccccgtgtttctcctttgcagttcaactgctcttctgtttaactgtctgtctgccccaccacagtgtggtagcctccatgggacataccacgtgtggttccttggtcttcacatttccagcatcccagatatttcctgcaacatggcagacacccatgcatatataaatgagaaagaagtatgtatgaatatatataataaaataatttatttctgtcacaaaaggtctgagacacatcctccactcatggtgacatgggactgtccccagtgtttctggatgcatgagaatggtagggcaagagagagaacgaagcctcttagtccctttccttctactacaaacaccttagggatgcgagcctggggagagagggaaaaccccgggtggccttgcatgtgcctgactcagtgtgcacgtcccttgctgcccaagtcccttgtccatgtgccttgctgtccgccttctgtccctgcagagctgtgcaaggagacattatgacttccttctgtgttgctgactaggagtcagccagtaagtccgaagatcagtcttcccagagttgaagtgggagagactgtgaggaggagcccgcggcgcggtctatggcctccgacggggaggtccttgaggttcctgtccttctcctaacaggtggtgacacagccatggccttgctgtcgtgggggtcccagacaggggaggaaggagggccatagaggggaggaggacctagtgaacatggagtgagttttgaagggggaaactatttgtggtatttgagtcccggaggcatatgaaaccgcccacagaagacacattccgaagtcttcagtgggaacctgggagagggtagagaactgcgcggcgcggcatggggtggggctaggagaggcgccacagcccactaggcaggcaccgacctcactgcgcatgtccactgggtgtcttcccctcggccccttttcccacgtggtgaatgccctggagttgtgagggtgtgagggtcgcgttcctgctgtctggactttttctgtcccactgagacgcagctggtaggtccgcaggccagtcctcccaagggttgaagtgtgagtgcgtgtgaggaggagccagtggctgtccggagcgtgggaaagcatggcccgtggcctcagaggccgaagggtctcaaggtgatcgtccttctcctcgtgaggtggcactgccatgggccttgttgtggtgaagtcagaatgagggaagaaggtgggccgcgtagttgagaggggtcaggtgaaaatggggcgagtgctgggggtgctggggcaggtatccgagtccctggaaccctcgaccgaggacggattccagactcctccgtgtcgacccgggaaggagcagggtgggcattaaggaagggaactgggaacgctgcgggttggtgactgtggccctgaggtctgtaaagcgcctggcagaggtgtacagtgaggagggcccagagctgtgtggcaacttctcaactccactgtggaggtttgaatgggcggggctctgcattccaacaaaacttgattttaggggggaaatgggcccagcaaatgggtgtgtgacaaaagccgtggtcactgcagttttaattctctggctgtattttcccaaatgtctccacggaggagagttcagttgtgaaaccaaacctcatcggaaatatcctgtcttttgccaggagccttaagaaattgctcagctagcttgaccaacttaatggcttcccaagcattcagaaggcacacatacttacacttgccctgagacttagttcgaaagtatttacaaacttttaaaaaatgacaagttaatatttggtcatggaagtggtcaaatatagctgtcttttcaagtgcatttaccaattcacagtattctgtttgcagtgtgaaatatgatttggcgaggaagatcaacatataggcc

SEQ ID NO: 43868 - DNA, 2300 bp, Homo sapien
ctatttccagagcttgctatctggttaggctgagaatcttctaaataatcaagggctgattcctttttgctcagcaattctgttgttgttttatttctcctcccttacattttgcaaccagcagcgaggagaaaccaggccacaacttcaatactttgcttagaaatgttcttagctacatatacaatttcatcacttacaagttctactctgcatctaagagaatgcattctagccaaattctctgctactttcttacagggattgtgtgtccacatgtttccaacaccgtgttccccattcctgtctgagagctcaccttcaacattcatatttctaggaatattctgttcatgatgattgatgtattctctaagatgacagaaactttctctatagttatataaacacccacacaatgctagaaactctcctccatttgaatgacctcccataatgattcattcagaggagagaagcgatctgctgggaactcttagagcttctaaaacccagtctacctgtgcttgccctggcattctctgccgcccttctgcatacaatgctcctaactaaagccagcccctcacctcagctcaggatcccatgcctcccaccttttcaggagctttgctcctgcaatgatcattcctctctcctgaaccaccaactcttccctctaaatgggatcattctccaagctaaggggggaactccccttcttcccccatgtcctcctatagctactaacacatttatctgctgcctttcaaagcgaaactgcatgaacttatacaacccacttcattggagtcattttttcaaaattatatggaaaggaaaatgaacgagaaaaaccaaaacgattctgaactataactttggggaaatcacactacctaatttcaagagtcatgttaattctatagtaatccagggaatgtggtactggggaaaaatcaacagatcagaatggagtccagcaataggttcacagacatgataaactcattttcaaaaaaggtgcaaaggcaatggagaaatattatcttcttgagaaattgtgttgttttctcccttgcttcttggccacgacattcattgttctttactcccctgggtccgttccccgtgtttctcctttgcagttcaactgctcttctgtttaactgtctgtctgccccaccacagtgtggtagcctccatgggacataccacgtgtggttccttggtcttcacatttccagcatcccagatatttcctgcaacatggcagacacccatgcatatataaatgagaaagaagtatgtatgaatatatataataaaataatttatttctgtcacaaaaggtctgagacacatcctccactcatggtgacatgggactgtccccagtgtttctggatgcatgagaatggtagggcaagagagagaacgaagcctcttagtccctttccttctactacaaacaccttagggatgcgagcctggggagagagggaaaaccccgggtggccttgcatgtgcctgactcagtgtgcacgtcccttgctgcccaagtcccttgtccatgtgccttgctgtccgccttctgtccctgcagagctgtgcaaggagacattatgacttccttctgtgttgctgactaggagtcagccagtaagtccgaagatcagtcttcccagagttgaagtgggagagactgtgaggaggagcccgcggcgcggtctatggcctccgacggggaggtccttgaggttcctgtccttctcctaacaggtggtgacacagccatggccttgctgtcgtgggggtcccagacaggggaggaaggagggccatagaggggaggaggacctagtgaacatggagtgagttttgaagggggaaactatttgtggtatttgagtcccggaggcatatgaaaccgcccacagaagacacattccgaagtcttcagtgggaacctgggagagggtagagaactgcgcggcgcggcatggggtggggctaggagaggcgccacagcccactaggcaggcaccgacctcactgcgcatgtccactgggtgtcttcccctcggccccttttcccacgtggtgaatgccctggagttgtgagggtgtgagggtcgcgttcctgctgtctggactttttctgtcccactgagacgcagctggtaggtccgcaggccagtcctcccaagggttgaagtgtgagtgcgtgtgaggaggagccagtggctgtccggagcgtgggaaagcatggcccgtggcctcagaggccgaagggtctc

SEQ ID NO: 43869 - DNA, 2300 bp, Homo sapien
ctttcccagactcgtccactccagcctgccacagccacgcttacttatctagacccctgagtttacacggccagcttccttcacagctgcccctggggttggagtcatgcgactgctttgagagtcacaggtccccctcagcaccacttgtggagatctcactgtgcggaggagtttcttctgtgtctctgataaaagacacagagcagggaccctctctctcagcgatgaacaggacctgcccatgtgttcctgggtcgtgtggtctgtctcctgcaagatgtcactgacacccagaaaataacctggacacaacatccctcttgcagctctcccagaacacatgcatcaaacccgggatcccctgtgccctggtgggatggcaggagtctctagctgtttggatcatcttcccaaaccttaacttcacctttacatgatgaggatctacagagcggcatctcagccctttcctgcaaacgcacggtgcttctgaatgcagaattcggggctagggaagggaggggacacaggtagatgccatctgtggtcagggggaggtgtgggcccgagaccgtctcagctgaaatgtaggagtaatgggcacagaccattcaagagaaatgtgtgttgggctgaagaaagtagaaactacctccagagtatctcctccatctctaagacatgcacggtttaattctgttattttgtgaggctctttgcaccatgacacaagcatgcatagagggctccatcatacaggggagaacgagaccctgaatggtctcacagtctagtgggggaggcatatgtgttccttcaggcaacaaatatgtatgaaagtcttctacgtgccaggcactgcttgaggtgtagggatacctcagggaagcaaatcaacagaaatccctgccctggatctgacattccccgaagaggacgtggtaggtggcagacagcaaaccctccacaagggaatctaggaaacgttagaagttatgaaccaaaacgtacccgagacaggtctcaatcaatttagaagtttattttgccaaggttaaggacgtgcccctgacacaacctcaggaggtcctgacgaaacatccccaaggtcgtcagggtacagcttcgctttatacactttagggagacataagacatcaatcaatgcatgtacgacatacattgattccttctgaaaaggcgggacaactacaagttggcgggcggtggaggggcggtggggtcttacaggtcataagtggattcaaagattttctgattggcaattgcttgagtttatctaaagacctccaatccataggagggagtgtctgggttaagataaggggttgtggagatcaaggttcttattatgccaatgaagtcccgaggcagccggcttcagagagaatagactgtaaatatttcttatcagaccttaaaagttgctggactcttgggaactaattctctcctagaccaggaaaaagacctggaaagggaaagggattctctacagaatgtagacttcctcacaagagatggctttgtaggcctatttcaaaatgtgtcaaagaaatgtattgttggatgaaacactttgacttctttcagggcctatttgttatgtgatgctatactagtcaggctggaacttggtgtcttattgccacagtcttaagatctctcccttaacataaatgctggtcagttgtgcctgaattccatagggagaagggtgtaatgacgcatgtctgacccacccttcccatcatggcctgaactactttttcaggctaactttggaaaagctttggccgagaggaagggtccattcagatggttggggagtggggcttagaattttatatttagtttacaaagatgatgggggctgtgttaaaaagaaaaaatatacagatcacagtacagggattgggaattgggggaggcactgggttagctgcaggtaaattataacagagtgactagggtaggctgggttgagaaggtgacaatttgacaaagatgtgaagggggaggagtcagtcaagcagatatctgtggtgaaggccttccagacagagggagcagttggaaaaaagtcagaggctgagtcgttccaacatggcgcagatgccacaaggacactagcacaccagcaggaagctgaacagaaggctggaggtgccacggtgacaaggacgggatcctgtcaggccaggtaagcttctgctctgccagtgacacggaaagggacaatgaagggccacagatacagaaagcatgtctgtgca

SEQ ID NO: 43870 - DNA, 2300 bp, Homo sapien
aaatacataaattcaaagtaacaggtgtttattatcacgtgtgtgctgtaatagcccatcagcctgtccctcagacaaataaactctctttaaatcttctaaacttcctcttgaagcccacctctccctccaggggctggacagggcatttgggacccaggatctctaacactctcttctctgggaagccatctcccactgcccaggatgctggatgggaggtgagtgcaacgggcctgtggggttgtcagttggcggaagaaatctgtagatccagggagagaatcgagccacatgtgtggatttggaaatgacagtgtatggctgcacagcacgaaggggatgaagtcacagacacctggatttaaatcgagactccaccatttatttcttgtacgactttggggaggttacttaatctctttgtggctcagttacttcatttgtaaaatgaaatgataatattctgggagaatggttcatgtttccttccttcataaactgctgttcacgaggcggcttcttccagggttaaaaaggaatctactatccatgtatctgctaggacagacattgttgcgtgtcacttgactcctgaaatacgccacggtaaagaaatctctgtacactttcgtgttctgggaagtcactgaccacacaggaccaattattctccatgagacttagataagggatgctgtctgcccactctgtgccgtgactcccagatggcagacaccaccagtccttgttcttttgtctcatgaatgtgttgtaaccaagcgagttatagagaaacgccacacttttgagacaaattaaggggacctttattagctggcgacctacaggcagctaacgctcaaaattctctcggccccaaggaaggggctagttttgtttttataccgtggtctaaacaggggaggggggagtttagctgaagcaattttacagaagcagaataggcaaaaagttaaaaaaaattaattggttatagaagcagttacaaaaaataaacagttccaggtgcaggggcttaaactatgattaagagataaatgcaggggcttttaggtaccttccaccgagcacattcccgagctgttggtacagcctgcctcaatatcttaccagcaggtgtattcttggatgtgcttggactcagcttgcactagttattcccttaagggggataaagggggctgcaagtgaagaaactaaaatggagtctgtccggctctctctgctaggaaagagtcactcaggttaaaacaaggtagggtatcacaaatgattcacttagacgggaagtctgtcctcctaaaagtagctaggcacagagagaaacattccctgttcagctggctgagacttccgctgattaaaaaaaaaacaaaaaaccctgccccataaatctccccactgaaaccggtgtactccttcctatgaaagtaaaagacacccccgccccgccccggttaccccaacagtgtgatttccacttctggggcgctctccctaaggcagtagcctgaataatttcaatgtattggattgtttggtttctgtctttaccaaggtgcatttatcattcatgcaaaaacagtaaaaaaaaaaaaaaaaaaaaaaaaaaatgaaacagcacgtgtcggttctcagcggcgcgccctagctcaaaactccagccaatcacaggagaagtcggccgcctcccaaccctccagcccagttcccacgtccctcgcccgggaagtcacgtccgctacagggagtgtcttcccatggcctccggaagcattcggcagtccacaagccacgcttcagagaagccgctccgggaacgccgcggcgcacctccggaagggatgacctccacgccttctcccctcgcagtccacccgagcggcgtgggtcgcgagaagccacccaaccgctccgtcttccggctccggcggtccgcggcagccaatcaaaggttcagtttctcagcggcgtcgcatccctgtgacgtgagcacatcctcgccggcgcccccttccgcgctgcggcgcctctagcccgccggagggcggctcctctcgatggtcttaacccttcaattacgagcgggcggcgctgcgtttccagggcagaggaaacgaggcgccgcgttggcgcttggacggcgggaaccggctccggagcgagaacgcgcgtgagagagcccgagagagacggagagcgagcgagcgcgcgggagagactgagagcgggggggtgggagagagacttccagagagacagagcgagaggccgag

SEQ ID NO: 43871 - DNA, 2300 bp, Homo sapien
accacacaggaccaattattctccatgagacttagataagggatgctgtctgcccactctgtgccgtgactcccagatggcagacaccaccagtccttgttcttttgtctcatgaatgtgttgtaaccaagcgagttatagagaaacgccacacttttgagacaaattaaggggacctttattagctggcgacctacaggcagctaacgctcaaaattctctcggccccaaggaaggggctagttttgtttttataccgtggtctaaacaggggaggggggagtttagctgaagcaattttacagaagcagaataggcaaaaagttaaaaaaaattaattggttatagaagcagttacaaaaaataaacagttccaggtgcaggggcttaaactatgattaagagataaatgcaggggcttttaggtaccttccaccgagcacattcccgagctgttggtacagcctgcctcaatatcttaccagcaggtgtattcttggatgtgcttggactcagcttgcactagttattcccttaagggggataaagggggctgcaagtgaagaaactaaaatggagtctgtccggctctctctgctaggaaagagtcactcaggttaaaacaaggtagggtatcacaaatgattcacttagacgggaagtctgtcctcctaaaagtagctaggcacagagagaaacattccctgttcagctggctgagacttccgctgattaaaaaaaaaacaaaaaaccctgccccataaatctccccactgaaaccggtgtactccttcctatgaaagtaaaagacacccccgccccgccccggttaccccaacagtgtgatttccacttctggggcgctctccctaaggcagtagcctgaataatttcaatgtattggattgtttggtttctgtctttaccaaggtgcatttatcattcatgcaaaaacagtaaaaaaaaaaaaaaaaaaaaaaaaaaatgaaacagcacgtgtcggttctcagcggcgcgccctagctcaaaactccagccaatcacaggagaagtcggccgcctcccaaccctccagcccagttcccacgtccctcgcccgggaagtcacgtccgctacagggagtgtcttcccatggcctccggaagcattcggcagtccacaagccacgcttcagagaagccgctccgggaacgccgcggcgcacctccggaagggatgacctccacgccttctcccctcgcagtccacccgagcggcgtgggtcgcgagaagccacccaaccgctccgtcttccggctccggcggtccgcggcagccaatcaaaggttcagtttctcagcggcgtcgcatccctgtgacgtgagcacatcctcgccggcgcccccttccgcgctgcggcgcctctagcccgccggagggcggctcctctcgatggtcttaacccttcaattacgagcgggcggcgctgcgtttccagggcagaggaaacgaggcgccgcgttggcgcttggacggcgggaaccggctccggagcgagaacgcgcgtgagagagcccgagagagacggagagcgagcgagcgcgcgggagagactgagagcgggggggtgggagagagacttccagagagacagagcgagaggccgagacggaggctgtccctagcacaggccagggtgtcttgggactcgaatccctgggttgggctggccgggagtggggctttcgaaggaagcgggtgattttccacgtcgtccatatctccccggtgtgggaatggcggtcgtgcactctgggggtggcgttgttctcgttccctacttgggggtggcctttttcagcggagaaagaggatgccgcgggcattggtagccggcgggactacacttgggctaggatcagtgttcagcgggttcagaaatcaccgtgtccttggcatcacctccctccccacctcctctcccatcgcacagcaggagacagtgactggagggttttcaaggaggactgcattgcccctattgaaacaaaccgtccgacaaaccctttctccgacgtgtgacagagggacggtcgtaatgtgaaatacgactagacatgcgtttaatgggcggtgtgattgctgcattcgtgcgcaatgaatggtccaggccatttgtgtccagtagccgcacaagctgcagggtctcatgtttagagagggagggcctctccgccgtccaccttgctggagtacaggcgaccctgggcggtagccctctccgccatcagaaatgtggtgctctgagtagccacagatt

SEQ ID NO: 43872 - DNA, 2300 bp, Homo sapien
cggctctctctgctaggaaagagtcactcaggttaaaacaaggtagggtatcacaaatgattcacttagacgggaagtctgtcctcctaaaagtagctaggcacagagagaaacattccctgttcagctggctgagacttccgctgattaaaaaaaaaacaaaaaaccctgccccataaatctccccactgaaaccggtgtactccttcctatgaaagtaaaagacacccccgccccgccccggttaccccaacagtgtgatttccacttctggggcgctctccctaaggcagtagcctgaataatttcaatgtattggattgtttggtttctgtctttaccaaggtgcatttatcattcatgcaaaaacagtaaaaaaaaaaaaaaaaaaaaaaaaaaatgaaacagcacgtgtcggttctcagcggcgcgccctagctcaaaactccagccaatcacaggagaagtcggccgcctcccaaccctccagcccagttcccacgtccctcgcccgggaagtcacgtccgctacagggagtgtcttcccatggcctccggaagcattcggcagtccacaagccacgcttcagagaagccgctccgggaacgccgcggcgcacctccggaagggatgacctccacgccttctcccctcgcagtccacccgagcggcgtgggtcgcgagaagccacccaaccgctccgtcttccggctccggcggtccgcggcagccaatcaaaggttcagtttctcagcggcgtcgcatccctgtgacgtgagcacatcctcgccggcgcccccttccgcgctgcggcgcctctagcccgccggagggcggctcctctcgatggtcttaacccttcaattacgagcgggcggcgctgcgtttccagggcagaggaaacgaggcgccgcgttggcgcttggacggcgggaaccggctccggagcgagaacgcgcgtgagagagcccgagagagacggagagcgagcgagcgcgcgggagagactgagagcgggggggtgggagagagacttccagagagacagagcgagaggccgagacggaggctgtccctagcacaggccagggtgtcttgggactcgaatccctgggttgggctggccgggagtggggctttcgaaggaagcgggtgattttccacgtcgtccatatctccccggtgtgggaatggcggtcgtgcactctgggggtggcgttgttctcgttccctacttgggggtggcctttttcagcggagaaagaggatgccgcgggcattggtagccggcgggactacacttgggctaggatcagtgttcagcgggttcagaaatcaccgtgtccttggcatcacctccctccccacctcctctcccatcgcacagcaggagacagtgactggagggttttcaaggaggactgcattgcccctattgaaacaaaccgtccgacaaaccctttctccgacgtgtgacagagggacggtcgtaatgtgaaatacgactagacatgcgtttaatgggcggtgtgattgctgcattcgtgcgcaatgaatggtccaggccatttgtgtccagtagccgcacaagctgcagggtctcatgtttagagagggagggcctctccgccgtccaccttgctggagtacaggcgaccctgggcggtagccctctccgccatcagaaatgtggtgctctgagtagccacagattcccatctgcatctccaataccatttccctctactcactgacccgttgggtgcgttggatttgtgcgtgggtgtgagggtagtttggtgtgtttgcttgcaaatggaaaagcgaatggccttggttggctgagcttatcagggcactagcagtggagagagaaaggactactgtattcttaggagcagaatctcaacaacttcctataaaacgggcagtgtgtcttacctggaatgctttggcatttaataaaatgtcctgtgaatacttttcatagggaagcactttgtttttactgtttctggttggacagtggttacatttcaaatcgtagttcagaattcgtgaaatacccaaattaaatctctacgtggcagtaatccattttctttccttggtgtgtggttggaagattaatttgagataagtgttcagttctgggctgggcagtcgtgccgggcacgggaaattcaggttctttaagggaaaggcctgatgtgctaagacgaaatctataccgtgtgtagccgcttatgagaatatgaaactaaggagagccacaggtaagtatacgtctatgaatgcg

SEQ ID NO: 43873 - DNA, 2300 bp, Homo sapien
acattttcctctgtccagtgtggggcagtttcgcatcgagctgcttttacaattcagtgcgggcttttttgtgaacctaagttttcatttctctagggtagatacccaggagtgggatggctgggtcctatggtaaacatctgtttgacttacaagaaactgccaaactgcttctcaaagttgctgtgctatttcgccctcccagctgcaaagtgtgagagttccagtcacccaacatgttctcgcttggccttgccagtctccatggtgttaatttgcattcccctaatgctgaatgatgttaaatatggtttcttgcgctcccattcaagtctttcccccattttctagttggggtgttgattttcttattgtggagttttgaaaacgcgccatgtgttttggatataagatctgtcaggttggtgattctcaaacatttcctcctagtggtgcagctttgattttcattctctgaacacactggctcttacacagccaaagttgtgttgtattgtattgtgttgtattgtgttgtattgtattgtattgtatcgtatcgtatcgtatagtatcgtatagtatcgtatcgtatcctattctattctatctatcctattctattctgttctattctgttctatttatttatttagagacaggggctcgctatgtcgcccagactggagggcagtggctcgatctcggctcactgcagcctctgcctcctgggtcgagcaattctcctgcctcagcctccccagtagctggggactacaggtatgtcccaccatgccaggtaatttttgtattttttggtagagacagggtttcaccatgttggccaggctggtctcgaacaactgaactctagtgatctgcccaccttggcctcccgaagtgttgggattacaggcaggagccaccacgcccggccagagccagagttttaaattttgccaaactcctatccatccatctttcctttccatggatcatgcatctcaggtcatgtcctagcctcccctcacaaagatgtcctcctacggtttctaccaaaagtcatagtattgaactttggcgtgtaggtctctgaaccctttttccttaattgcgtgtaaaggttgaggttgaggtgcatctttttgcgtaaggataggccacctcatgtattgaaaagcttatcccttctccattggattccctctcacacccatgtcaaaactcactggacacatttctatggatggattcatggactctattttattccatggatctactcgtctacccctgtaagccagcaatctcgattattacagctttagagcaaatctgaaaatctgataatatcatctctctaaaataccttctgctttttgaaacatcagatattccacgtgaattgtagaatctgcttgtttatgcatgcaaatgtccctcaaggattctgattggcaggcactgcattcattctacagatcaagttggggacaatggactgttaacttttttgggtctttaaatatgggaacacattgtttctctccatttaactaaatcttctttgattttttcattaccgtttaatagttttgggcatacagaccccgtccacgtattttagctttatacataaccattgcattgtgtttgtagcttttgtaaaacagtattatttcttaaatttaggtttccagttacgcataggattgttttccgtgtgttgagtttctctcctgtattgctgctaagctctcattaatgagcactaagctcttattagctctgagagtctgggggagatacactggttgtttcatgtagacgatcacaggacccatgaaaaggagtactttggtttcttgctttctccggtgtgtgccgtgattcttctggcattatagcactgactgggcctcagcgtgacgttgaatagctgtggtgagagtggacgtccttgcctggttcgcatccttaggcagaaagcatccagtcgttgaccattaagtggcttgttagttgtaggtttgactgtacacgccctttttcaggttgaggaagttgtcttgtgttcctagtgtgctagagcttttatatcaccagtggactttgaatcttatcaaagggtttttctgcatagcttgatgtgatcctgtcatttttgttcttcatctgatctctcaatctgtgggttacattgattgattttcaggtgtgggaagaacaacccttgcattcccgctataaaacccacttgatcgtggcttattattcttctcacatattgctcaattcaa

SEQ ID NO: 43874 - DNA, 2300 bp, Homo sapien
ctgtccggctctctctgctaggaaagagtcactcaggttaaaacaaggtagggtatcacaaatgattcacttagacgggaagtctgtcctcctaaaagtagctaggcacagagagaaacattccctgttcagctggctgagacttccgctgattaaaaaaaaaacaaaaaaccctgccccataaatctccccactgaaaccggtgtactccttcctatgaaagtaaaagacacccccgccccgccccggttaccccaacagtgtgatttccacttctggggcgctctccctaaggcagtagcctgaataatttcaatgtattggattgtttggtttctgtctttaccaaggtgcatttatcattcatgcaaaaacagtaaaaaaaaaaaaaaaaaaaaaaatgaaacagcacgtgtcggttctcagcggcgcgccctagctcaaaactccagccaatcacaggagaagtcggccgcctcccaaccctccagcccagttcccacgtccctcgcccgggaagtcacgtccgctacagggagtgtcttcccatggcctccggaagcattcggcagtccacaagccacgcttcagagaagccgctccgggaacgccgcggcgcacctccggaagggatgacctccacgccttctcccctcgcagtccacccgagcggcgtgggtcgcgagaagccacccaaccgctccgtcttccggctccggcggtccgcggcagccaatcaaaggttcagtttctcagcggcgtcgcatccctgtgacgtgagcacatcctcgccggcgcccccttccgcgctgcggcgcctctagcccgccggagggcggctcctctcgatggtcttaacccttcaattacgagcgggcggcgctgcgtttccagggcagaggaaacgaggcgccgcgttggcgcttggacggcgggaaccggctccggagcgagaacgcgcgtgagagagcccgagagagacggagagcgagcgagcgcgcgggagagactgagagcggggggtgggagagagacttccagagagacagagcgagaggccgagacggaggctgtccctagcacaggccagggtgtcttgggactcgaatccctgggttgggctggccgggagtggggctttcgaaggaagcgggtgattttccacgtcgtccatatctccccggtgtgggaatggcggtcgtgcactctgggggtggcgttgttctcgttccctacttgggggtggcctttttcagcggagaaagagaatgccgcgggcattggtagccggcgggactacacttgggctaggatcagtgttcagcgggttcagaaatcaccgtgtccttggcatcacctccctccccacctcctctcccatcgcacagcaggagacagtgactggagggttttcaaggaggactgcattgcccctattgaaacaaaccgtccgacaaaccctttctccgacgtgtgacagagggacggtcgtaatgtgaaatacgactagacatgcgtttaatgggcggtgtgattgctgcattcgtgcgcaatgaatggtccaggccatttgtgtccagtagccgcacaagctgcagggtctcatgtttagagagggagggcctctccgccgtccaccttgctggagtacaggcgaccctgggcggtagccctctccgccatcagaaatgtggtgctctgagtagccacagattcccatctgcatctccaataccatttccctctactcactgacccgttgggtgcgttggatttgtgcgtgggtgtgagggtagtttggtgtgtttgcttgcaaatggaaaagcgaatggccttggttggctgagcttatcagggcactagcagtggagagagaaaggactactgtattcttaggagcagaatctcaacaacttcctataaaacgggcagtgtgtcttacctggaatgctttggcatttaataaaatgtcctgtgaatacttttcatagggaagcactttgtttttactgtttctggttggacagtggttacatttcaaatcgtagttcagaattcgtgaaatacccaaattaaatctctacgtggcagtaatccattttctttccttggtgtgtggttggaagattaatttgagataagtgttcagttctgggctgggcagtcgtgccgggcacgggaaattcaggttctttaagggaaaggcctgatgtgctaagacgaaatctataccgtgtgtagccgcttatgagaatatgaaactaaggagagccacaggtaagtatacgtctatgaatgcg

SEQ ID NO: 43875 - DNA, 2300 bp, Homo sapien
actgaccacacaggaccaattattctccatgagacttagataagggatgctgtctgcccactctgtgccgtgactcccagatggcagacaccaccagtccttgttcttttgtctcatgaatgtgttgtaaccaagcgagttatagagaaacgccacacttttgagacaaattaaggggacctttattagctggcgacctacaggcagctaacgctcaaaattctctcggccccaaggaaggggctagttttgtttttataccgtggtctaaacaggggaggggggagtttagctgaagcaattttacagaagcagaataggcaaaaagttaaaaaaaaattaattggttatagaagcagttacaaaaaataaacagttccaggtgcaggggcttaaactatgattaagagataaatgcaggggcttttaggtaccttccaccgagcacattcccgagctgttggtacagcctgcctcaatatcttaccagcaggtgtattcttggatgtgcttggactcagcttgcactagttattcccttaagggggataaagggggctgcaagtgaagaaactaaaatggagtctgtccggctctctctgctaggaaagagtcactcaggttaaaacaaggtagggtatcacaaatgattcacttagacgggaagtctgtcctcctaaaagtagctaggcacagagagaaacattccctgttcagctggctgagacttccgctgattaaaaaaaaaacaaaaaaccctgccccataaatctccccactgaaaccggtgtactccttcctatgaaagtaaaagacacccccgccccgccccggttaccccaacagtgtgatttccacttctggggcgctctccctaaggcagtagcctgaataatttcaatgtattggattgtttggtttctgtctttaccaaggtgcatttatcattcatgcaaaaacagtaaaaaaaaaaaaaaaaaaaaaaatgaaacagcacgtgtcggttctcagcggcgcgccctagctcaaaactccagccaatcacaggagaagtcggccgcctcccaaccctccagcccagttcccacgtccctcgcccgggaagtcacgtccgctacagggagtgtcttcccatggcctccggaagcattcggcagtccacaagccacgcttcagagaagccgctccgggaacgccgcggcgcacctccggaagggatgacctccacgccttctcccctcgcagtccacccgagcggcgtgggtcgcgagaagccacccaaccgctccgtcttccggctccggcggtccgcggcagccaatcaaaggttcagtttctcagcggcgtcgcatccctgtgacgtgagcacatcctcgccggcgcccccttccgcgctgcggcgcctctagcccgccggagggcggctcctctcgatggtcttaacccttcaattacgagcgggcggcgctgcgtttccagggcagaggaaacgaggcgccgcgttggcgcttggacggcgggaaccggctccggagcgagaacgcgcgtgagagagcccgagagagacggagagcgagcgagcgcgcgggagagactgagagcggggggtgggagagagacttccagagagacagagcgagaggccgagacggaggctgtccctagcacaggccagggtgtcttgggactcgaatccctgggttgggctggccgggagtggggctttcgaaggaagcgggtgattttccacgtcgtccatatctccccggtgtgggaatggcggtcgtgcactctgggggtggcgttgttctcgttccctacttgggggtggcctttttcagcggagaaagagaatgccgcgggcattggtagccggcgggactacacttgggctaggatcagtgttcagcgggttcagaaatcaccgtgtccttggcatcacctccctccccacctcctctcccatcgcacagcaggagacagtgactggagggttttcaaggaggactgcattgcccctattgaaacaaaccgtccgacaaaccctttctccgacgtgtgacagagggacggtcgtaatgtgaaatacgactagacatgcgtttaatgggcggtgtgattgctgcattcgtgcgcaatgaatggtccaggccatttgtgtccagtagccgcacaagctgcagggtctcatgtttagagagggagggcctctccgccgtccaccttgctggagtacaggcgaccctgggcggtagccctctccgccatcagaaatgtggtgctctgagtagccacagatt

SEQ ID NO: 43876 - DNA, 2300 bp, Homo sapien
agtaaatacataaattcaaagtaacaggtgtttattatcacgtgtgtgctgtaatagcccatcagcctgtccctcagacaaataaactctctttaaatcttctaaacttcctcttgaagcccacctctccctccaggggctggacagggcatttgggacccaggatctctaacactctcttctctgggaagccatctcccactgcccaggatgctggatgggaggtgagtgcaacgggcctgtggggttgtcagttggcggaagaaatctgtagatccagggagagaatcgagccacatgtgtggatttggaaatgacagtgtatggctgcacagcacgaaggggatgaagtcacagacacctggatttaaatcgagactccaccatttatttcttgtacgactttggggaggttacttaatctctttgtggctcagttacttcatttgtaaaatgaaatgataatattctgggagaatggttcatgtttccttccttcataaactgctgttcacgaggcggcttcttccagggttaaaaaggaatctactatccatgtatctgctaggacagacattgttgcgtgtcacttgactcctgaaatacgccacggtaaagaaatctctgtacactttcgtgttctgggaagtcactgaccacacaggaccaattattctccatgagacttagataagggatgctgtctgcccactctgtgccgtgactcccagatggcagacaccaccagtccttgttcttttgtctcatgaatgtgttgtaaccaagcgagttatagagaaacgccacacttttgagacaaattaaggggacctttattagctggcgacctacaggcagctaacgctcaaaattctctcggccccaaggaaggggctagttttgtttttataccgtggtctaaacaggggaggggggagtttagctgaagcaattttacagaagcagaataggcaaaaagttaaaaaaaaattaattggttatagaagcagttacaaaaaataaacagttccaggtgcaggggcttaaactatgattaagagataaatgcaggggcttttaggtaccttccaccgagcacattcccgagctgttggtacagcctgcctcaatatcttaccagcaggtgtattcttggatgtgcttggactcagcttgcactagttattcccttaagggggataaagggggctgcaagtgaagaaactaaaatggagtctgtccggctctctctgctaggaaagagtcactcaggttaaaacaaggtagggtatcacaaatgattcacttagacgggaagtctgtcctcctaaaagtagctaggcacagagagaaacattccctgttcagctggctgagacttccgctgattaaaaaaaaaacaaaaaaccctgccccataaatctccccactgaaaccggtgtactccttcctatgaaagtaaaagacacccccgccccgccccggttaccccaacagtgtgatttccacttctggggcgctctccctaaggcagtagcctgaataatttcaatgtattggattgtttggtttctgtctttaccaaggtgcatttatcattcatgcaaaaacagtaaaaaaaaaaaaaaaaaaaaaaatgaaacagcacgtgtcggttctcagcggcgcgccctagctcaaaactccagccaatcacaggagaagtcggccgcctcccaaccctccagcccagttcccacgtccctcgcccgggaagtcacgtccgctacagggagtgtcttcccatggcctccggaagcattcggcagtccacaagccacgcttcagagaagccgctccgggaacgccgcggcgcacctccggaagggatgacctccacgccttctcccctcgcagtccacccgagcggcgtgggtcgcgagaagccacccaaccgctccgtcttccggctccggcggtccgcggcagccaatcaaaggttcagtttctcagcggcgtcgcatccctgtgacgtgagcacatcctcgccggcgcccccttccgcgctgcggcgcctctagcccgccggagggcggctcctctcgatggtcttaacccttcaattacgagcgggcggcgctgcgtttccagggcagaggaaacgaggcgccgcgttggcgcttggacggcgggaaccggctccggagcgagaacgcgcgtgagagagcccgagagagacggagagcgagcgagcgcgcgggagagactgagagcggggggtgggagagagacttccagagagacagagcgagaggccgaga

SEQ ID NO: 43877 - DNA, 2300 bp, Homo sapien; identical to SEQ ID NO: 43869

SEQ ID NO: 43878 - DNA, 2300 bp, Homo sapien
ggggattctgtatacagcatgagcctccccataactggaacgtgtccttatcctgatgggtagagggtcccaatgtgtgtcaaggaagtggggcgggtcttccctcatgactgaggcccaggccaagggcaggtgagtcagtccctagacacagtttctggggagaggcttcctttcctctgcagacacaggcacagcacctagtagcatgcataggggtccggagctgtggatctaattcagcagggacagccagctgccagaagtagtctctctgcccttgtctctctattactctctttctttccctctatcttctctgtgtctgttactttctctctcagacatggggctaggtgtgacctcactcatgctatcagggcccttgatcagcttcttctaagggtatcatcctctgacatggatttttctggggagcagttgggaggataccttctgagtctaagggattgtccaggaaaggcatatttggctgcagaggggctggaggagtccctcggcaaaaccaggagctcttccctatactttgagtgacctgggcctctggcctctgaaagaagcataggagcttctctgctaaaaactttcccatggctcgctcagagtaagtcaaagtccttgccatggcccagaaggtcctgtataatctggtcctcattacctttctgagctcatctcccacctcttccagcaacactggcctcctcactgtgcctcacacatgctaggcagagttccacctcaacacttttgcactggttcttatctctgcccagaatgcttctctcagatattcatctcctattgaaatgtcaatttcacgttctcagaaagatcttccttggctactctttctagataggatcctcccctcttctatttcactaccctgacttttcattacagcaattaccaccacctgacaaattacatgcttacatttttgtgccatatgatcccaatagaatgtaagctccacgagggcaggagtttttgtctctttccacacagctgtattcctaacacctataacagtgcctggcacatactttggacagaatgaataaattagcaaatgaataaaccaatgcaaaattctggtgagagatatagctagacaggttgaggattctgctagggcacatattcaggtgtgacaggatttatttggcctactcattctccttgggggcccctgagagatggccctttccctaacagagcttgaaggtcctgctgtccctctcacccattactgacagtcaaggacagacacctggcccgcatcaggccttctgagcccagtcaggagttccatccctcctgccccttgggggactgtggctgggttcccaggccagcaggccccccattagatctattctgcattacccagggagggacaagtgagcacaatgcccagcacgtggtaaacgtttgatggtggacgctgcaggaaggtaatggaagtctgctgcttaggaacacttttctcctgttcaagattgcagtgagtatacagtcagtttttgtcctgactttgccctctcaccctctggggaccagcccggaatggtccatgggtatctgcatccactagctgttccttgtttgcaccaccaaggggcgcgcgggatggaacagttctatcctgggatgtaccactgaggggcgcagaggaaggacagtccactccgcctgtccattttggaataatcccttgtgtgcgacagcactaagggtctctttaaacccacgtgtagcatccgccacagttcctgccccgttaggtccgttcctactcgcaccactcggttctcccagcctgttcgaggcatcattttcactttacctccaccccttcgtttctacatagtcaaatcccgctggggaccgcaaaggggcaagcgattggctccaagatgtgaagggcggggtcgagggccgtcccgggaggtgattggttactgcgagagtgccccgactaagcttttccggggcgcggagtggctccggatggaccggctagcccctgcctccctcttcgcatctctggttcccattggccttcagtttgtgacaggcacgacgattgcggagctgaagttcaggcagcgggagcgaggagggtgtgtggcttttgatacagtagagttctttggcctactcaccaactgacagtcccaaaggggctggagatgccaccccggcaaagttcgccctagtcatttgcttcacgtgagctctttcagtcttgtttatccttaactcggtgacaa

SEQ ID NO: 43879 - DNA, 2300 bp, Homo sapien
tttttataaagacggggtctcaatatgttgtcccgggtggtctcaaactcctgaactcaagcaatcctcctgccttggcctccgaaagtgctgggattacaggtatgatccactacacccggcctccaaaacattttctaattttccatggatttttctccctccccaaagcatgtgggcataaaaatgaccaccggagggccttgtcaaaaggcaggttttgaagccccatctgaaaacctcctagattagtatttctgggaggtaggcttgggtatctacactttacaagttctccaggggattcagatgcaagtgggttccaggtccacagtctggtagcagagcctgcatttcctaagggcagagagcataggtctgagtcacccggtactgttagtgcccagcactgggcctaacataaaaccatttgtcataaatgaaggaaccaatggatgaaggaagaaaggaaataaaacacaatttcttatatcaagataatttgaattcttgaatgctgtaacttaggggaaccactgaagcatcatttggtcccaatttaatcatatttgaaacaaatatttttttccttgtcttcatatctctgcctaccaagcgttctcctcacctctcctattctgttgtcctgggacatggctttaagtatgggttctgcctgtctgctggccccgagaaagtggggatggcacaggagatatcctgagaggggctgttcagagttgggcagcgctcctttcccaccccaaccccccagccaacctccaggccttgcagggaaaatgcccatagaaccccattctaaatcagtttatgaatcccacctctccgggccctaagcatgcctcccagcccaaagcttttgagaaactttcgccggacctttgtcccgacccagatcctagcgtcctctatgccctgcctcctctgcacttgtagcccatgtgagttgctctctcagcagcctcttggccatctctccccacctccactcatgcctctctcgagcatctcagaaaggcccgagcctgacttccccagccagctattgtcctggcagcacagccgccacgccagcgtccccacccagtcagccagccggctgctccctggcctcgccagcaccccccgcccccccccccgctccccgccccgccccagggaggaccaggctggcagctgggagtctccctgcctgctcagccttcctccttccctccctctccctccctgcctccctcctcctccgcccgcccctgaggcagggaccgtgcaaatcgaggagaggggggacggacaggcctgatggggtccagcttagggccccggactccccactgatgctctatccaggctgggtgtccccagcatcgtgggacctggatttgtgtgcaccggggtggttcccaggccaggagggtccctctggcaggcccttggtgccctcgttttgcatgaggacccccctcggatgctctgagccaccctcctcaacccggatctaaaacccgggacacggctatcaggccagcctctctctccaccccaccccctctttctggcgtccatcccctccccaacaccacctctgctgctgcctctggctgtggacctgcacctcttccccatccccgccaggcccggggagcggggtgagcctggatgagagcccccccaacctggggctctcccaggccatggcccgtgtgctcccagggaggagccccggaccctgagcatctgctggaggcttggcagaggccccgcggggaccgtgtcttctgaggacaaaaggcggcggccagcaggcagacggagggggggggtggggggtggggggggtagggggaccggcagccaggcaggcagacgggtagcaggggccagcactggcccccctcccagcttggcagtggcatgaagatgggagtgggagtgtatagtggaggaagcacctgccgggacccccacctgccagctagttggacaccccaaggctgtgtgctgcccacctggtgttccccaacacccccagccctacccagtgcacccctccggtgcctgctttccctgatgcctgcgatttagaccagcccggctgtatccacggcaacagaagcaggagtgtcactggccgccagatcactgagggtcccacaatgtggcccgggctgtgatttacctgggtgagacagcttgagccccatcgtggattccaagacatccctgctgagagagccaaggtaagcagtcagcatccctccaccaaggatggggggctg

SEQ ID NO: 43880 - DNA, 2300 bp, Homo sapien
aagcccaggagtctacccagccagcctgctccctagacagttaatttactatctggttattctctcaggtgcacagaattgagttgaccatactcctcagttcttggcacactatatcatcattggtccatgtgaggcccttttatttttttttcttcagttttgtccccttcatcacccattcctgatcccatcctccccgccccctacacaggcacccactctcgtgtatttaacgtacgtccttccaatccaccgttcatgtgtttatttacatatatgtgtatctgtgaaaaatgtatggtattgctgtgtgttttaatttacataaacagtattgtactataaatcttgttgtttcttttttcactcaacattctgtctttgagagatccagccatgttgccgtatatagatctaattcattctagtggtccatctaaaacatatatcacatttttcttatccactcccctgatgatggatccctaggtctcctctctgctccgcgacaaggctgcaatgggcagttacctacacctctcttgagggatgcctaatttaggggagagaaaactgaagctcagagaggggcagtgatttggttaaggttacaaaatgaggggcacacccatgatgtgaatcccagcaccaaagccagccctccaccaccatgcctcacaaaagaccatccatctctggtttaaaaagaaaaatcttaaaatacagcatacactggggaaagggagaggaaaggatggaaagggggagaaatgaagagacagaaagtgctagaaaattctagcagatgagctgaatcacaatcatttttatgacgcagaggaagttacttttttgtgtgtgtgattattatttgtagagccattttgcggagatggaaaacgccacgtcaaaacctggcccccaaaccaaacaccctgggtgcctaaattgcaggcgcaggcggtagggcagcccgagcccccgaggagctacagcagagttcacccagggggcaaacgtggggggtgggggaaggggcagaagtggaaggtaggaaaagaggcagaagcgggggggcggggggcaggggttgtgtgagggaaggggcagaagttgggggataggggaagggcagaagcggagggcgggagggtgagggaaggggcagaagtggggttggggggtgaaggaaggggcagaagttgggggataggggaaggggcagaagtgggggtgagggaagagacagttgggggatgggggtcagaagcagggaatgcgggaaggggcagaagggggggtgagggaaggggcagaagcgggggaggaaggggcagaagcggggggtgaaggggcagaagcgggggtggggtgggggaaggggccgaagcgggggatgggggaaggggcagaaacggggggtgggggaagggacagaaacggggagtggaggaaggggcagaagcggggatggaaaaaggggcagcagtgggggatgggagaaggggcagaagcgggggtgggagaaggggcaggagctgggatgggggaaggggcaggacccgggatgggggaaggggcagaagcgggggtgggggaaggagctgaaggaaatgggggaaggggcagattttaaaagtgcgtagttgctgaggggaggggggcggggggaacgataacgaggctcttccaatttcatgtgagcacatcctgctcagcgcctgcgtttgtttttcgtctcgttttttggtcttcagaaccactggtacttttcccattggataaaacgctgagagggtgagggagaggggcttcttccccagctttcctcgcagccaatcgccctgcagtttccctcccgtcgctgagggagtcagcccgttgattggcgggcccgaggggagccaatcggaaactgatgatgtgtggtgttggcaagcggattgcgtgagagcgggcaggggtcgcgggagcgcgatcgccgccgcggcggccggcagccaatggccaggccgagcggacccctgcgtcaggagtgggcggggcttcggcgattggcgcggagggagtagagcgggcgctgtgggagggaacgccagagcgaggtggtgaggagagctggttgcgtgagtctcctcagctctgcttaccggtgcgactagcggcagcgacgcggctaaaagcgaaggggcgagtgcgagtcccctgagctgtacgaacgcggtcgccatggaccgcccagatgaggggcctccggccaagacccgccgcctgagcagctccgagtctccacagcg

SEQ ID NO: 43881 - DNA, 2300 bp, Homo sapien
tggagagggggccctagaaacctgtagcgcagtggggtgggcgccccagaggttagttgacccgaagagcaaggaagaggcgatcatcatagtggaggatgaggatgaggatgagcgggagagtatgaggagcagcaggaggcggcggcggcggcggaggaggaagcagaggaaggtgaagagggaaagcagagagagaaatgccgagaggatggagagcatcctgcaggcactggaggatattcagctggatctggaggcagtgaacatcaaggcaggcaaagccttcctgcgtctcaagcgcaagttcatccagatgcgaagacccttcctggagcgcagagacctcatcatccagcatatcccaggcttctgggtcaaagcagtatccttctaatcgatactccgtaggtcagaagcccgtgacaggaaaggggaaggtgggggagggacagaaaaggtaaagcgggtggaggagagccagaggtgggcatgatccccctatcggaagacggactagactgggtggaagagggatggaaggaggagggcaaaacagcagagaagctggactggagatgatgaagggtggtggagggggggcggacataaaaactggaccacagatgggaaagggggaagaggaggaacatagcattaaaaaaaggatcacagatgataaaaagggggagggtagtaaaggggcacacagcaaaaaaattggaccagagatggtgaaaggaggaggggaggggcacgtagaagatgaactgactcagagaccttgaagagggaggggaatggcacacagcagagaaactgcccagaaagggtgcttgagccatacaaggctctgtaaacctagatttttgcttaagatactaggagaccccaatcctggctggagtgccttgcattggagggaggggggctggagcccctgaaagatcaagagagggagtgtctaggtatagagaaaaaggagttaaatgaaggaaaggggagagtagacacatacacatacatgtaacatgttaggaacatgagtcgaacatcctaatagaattatgtggatacagacccttagccctcatatgaaacagcacatggtaagaggcccttagcacccaggcatacaatatcatttagacataggacctcagctcctagacacagtattatgtgaccacaggtcctcagcatgtagacacatggcataacttgaccacaagccatcagagccattcacacatcatgtggacatggaccttcaacacccatacatacaataacgtgaccacaggccctcagcaatcagttacagcatcacttggacatggcccttaagcccccagacgtgcattttgtgaacacaagctttcagcacccagtgacatataccacatgcacatggattgtcgacaccctgtagggccacctaacatagaggtttatcatgggaataagtatgggttatgtcccatgactcacttgctttatacacaccacataagcacagaaggaatcctcatgctccagcctctcttactgtgcccttcctggccttccctccctccctttcacggaatagtcaatccttgacctaaactgctccactcatcagttcctcaaccaccccagaatttcaattttgatcaaccgacgtgatgaagacattttccgctacttgaccaatctgcaggtcaggccagagagacattttttagtaggatcgggcacgaatctggttcttggaggtgacgggaggtgggtgggaagggccgtggtgtgttgggggggggacagattccaccatcacccccacctggagcaggtacaggatctcagacatatctccatgggctacaaaatgaagctgtacttccagactaacccctacttcacaaacatggtgattgtcaaggagttccagcgcaaccgctcaggtaagtggcagtaccagagtaaatccatgttccccccctcaatctgtccttgttttgtcccatctccatagccttctctctccctaggccggctggtgtctcactcaaccccaatccgctggcaccggggccaggaaccccaggcccgtcgtcacgggaaccaggatgcgagccacagctttttcagctggttctcaaaccatagcctcccagaggctgacaggattgctgaggtggggcccttcctggcatcaccagagaaggccttgctaggcttgttcctgggtgcgtggggaattaagaggaggatctggagcttgtactaatggctgtcttattccttctccccttttt

SEQ ID NO: 43882 - DNA, 2300 bp, Homo sapien
ggacccctttggtgatctagtgaagcctaatgggacctttctttttcttttcttttcttttttttttttttttttagatggagtctcactcttgttgctcaggctggagtgcaatggtgcgatctcggctcactgcaacctccacctcctgggttcaagcaattctcctgcctcagcctcccgagtagctgggattacaggcgcccgccaccacgcccggctaatttttgtatttttagtagagacagggtttcaccatgttggccaggctggtcgggaactcctgacctcaggtgattcacccgcctccgacctcccaaagttctgggattacaggcatgagccaccatgccccaccagaccttttctcagaaaaaaaaaattgtttaaattcataaaataaaatatctagaattacaaaagaaattgattacattgaaatatagttattaaaatatggaaaaagcaaatatgtgctatagtataatcgtatatgtactccccattaatccattaaatcataagatttaatggagggtctaatgactatcatgattttaaaataatgattgaaattatatgattttcaagagatctgcaacatctataatgtgatatgaaaatctctgatttctattagtgacaatcagtactgctactactgctgctactatgcctagttacattctttattgaaaaatgctaaatttcagttagaggagagggaaaataaagatgtaattttgttttatttttttgagacggagtttcaatcttgttgcccaggctggagtgcaatggtacgatctcagctcacggcaaccttcgcctcccaggttcaagcgattctcctgcctcagcctccctagtagctgggattacaggcatgtgccaccacgcccggctaattttgtatttttagtagagatggggtttctccatgttggtcaggctggtctcgaactccgacctcaggtgatccgcccgcctcggcctcccaaagtgctgggattacaggcatgagtcactgcgcccggccataaaggtgtaaatttgttcccatccaaattcatggacctctccaaaccctgtccccagcctcgattagaggtctgcagaatacaaattaagaacccttgcaaataggagggtccttcccatctctccttccttcttaaacagttttcctttggaagcctgggttttattctgggtcttactgcgccgactgccggcggtgtacggtaagaagacgcaaagacggggcggtggtggggagtggtagcgggaagaggcagggccggagcgcgcgaggggtggggcctggctgtgtgacttcaagccagtcagtttgcctctctgggccataagttctgtccgcctgaatactgggaaagaattgggaggagagaacttaattatttatgccccaggcaactgatctatatttgccctctcatttaatcctcacacattgtgaggaaaattttaaaacatctttccatttccagatggttaaactgaggctcctagcgaggttgtcacttgaccaatgtctcagcaggtatcagggactggtaggtgacacgccacatccccatagccacctcatcctccatgcatggaataaggaactctgctcactttgagcgagagaaacctggcttaggaatctctgcaggtgggtgtggaactgtgagaaactaggggcagaatcgcgtctcttagcagagcggtggcagtgcaaggtggcttatggagagtaaaacgtcaaagaagccaggcatctcgattgtgcagtgactcggcgcctggcgtggcttccggcttcccgcctgcgtattcccaagtagccgcctgaagacctgtcgaatagacaggcaaagggccatgacaagcactcctttcctggccaatcctattaaagggtgggcttggctctttaaccaatcaaagtcccccgaaggggcggagttttcctcggtttggctctaagcctcgggggtaaaaataaaatgtttccatccccagccaatccctggaaaggcagaagggcactcctccaatgggagccggggagccgtcggtagcggcgtaggcccgtgcccctgctcgcgctgcagcccgtggaagggttccgtccagcgtatccttcagatcttgctgtaggcctctggtgtctgtgcgcgcgcggcaggggcggcggcggcgacggccggaggtgtacggtgagaagccataaagacggggcggtggggggagtggcagcgggaagaggccggccgaagcgcgcgaggggt

SEQ ID NO: 43883 - DNA, 2300 bp, Homo sapien
ccctagactgagacctggggtcaagctggacccggcagggttgtccacggactcctctctctctccttacttgtatagcctagggtcccaactggaagactagatgaagcagggctgagccagaccttcccaccaatcaaagctgccagaagagggcgggctttcttatttaccactaggttcctatcagctgcaaatattgggaagggggaatgaaacccatgaacgttcagatgagaaagcaaaataagagtggcagtgtgctaagctcctgggctagggatcaggacccagcctttagcctcctcacagccccttgagaggacggaaagcccttgaggcaggcatgataggaagctgactggcttagggcttccatactcttgcttcctcctttgtatcctcgtatcatgggcagactccaaacacagaacactcaagaccacaaagaatggttcttagcctttggagggtcaaggatccctttatgaatctgatacaagctggttagtcttcttgtcagaaaaacacatgcatgcaaacacccacaaaaacatgtaaacaatctgttgatggtccctgatttagtccagcaccctcatcttaaagactttgggactcagaagagagatctttccaactactatgggaccattaatgggcttgaaaccactttgctaagtgaaagaagctagacacaaaggatcacatattatacgattccatttatgtaaaatgtccagaataggcaaatgggatgaggggtaaaggacgcctaagggatatggagtttctttctgcagtgatgaaaatgttctgaaattttttttcgaatgatggctgcacaactctgaatatactaaaagctatttaattgtatacttttaagtgggtgactgtatggtatgtacattatatatatcaataagctgtcttaaaaaagtgaactcaggggttgcaaatgaccacacatctgagctttagtccccattcatcaggggcataacctgtggagaaaaatcagggaattatgcagtagatgggttagacaggaaaacattctaggaagaacgagattctatgtataatcttaagggcaataaagcatcatggaaggttttaagcagtatataatcagatctacactttagaaaccccccaaatcactgaattgtacatttcaaacaagtgaattttatagtatgtaaattatatctcaataaagccattaacaaaaaaatccctttgggagcttgaggaggataaactggagggcatcaactgggggaggttgtagtgtaggagtttgggtgagggggcccgagcccatctgtttggacttgagggaaagtggcttggggttagagtcgggggaggatcagaatgtcttgcccaaggttaagaagctggtggaacttgatttcagaacccagagctccctggcttcagccctagtgctcctgccagcactacagctgctccactgactggtgatggaagcactgtcttccccgtctaagagaaatgcacttcagaaacatgtttccaaaaaatgtttctaagggttttatttctaacaagaggaaaataataaaataaaattaaaataggcttcagttggaaccaagtttcttgttttgcttttttttttcttttgaacaaattaattacacaccaacaatcttcttttattacaacatgaacccaggaggaggaaaggagacaggggaggacagggagggaggactgaggtggttgtgaggacaagcaccaaaagctttcttcagatcacagggagccctgttcagctccccagccaaattcctttaaaataaaaaactgtgagcacggctatgtgaagtttcctcctcctgggtggaacagtcaggggaagggagagggagaagggggtaggaaggaaggaaaagaggggaggagagtgggggcaggggttagtgtagcatggcctggccaggaccagaactggggagagaagggaggagagtcccccagtttgcatatacactggccttgtctctggaatggtgatggcccagccccagccacccccctgcccaccagcccatccatctatctgcctcaggtgtctgggaatgctggttagaggctaccagggagggaagactccaggggccggcccccaggagctgaggtctgaacaataccttggagtcagaatacaaaagtcaagggactcaggggtgggcgggtagcagggatggccacccccctacccgcccaccccccaagaagcaggcttgatggtcagaaagaggatc

SEQ ID NO: 43884 - DNA, 2300 bp, Homo sapien
gggccctgccccaccactctacctcccaccccagcagctcccttttccctcacctcctccactcctggtgagggcaaacgacaggaagagcatttgaccagagtcagcaacttcctgtgtatcattgggcaagttgtttaatctttctggaacttggttcctcatctacagactgggtaaattcacctacatctttctgaagactgttgcaaagattaagggaaataattggtatgaactagccatgtaggcaattagatgcttatccatgtgagaggctagtgatattactgtgattagcatcactttgcctagttttcctgcttcctgtccagacagctgttcagttggatcatccacctgtgtttctggtggagaggggctgaggtttcccctgacacctagaaaactagaaagatgtcacttaatatctgtgtcacttgggacaagtctccacacgagccaagtggggataaagatcttgaacattcaaggtaatataaggattcaggtgataaaaaaaaaaatacaaaagcactagcacagtgtctgacacaaaggagattcttaatgagttttggcatattggttgttgactctcagaaataaaaataacagctaccagatactgagggcctgctatgtgccaagtacacaacaattctgcaaggtatgtattatccccatttcagttacagaagttgggacttgttcaaggttacaaactagaaaatggcagagctggtgggactgcaaggcatgactcttttgagcccagggcatgagctccttcctacctgtgtgccctgttccctcagccaggatgtccttagctcagtcctgaagtaggcaggatggacctaattggcacagtatctgattaggaacagttaactgcacgaaggtatgacactccctatctgcctcgagcttacagtggatgtttaatatgttaaacaggaaatgtttgcaaaaagtattcatatttttcagtcaatatatactaaggacatttattcatttttcttttgtttactcaacattcatttactgcttaacatgccaagtgctaaggatgtataaggccacatggtccctgcccttaaggaattcatagtctgatgggggaaaacaaaattacttaatcagcatgtacgcaagtactcaaatatttgcacagtaggtgttcaaactatatgcagtaggtccacagctgatgaatgacacagatgatcctccaatcagtagatgcctgatgtatatgtacaaagtactggtttgatgatactcattcaaagtactgtagttgcaatgaacctattcagaaactgctcaaggaacatgcacacgataggactaaatgtacatacagttggtaccaaatgcacaggggctatacacaataaatacaataaaagtacacggatgtttggtaagtgcactgtaggctcacaaatgggcaaacaggtgttttacacagttgacactggataaatacgccgttgctaaacatccaatagttaaagtatacatacacacaggcttattttgtaggagtatatgccacaaatgtgtacatggtaaaagtgaatacagaacagttgaaagcgttcattaaaatgctgactcccagtgacttttggggggtaagaatcgaaaccccatctctctacctgtaaccttggatgaaataaagatttccttcctttacttgggactcagaatcctaaaaatccataatccccggggagtgagcagcttcctgccttccttatttcaaagccccagaggtgtcagtgtctagagctggagcctagtacatctccccccatcccgcgggccagcataaggggtcctttgcaatcaggctcccagagccgccttccgcggcccataccgttaagaccagggagaagggacagagaacactggtgcggggctagcgacctggttgaggtctgcgggggagtgccggtttgactccaccacccacggacaccagctcctcttccggtctccataacgcgcatgcgcatcactggcctttaaacgtgcaccgccggtccatccggaaagacgatccggcaaactaattacaatcttgttcctccgccgttgcaatgaactattttctctcagtccggggtggtacttttgagtaaccccttccaaatagaaacccataccagcctatttagctcggtctccactatatgaaggtttcctagggcttggtgtgacgcaacgtatacgaggctcggaaggacaccccgcggaaggatccggtttgttgtggtgtg

SEQ ID NO: 43885 - DNA, 2300 bp, Homo sapien
tcttgcacatacctcttgcacatatttctgagtagttccttagggtagattcctagaagagaatcactgggtacaaacatttaggttcttgccaaattaccttccaaaagagttatgttaccatacatgcccacttccctgcactcttcctagcactggatttcattttaaattatttttgctaattaggaaggcaaacaatagtatctgattgttttaattacagtgtattctgagttgttgagaaaaaattccccactctggggaagatagcaactggctgttgtactgaaggacaccctccctgccccaatcctggctaaggggccgagggtacccattgaccctcagtcctgactatcgtggcccgtgcctgggtgtgggggtggtggagcacccctaccacccagtgcccataattatgtgacatatccctgtgttactccctcccccaggggttgacaatggtgaagacatcccccgagacctcctggtgggcatctaccagcgcatccaggggcgtgaactgcggaccaacgatgaccatgtgtcccaggtgcaggctgtggagcgcatgattgttggaaagaaaccagtaagtgccttgggaggctgcagaggggccagggttcaggtctgcctctgccactaagtggtaagtcactgcacctccctgagccccaggtgccctttacctgcaatacagagtgggtgataatgcattcctcagaaggctgtggtgcagagtgaatgcatcgagcacattccaaggcccatagtgggtactatataaatattagcatccttttcacctccggctttgcctgtccatcctaagtgaagagccaagctaatggttagcagaaaaccaaagtaagaacacactttaggccaggtacaatggcttgtgcctgtaatcccagcactttgggaggccgaggtgggtggatcacctcaggtcaggagttccagaccagcctggctatcatggcaaaaccctgtctctactaaaaatacaaaaattagctgcgggcgtgatggtgcatgcctggagttccagctactcaggaggctgaggcaggagaattgcttgaacccgggaggcggaggttgcagtgagctgagatcgtgccaacgcactccagcctggggccacagagcaagactccgtctcaaaaaaagaaaaaaaaaaagaaaacgctttagccaacaaacatttgtggatgcctttccactgagcccagcatttgctgggcaccagagttggtgctgggcattcatagatatgaatcagacgtgttctctatccttgggggcactcacagaccagtcggggtgtgaaacaaagacacatataatacttctgctttatggtccagtttaggagaggagaaaggagagagagaccattttcagcctggagaaatcagggaaggcttcttggaagagatcattttgggattgaatttttttttttttttttttttttttttgacatggagtttcactctgtcactcaggctggagtggagtggcatgatctcggctcattgcaacctctacctcctgggttcaaacgattctcctgcctcagcctcctgagtacctgggattgcaggcgcccaccaccacacccagctaatttttgtgtttttagtagagacggggtttcaccatgttggccaggctgatctcgaactcctgacctcaagtgatccgctcgcctcggcctcccaaagtgctgggattacaggcgtgagccactgcgcccggccgggatggaaatttgaaagggagttgaaatatgaccatgcagagctgggcaagaaagacattccagacagaagggcaaaggcaaggtagcagataagtttaggtcttagttgctgataccccttgtgtcagagtgacacacatgtatgagtggtaaacttcttgcggttgaaagttaaggtgccaggaggcctgaagctgatgggctggccttgctgacacctgtttcttcatgcctgtctaggtcctgtctctccctcaccgtcgactggtttgctgctgccagctctacgaggtgccagatccaaaccgcccccagaggctagggttgcatcagcgggaggtcttcctcttcaatgatctccttgtggtatgagcactgtgggggaggagatgggagggagagagtgagcttgacacctaagtctggtgtgaaccatattgatgtaggtgtgtggtgtgtggagtgtggcgggcgaggtgttctgccatgccatctgcatggtctcaggcaaggcccaggcctt

SEQ ID NO: 43886 - DNA, 2300 bp, Homo sapien
gtggctgggtcaggctcctcacccttcattccttcctcccttcagcctctggtgggtcatcatctgagtctgttcagcatgctcagctgtaactgaattccaaaagtggtcccaggttcagggatattttcttagaaatcttcctcactatccctgaaacaaacaggcttcccatgggtctcctctgcctctctgggagaagggacagactctctcaggttcaggctgagactatttaccatgtgcacactttgtctacctaccaaatccctacaagaactgtgaggtaggaatttccactcctcttccatagatgagcaaactgagcttcagagggcttacccagctaaaaagtgatagggcaaggacttgtacccagctttaccaggcaccaaagtgtaggttctttgtctcaccagagagggaaagggccttacccaaagtcacacagcatcatcccttaaagctaccactacactttctttctttctttttcttttgtacagggtcttgctctgtcacccaggctggagtgcagcggcatgatctcagctcactgcaacctccgcctctggggcttaagcgatcctcccacctcagcctcccaagtagctgggactacaggtgtgcaccaccatgcctggctaatttttgtatttttagtaaagacagggttttgccatgttgcccaggctggtatcaaactcctgagctcaggtgatccaccgtcccccacccaccccactgctcccagcctcccaaagtgctgggattacaggcgtgagccactgcacccggcccagcactacacttaatgtctctcggctcctgccaggtcaagagggttcagctcttagggcaataactacaaatgggcacaaggtgaagctgctgcaggagctaggagagttcctcaaggagagttaaaaaaaaaaaaaaggcagatgctaaggccagagccttgaggaccagggctttgaggggtgggcagagggagagaaggtcactaaggacccacagatgccaaccttgtggtgttccggagggcctctctctctcagtagctttggctttcttgagaggaaccagctgccccagcagggaggcaggaaggctggcctgttgcctgtcagcttctatttcttctagatcactggccccctggcccctcccagggccgccttctgctcagaacagccaggggcctgggctctgggaccgtgaaaggacaggagcactttgagctggacctgtggtattctcaggagccctacatccttcaaagccaaaaaactctctcctttctccagtcccgcccatgtggaggacagagatgttgctgtaataggcaggcagggagccagggcacctggagtctactctgacctgctgcatgaactttagtaagacccttttcctctccaggcctcaatttgcccatccataaagtcaggctgggcagtttacttggaagaacagcctcttggcatttcttttgattttccctcttctcttcaggaagcatttctctcagccagtctagaaaacaacatagaagagtgagagcttattgcagtgagaaagaatattggccggggccccatcttgataccccaacatgggtgatttgaattgcacttaatatgcagagtcccagaacaactcctaaacatagtctctttaactgtgctgaaaataagggtatttgtgaaaagcttctatggaaaggtttctgtactcacaaggtagcaatatggctgaaggggcagattccaggtttgggaatagccaaaccgggtcttgatcttggggttctgccacttactagcagtattacttcacctctctccatctcaattttctgttcaggagaatagagccagcgatacaaacttgatggggtgcgtggggagattctagcagaggtgcactgagggagcccagcctggggtttggcccagaggagggactgtgagctctccaggccgcttcctcggaggaggagttcccagccctcctggaggagtaggggaaggagcaaagtttccagttgcaatctggcccgcagcccagctggcctggccccgccttcttggttcctccttctagggaagggctggggaggagggggtggtgacacggtggagacaccggctaggccagggggcctgcccttgggacaggtccagacccatggagccccccgggaggagcagcaggtaggaacctgggccccgcagcctggccccctcccttcctgcccaggcctggacccagtccctgggctactgattcagcag

SEQ ID NO: 43887 - DNA, 2300 bp, Homo sapien
cagttacacaacctttgtactcccaggattgttttaaaacttcataccgaaatataatatgaatacagaaaagtgctcatatcagaagtgatatgaccatatcacaagtgatatagtcactttttacaaaccaaacacctaggtaaccagcattcagaacaaggtctgttttttattcaccctgaatagtactcaagcagccctttcagtttgaaggactaagtctcttctttttttttttttttttttttttgagatggagtctcgctctgtcgcctaggctggagtgcggtggcgtgatcttggctcactgcaacctctgcctcccgggttcaagcgattctcccatctcagcctctctagtagctgggactacaggtgcccaccactatgcccggctaatgtttgtattttcagtagagatggagttttgaactcctgacctcaggtgatccactcacctcagcctcccaaagtgctgggattataggcatgagccgccgtgcccggcctttttttttttttttttttagacagggcctcactctgttgcatagggtggagtgcagtggctcaacctccacctgctggattcaagtgattctcctgcctcagcctcccgaatagctgggattacaggtgtgcactgccacgcctggctaatttgtatttttagtagagatggggtttcaccatgttggccaggttagtctcgaacccctgacctcaagtgacctgcccaccttggcctcccaaagtgctgggattacaggcgtgagccaccatacctggccctctccttatgttatttctttgatcattcccttcccttaatttgctctgttttcttgtttgggaatgtctcttagttgggtgttgaacttcctgtaggctgttgatcctgtaggctgcttaccttttctctcatactttctattttatggtatgtgaataagttaatagaaagtctgactgagccaggcgtggtggctcatgcctgtaatcccagcactttgggaggctgaggcgggaggatcgcttgagcccagaagttcgagaccagcctgggcaatatgataacatgatgaaaccctgtctctacaaaaaaaaaaaaaaaaaagaaagaaagaaagaaaaagaaaaagaaaaaaaaagaaagtctgactgagtggtgagctgcctatgtatccaggcttgcttgtccactcactggcttcattttggcgagctggcagggagttggttgttataatccccaaaggccagaatgaatagcactttattttgggggcaccaacatgccactaggtgtcttgactcatcctagatagtttaattcctttagcaagcagccctctgatactttgcctacgggtgaatgccaggcggcctgtgttctaggtctgggggttggggtggcagggaaggaaggatgtcatatacttaccttccatttatccctgtgtccagtgccgtggttcctcctaccctctcttgcagctaccatctccaagtctggagtctctctgggcctctgctggcctgactgtctccctcctcagctgcaagcccctaagtggtgttcctggatcttcctcaactgtgaacaccctgctgtttgtttttttgcttccagaaatttgttgaaatctctcacccactgatctcaccctctcccatcctcctccctgttatgagttcatactttattttattccttcactttcattatggtggggtcctgggagagagaggagataaacatttatgcccttgaggtggaaactaaggcgaaagctactttaaaaaatggttgttttgctttttcaacccagactgaaactggaaactattagtaggccccccacatagccaagcctggatgacctcatttggggtcatccaagctgtgttgcttctggccccagcccttatcataagcattcctccattggcctccagagcacccctttcctcaacctctgctgcctagaccatggagtcaagcgagccctcagccgaggaaccggacacctgggttctgatcccagccctgcccctgcctccctctggacccctgggccagcccctccacctctctgggtgccctctctgtggcttgagaggctctccgtctgctgtaagctgggctttgccgggattggctgggtgcttggagggcagcccagcctctttgtccaggcggtgggagcaagtgggccagagatgggccccaagcactcgggggggcttggaggctgagctgaggcttctgcaacagcaggctgtgctagctgctc

SEQ ID NO: 43888 - DNA, 2300 bp, Homo sapien
gcatgggatggcagtgtccacacagtgcaggggagactctgtgtgacccagagcaatgataggcaagttaatataagatgcctctgtgagaggttagtggtcagccctgggatcagtaaccaccagcagacgtggctcctggaaggctgcctggatctgattagtgaaagttccaggagtgaagtgcccagcaataagagtggccccagtggaaacagcaaactttagcacagcccactggccagtattcctggaagatataatactagcatcagtctggttttcaatggcaacaatggcagaatcttcttccaggtccttttcagatttatgatgtagatgccaccacttttccttctgtaatgtactgttccatttggaagtcaaggttggtgccattcaagtggggttctgctgcaaggaatttgaggatatctcttccttcatctgcaggacattaagggctccagacattgtggaagtttccctttaggttatgggagaatgcaggaaacgcctgatgggtagcactgagagctcattgtggttttgatttgcatttccctgatggttaatgatgttgagcatcttttcatgtgcttattgaccatttgtatatcttctttggagaaatgtttattcaaattccttgcccattaaaaaaaaatagttgtctttttgttgctgtaagagttctttatatattctacgtacaagtcccttatcagatacatgatttgcaaatactttctctcattctgtgggttgtcttttctgtgcaaggtgttttttgcatgcttttatccaagaccaccctgtcaggtagctgttattgatagggaaattgaaattaagagagaagatggaatttaaatccagttttgtctgactgtaaaactcatgttttctcctctaacccaacctgctcacaaagataaattaagacacgtttctgtctttaaggagctccgtctggcagaggacataaaacaagaacacagacgaatgtgctgtaaagcaagttccacttgttccacaaattccacaagatagggagtgcagcaggaggtcaagaggggagagagagagagagagagagcagcaacttgcacttctggctgaggaaatcagggttggcttcagtaaggtggcatttgagttaagtcttgaaggatgggtacagtttcagtggatggggatgatggagtgaatggggagagcatttctaaaagagagcaggaaatgagggttggttgaatgaatggagccttgatcccaagactggctgtgatgtggagtcccagggcttgttgagttgagagatcctggactgccttggttagaggacccggggactggctgagatgggggattctggggttggctggggtaggagatctgggcactggtttgaatggagagtgtaagggctggctggagtgggagatgcctgcgatgttgtacatgagtgtgtgtgtgcgcatcctttgggagtcccaagggatgcctgggatgagggcagctgcagacagtcaagggactggccaggatgggagactcagggacgactgcccatgatgggggctggagggaggtcgcctgaggtagaagacacaggggctggctaggaaggggaatctgacactgcttgggattggcagacctagggcatggggagtccacgggttgtcgggacctggggactgcctgggatgggggttcctcccgggatggctttggatgaagatccccaacctggcgaacccgagggacgggcggactctgggaaggagggcttctttaggctccgttaagtgaggacccagggacgggtggaatggagagatctcttgcgggctgtcatggggctggccctggccgggcgccggtgccttggggccagtccagctgcgggtgcgggtggcagccgcaggtggggcgcgcgggggcgggccgggcgagccgggtgggggcaggggcggggggcgggccggcggccggggcggtcccgcgcggccgcgctgcgcagtgactccgcagcgggcggagcgccgtgggccgcgtcctcccgagcagtggctgtggtggtggtggtggcggcggcagcctcagctcctgctccccgtgccgccggccccagcgctgtctcccgggccccctagggcccccgggccctcaagcccggtgcgcgccctcgcgtcccgccggccccctcccccggctgggcccgggggagggtggcgccgtgagagagcggggacagggctctcctgcccgttcccctgcccctgggccgccag

SEQ ID NO: 43889 - DNA, 2300 bp, Homo sapien
tgccttcattcactcatttgtgtattcattcatttatgtattcatcagacacataccgaacaccctctatttgtcaggctctgtgcttggaatacagagttgaatcagacatgatctctaccctcctagtaaggagatacagtgggttcatgaatgactatagttagctgaatgtcatatgtactttgaatttgagaagtgggtgatcccctctaggcttcctggaggtcacatttaagctagaccttgacaaattggtaggatttggtcaggcactaggagtggagcatgagctctggggacagacagttatgggttctggtcccactttttatcacttactagttgtttgaccttgggcaagtcatttgaccttctgtgcctcagtttcctcatctgtaaaatggggctaacaatattacctacctcataggatttaatgatgtcaagctcctcactggaggccttatcccttcgtggagcccactaggtgccgacccctcagaatataaccctcatgcctggacccctgagagcttctgatcccagctattagggacagaagaagcctccaaatctggaaggtgctgaatgccctgctgactgggaaagtttcagggcactgatggggtctacctggtaagcggagggcctgaggaaacctgtagcttcaatcatgtctggtaaccgggtgcctgagccccaatctgggttgtgaggaaataggggagaggtatcctgggccacatcccagcctaacacctgtgaggttcattttaggaactaacctcattagctataaggatcatgcagaggcagcaaagccgggtgcgatgagctcagcctttactcattcacatacaccatcacactttaattccaatctgtatattgctttttaaaagttaagtccattctaattacccaaatatgcatgaattcattctccttttgagaagttagattgttaaagatagtctcattcagctaccaaccactccttgatccttcccttcttagtggctgttgtttgttgtacttccgtttagactttgttttaatgcttgtacgtacatatgtgaactcattggaaatattgtgtgtttaatgcaaatgatatattgaattgtttagcaatttgttttctttgcttaacgatgtttttgagatctgtgcatgttacttaatgtagctcaatccatcttctgtaattgctgtatagattgtcatcatatgattaccacattttacttacgcatttcttttgtgatggacattaagactgtttttaggttttgctattacaaaatactacacaggagcatcactatgcctgtgtgaaagtatatgtatgaaagtttacctagggttgattcctagaagtggaattgcaaagtcataggatatttatatattggtttttaataatacttccaaattgccctcctgtactatttactcagtatttttcttgaggttgatctgaggtctaacattgttatcctatatcattttcatcccaagtagtgatatctgtgaaatcacaggtttgatgtgtgctaattatgtattcttctaatacatattaaaagacataactatcaaaacaaaataaatttgtctgttttcaaccaaagaagtcacgtaccactggtggtactgtgtgccataatttggcaaatgctggcctttatggacgagcacaattcgggggtcagacctggttcaaattctagctgtagaaacttgtgcaagttacttcacctctgagcctaagtttccacatctgtaaaaggagataataaacacctaccttgcagtagtgaagcaaagagaaaattaaatatatatgaagcaatttggctggcatctagatcattcacagccctttaaaggtcacctttgctgttctccccactttacagataaggaaactgaggcccaaaaaggtttgaacccaggtcttccaagtcattcaagtgctttctccactgtacaggtggttatcaaccttggctgcgcatcagaatcgtttgtaaagctttttctttttcctttttaaaaagtaaagcaatatatacacaggtaaaaaaataaaatagtacagaagggcttataatgagaagcagcagttccctgcttgcacccccacatccaaaggatgtggagctctttaaaaataaattgctctggtcccacctctggaaatctgattcagccagcatggataataacccagataactaacccctacctcacaggataaaaaggattacatgagatgccttaggctaaggccc

SEQ ID NO: 43890 - DNA, 2300 bp, Homo sapien
tggtaaacatttttgtaatatatattatggactgaacaccagtaaaacgtttcaaggaatgtctgctttagggtactcacaggccaatgaagatacaaaaacatgcaccatcaatataggacttaataaacattaacgtgtaccaagtgtctacggtatgccacagaggaagactcactcaccaaagggactaaaggaatggcttgtagaggtgggccttgaagaacgggggcaagtgggggagtgccatagcccttttcagaacagctgggaatacaaatctactaatgctgaggggactgaatgccaagaggtacatcctagctcttccaacaggggccactacactaaaacccgaggaaactgggtggacaccaagcattagccctccaggccagtggttctcaaacaagttggggggttgggggaatcacacacaccctctgtgacatctagcaatgtctagagacagttttgattgtcatgcctggggagcaggggtgctactgttatctagcaggtagatgccagagatgctgttaaacatcctacaatgcacagagcacatcccacagcaaaggattatctcgctggaaatgtcaatagtgccactgttgagacactcagtctccaggaaaggtactcagtatgtgctacttcagcaagggcagcctcttaggctaggatatcattcagctagaacatctctggggtggaagaatacagcaggattccaaatggacatctgaggtgagaggaatccacggtgtatcgtttagagttgggaagacacaaaatagaggctttacctgaccaccctttctaaagacaccacctaagtcactttatcacatccacctgtctcatttcctgtatagcacttatgacagcctaaaaccatcttattttctccttatcttctttcccctctggaatataagttccctgtgagcatggagttggtttattctattctccgctgtttccacaacttgcaactgaataactcctgataaacaataagcattcaacaaatttggtaaattagttaatttcggcttttgacggtttcggtggtaggaaaagggcgagttcgaggcaactacctctgacatagcggtggggggtggggatcgacacctcaagcattctaaagactggagcgctgggtctgaaattcaaaagtgccgcctccagagaagagtagaaaggagttggagtgtaccaatgcgaggcgagagaggacgctgggctgaaacagaagtgcaccgtttgggaccgaaggccacgggagagctaccagcgtccccacattctccggagggggtcaagtaaggctgggaagccggctccggccggtccggcggggagccgcgcggcggaggactgagctggcgggaagctggttccagacgcgactcctttggcgggagggggaagtaggcggggtaactggcagctcggcctgtaccactgggccggggcgggggccgcgcaggaagcggcaagtgacacctggaaggggttcgagttagagcacccgcgcggggagagtgggttcgagcagaaccccctctggacgggcaaggaacccgtaaggtccgcgacgtttcaggttacatgggctgggttgtactactccggcaccggataaggggtccaggccgggacgtgcgcagggccgcggccaggtttatctcaccagagccattgggtccaatgatggcggtgaacctctgaaatggtccgataatctgtcgacccttgtacgacttaaagttctcaatctcaatcagtttcaggaaccccatgacggccgcggcgccggcggcagtaggacaggccgcgccgtacgcccgagaactgaggtagcccgcgcgggaaacgccgcagtgcaagccgggcgaccggcaaatgtcgcgagaatacgtccaggcctaacgggattttcgccttccggcaggagtgggaccaggggcggggactgatgttgcgtatacgaggagcgagctgacgactggcgtggtgcctccgcccccctttcttgttgcatggcaacaacaaacacttgctcctgcggaccagatccccggaggagttgttgctgggcggagtcagagcagttcttgaggttcaaggaggcgggggagacctgagctcacgcttgctgagacagaagtcacagcaggattatgcccctcagggcaagaggaaggtgggagctcggctgtggctttagcctggccagctttcaaggctaggacaaggacagggtcgggaattggaaggacccgggggga

SEQ ID NO: 43891 - DNA, 2300 bp, Homo sapien
tgtagagattgggttttgctatgttacccaggctcaccatctcatcttttaaaagggaacagtatttccccatggattacatgagattgctgtcttttagccattttatcccctcagcctgattgtttctcccagctgaacttcatttatggctcccctactagattccatctaccaagcttcctccctttatttatttttgagacagggtattgctctgtcacctaggctggagtgaagtggtgcggacaccactcactacagcctcaacctcccaggctcaagtgatcctcctgcttcggcatcctgggtagaccagaggtgagagctgccacacccagctaattttttaatttttagtagagatagggtctcactatgttgcccaggctggtcttgaactgctggtctcaagtgatcctcctgccttggcctgcctccctcacgatgggattacagttgtcagccaccatgcccagccacttcctcactttcctggacttgtcctaagtctttaggactctttctagccttcggacataatttaataaatagttaaaggaataattatggcaaccaccagatcctttccatgtttaagtctgagaatggcaccaacttacctactggtttcacctgccattacagtataaggtcactgaaggggaagattcagctgacattttaagcttcttggattgctaaggcccctgccttattaatgatagagagcagagagggaagagaggtaaggtggcattgtggtatagagctgtgggaatgggatgggggagaggcatggaggcagaggtaggtggaggtggagagcgctggcttagggaccctgactcctgggggttcacacaaaatacctttctcagtaaggaatcccgattttgaagctcttaggttggctctgcatgcaactttgttcttgggttacggcggcagtttctgaactctgcttggtacaacaggagggaggcaggggataggggtagtatctcaggccgtagccttccccagcctgtatccctgttgcctgggagtagccccagtcccattcacaacccgtccgccttcgcaacccgtcccgccaccaatcccaccccaccattagcaaagtctgagctcacctaacactgaatcctcccgttggcccctccttcccgtccagctctccgctccccccgggtccttccaattcccgaccctgtccttgtcctagccttgaaagctggccaggctaaagccacagccgagctcccaccttcctcttgccctgaggggcataatcctgctgtgacttctgtctcagcaagcgtgagctcaggtctcccccgcctccttgaacctcaagaactgctctgactccgcccagcaacaactcctccggggatctggtccgcaggagcaagtgtttgttgttgccatgcaacaagaaaggggggcggaggcaccacgccagtcgtcagctcgctcctcgtatacgcaacatcagtccccgcccctggtcccactcctgccggaaggcgaaaatcccgttaggcctggacgtattctcgcgacatttgccggtcgcccggcttgcactgcggcgtttcccgcgcgggctacctcagttctcgggcgtacggcgcggcctgtcctactgccgccggcgccgcggccgtcatggggttcctgaaactgattgagattgagaactttaagtcgtacaagggtcgacagattatcggaccatttcagaggttcaccgccatcattggacccaatggctctggtgagataaacctggccgcggccctgcgcacgtcccggcctggaccccttatccggtgccggagtagtacaacccagcccatgtaacctgaaacgtcgcggaccttacgggttccttgcccgtccagagggggttctgctcgaacccactctccccgcgcgggtgctctaactcgaaccccttccaggtgtcacttgccgcttcctgcgcggcccccgccccggcccagtggtacaggccgagctgccagttaccccgcctacttccccctcccgccaaaggagtcgcgtctggaaccagcttcccgccagctcagtcctccgccgcgcggctccccgccggaccggccggagccggcttcccagccttacttgaccccctccggagaatgtggggacgctggtagctctcccgtggccttcggtcccaaacggtgcacttctgtttcagcccagcgtcctctctcgcctcgcattggtacactccaactcctttctactcttctctggaggcggca

SEQ ID NO: 43892 - DNA, 2300 bp, Homo sapien
aatccacttggagttgcattttgtgtatggtgtgagataaggatccaatttaattttccccccaagtgccatctcatcttttttaaatttaaaattttattttatttttggccgggcgcggtggctcacgcctgtaatcccagcactttgggaggccgaggcaggtggatcaggaggtcaggagttcaagaccagcctggccaacatagtgaaaccctgtctttactaaaaatacaaaaaaattagccaggcgtggcagtgggcacctgtaatcctagctacttggaaggctgaggcagagaataaaatttattttatttttaatttgttttagatggggtctctctctgttgcccaggatggagtgtagtggtgcaatcatggctcactgcagcctcaaactcctgggctcaaaggatcttcctgccccagcctcctgagtagctgggactacaggtgtgtgccaccatgcctgcctaatttttaaaatttttttgtagagattgggttttgctatgttacccaggctcaccatctcatcttttaaaagggaacagtatttccccatggattacatgagattgctgtcttttagccattttatcccctcagcctgattgtttctcccagctgaacttcatttatggctcccctactagattccatctaccaagcttcctccctttatttatttttgagacagggtattgctctgtcacctaggctggagtgaagtggtgcggacaccactcactacagcctcaacctcccaggctcaagtgatcctcctgcttcggcatcctgggtagaccagaggtgagagctgccacacccagctaattttttaatttttagtagagatagggtctcactatgttgcccaggctggtcttgaactgctggtctcaagtgatcctcctgccttggcctgcctccctcacgatgggattacagttgtcagccaccatgcccagccacttcctcactttcctggacttgtcctaagtctttaggactctttctagccttcggacataatttaataaatagttaaaggaataattatggcaaccaccagatcctttccatgtttaagtctgagaatggcaccaacttacctactggtttcacctgccattacagtataaggtcactgaaggggaagattcagctgacattttaagcttcttggattgctaaggcccctgccttattaatgatagagagcagagagggaagagaggtaaggtggcattgtggtatagagctgtgggaatgggatgggggagaggcatggaggcagaggtaggtggaggtggagagcgctggcttagggaccctgactcctgggggttcacacaaaatacctttctcagtaaggaatcccgattttgaagctcttaggttggctctgcatgcaactttgttcttgggttacggcggcagtttctgaactctgcttggtacaacaggagggaggcaggggataggggtagtatctcaggccgtagccttccccagcctgtatccctgttgcctgggagtagccccagtcccattcacaacccgtccgccttcgcaacccgtcccgccaccaatcccaccccaccattagcaaagtctgagctcacctaacactgaatcctcccgttggcccctccttcccgtccagctctccgctccccccgggtccttccaattcccgaccctgtccttgtcctagccttgaaagctggccaggctaaagccacagccgagctcccaccttcctcttgccctgaggggcataatcctgctgtgacttctgtctcagcaagcgtgagctcaggtctcccccgcctccttgaacctcaagaactgctctgactccgcccagcaacaactcctccggggatctggtccgcaggagcaagtgtttgttgttgccatgcaacaagaaaggggggcggaggcaccacgccagtcgtcagctcgctcctcgtatacgcaacatcagtccccgcccctggtcccactcctgccggaaggcgaaaatcccgttaggcctggacgtattctcgcgacatttgccggtcgcccggcttgcactgcggcgtttcccgcgcgggctacctcagttctcgggcgtacggcgcggcctgtcctactgccgccggcgccgcggccgtcatggggttcctgaaactgattgagattgagaactttaagtcgtacaagggtcgacagattatcggaccatttcagaggttcaccgccatcattggacccaatggctctggtgagataaacctggccgcggc

SEQ ID NO: 43893 - DNA, 2300 bp, Homo sapien
aaaagatggtgtgtagatgctggggagggcaggaggttattccagggaatgacaagtgcaataaggtggcctggacaggtggttaaagtagagaggaggtgaaggttcccggagttgggcaggtgaaagaatcatgaaactgtgcctggaaattcttccaagattaattcattaattcatttatttcacacatttgttttaagtgtcttgtacacgccaagcagtgttctcggcattaggtgaaccagctggacaagcccctggtgccatggggcttaccttccagcagggggagaactacacaaacaaggccaggttagcggagcatgcaggctcacaagcctgtaggcacaatcctgcaatgccaaaacttctgaaaagcataaggttgttttttcatactttggagcccaaactcaatagatgacaaaacctgacctgaagtagtgtgaggctatttatagtctttattcacacttggtgtgaattttcatacctttcacttcagaaatattaatatttcattacgatgctccaggcttttctcaatagttatataatatagactatacaaaaagttatgtttgactagtttttttaaagagttatgtaatataaattacatgtcttcctttctcaaattgaaaaaaactctgaattccacagcacatctggccctaaggttggaaaatggattacggacatgcaagtgctatgaagataattcaaatatgcaatgggatagtgtctaggtggctacagtttgaatatttagggaggacccctctgggaaggtgatatttaagcttagttctgaatgaaaaaaaataaaagcagtcatgcaaagatcaggggagagcattccaagcagagggagcagctaatgcaaagatgaacacaaaggaggccactgtggctacagcatattgggccggatgaagagtgctataaattgatggaagcacttcatgtagataggaaaattgtgagaccggtgtgctaaatcctttggtaaatacggtgtagtgattatgagtgtggtggctgtcaacaactagaaggcctggaggggaatcttcctgggtgagaaagcaagtggggggagatatttcagatagagaaaacataaagcagttctgaggctgaaatggtgggctaagatttatggcctgaagaccttggtttgaggaaaagtatagaaggaagacagattagatatctgggctcaagactctaatgacatagcttctggaagctgcctgaaagatgttctaggatgacaaagacctgggtcttaaataatagtctctggttgaagtccaatctgcagtgtgtgatctgggcttttggacttaaattagacaaagatagaggagagtagcaaagcctgaactgatgaaagatgtttttgcctctttaggtttgtgcttctcagcagctgtcctagaatgtctgtctccaagcatctctcttagcggctttccacattcatctctctgtgatcctacctggcatctctcttcctatctcggcctcaacatatttctctttacatggctctctctctctctaactcagactcctcatctttggatctccttgtctgagtgtcccagaatctggttccgtccattcgtctgtgtctgtactgtaattctctttctccacctggactgtgccctcctggaaggcatgaatcttttattattccgctgggtatcccaggtgccccgcacaccgtctagcatataggagtctcaaatacattcatacttgaattaagactttttcagaggagaaaggcatccgttctcaatatccacccctcttcccccacgcggagcaggccacttgccaaaaggccagctagagagtagggcgaggggtgttgtggtattgtacttctgctattggtctctttccccagttgaaataactctggggataccttagcaggcggaatccgccctctggccaaaggactagcgtaccaggccacgcccccacgtctcatgcggcagcggcagacgccccggcccgtcgcatccgccccttccgccgcttcgcctcggccaatcaacgagcgcccgcgcccccatccccatcccgtggagtggccggcgacaagatggcagcagcgtgtcggagcgtgaaggtagaaggttctttgcctctgttgcttgccttcctttacgggccgggacagcgcggccgtggaactaggagaaagagatcggtttcgagggaaagggtcatgcttatgtaggcctggtattgtggccgttgggctcaagaggtga

SEQ ID NO: 43894 - DNA, 2300 bp, Homo sapien
gtgcctgtaattccagctactcaggaggctgaggctggagaatcgcttgaacccaggaggcggaggttgcagtgagccaaggtcgcaccactgcactgcagcctgggcgacagaacgagactgtctcagggaaaaaaaaaaaaaggcattagacttaaggttagaaagatttagtttgatgtcctggtgctgtcttcctcagaaaccaaaatgaggaaaagacagcctactttccaaggccagctgtcagaattcaatgacaaaagtgtcctaaaacatcctgtgtaaactggaaggcaaccatccaaagctccactgttgttacattaccctgaaataatccacagattctcttgaaactagtgaggcagtgactagactagcactatctggatctgcagtagcacctgtggcttttgagcaccttaaatgtggctagcgcaactgaggaaccagattcattattttatttattctgtttaatgtaaatgccatccaatgcaggtcctagaccttgtttcagatgttgctcggtgagtaccactcagtggccagtggtcccctctacttgttctgtatattagttggtgcgtgtggtctagaaagatctaagcagaagggaaattttgaagactttctgactctcttctgtgtgccctccagcctccgatggaaccccacagggggagaaggaaaaggaagaaagaccacctgagttacccctgctcagcgagcagctgagtttggacgagctgtgggacatgcttggggagtgtctaaaggaactagaggaatcccatgaccagcatgcggtgctaggtgagttgtgtcctaaaggcccaggtcccaacccagtggtctgctctggggcccttcctgccagcttgtttttcttccttccaggttactcctctccctcagtgtctctgtaatgagaattcaaaagagaagtgttttttctctgacttcagtataaaaaagattgaccttctcttttaatagttggtgtctttcactttatagacaaggggaatctttataactggttagctatcccatttttctttggcttcaaggaagttcctctgtgacttgattctaccatatttccctgcaagttctcattgtttcttttttttttttttttttttttttaaatcagaaatgaggtctcactatgttgcccagactgatctcaaactgctgggctcaagcaattttcccacctcggcctcccaaagtgctgggatcataggtgtgagccaccacacctagcctagttttcactatttcttcttccttatttatttttataatttgtttatgatggcaaagaggtttgcatgttgaagtttgcagagtaaaatgttacttctccatcattcctaaccctagtgctacagcctgctgtcgaggccttctttctggtccatgccacagagcgggagagcaagcctcctgtccgagacacccgtgagagccagctggcacacatcaaggacgagcctcctccactctcccctgcccccttaaccccagccacgccttcctcccttgacccattcttctcccgggagccctcatctatgcacatctcctcaagcctgccccctgacacacagaagttccttcgctttgcaggtacagggaacttttaggctgccaggtgtagaaggcttcattttaaacaggattgtttcatacagttaatccttagttgatgagagagagagagagagagagagagagagtgtgtgtgtgtgtgtgtgtgtgtgtgtacatacacacacccgtgcacgtaaaccctgcatggtttcccttggcctcaggatactcaggtttagaatagaaatgctcagattcacgttcacacctcaagggctggcccttggttttgactagtccttttagagccctgaaataaggaagaggaaggaagagagagttgctagctggttggctgtcttacagcttctggggcagatgatgtgcttaattcctgctgtcacttctcccctcagagactcaccgcactgtgttaaaccagatcctacggcagtccacgacccaccttgctgatgggccttttgctgtcctggtagactacattcgtgtcctcgactttgatgtcaagcgcaagtatgtgtcctggatattggggggtagaggggtggtgagaactccccaaatggtaactcgcctctgaagttactcttgaggccacaaatttcctttggtgacagcacttggaatggtggtggtgaggagggaagagacagctgtagcattgatggccatca

SEQ ID NO: 43895 - DNA, 2300 bp, Homo sapien
ggagatagatattattttcgtgttctgtattcaccttcttttacctaaggtcatatgatttgcaagtaccggagccaggattcaaacctaaggctgtcagaaccttgaagaatagtcaggatttgggtaaaggatgaacagcaaaggtcaggaagaaacctaagcagggccaggtgtatggggatcaggggttgatgagaaaacagtcacttactccccacccagaagatggggttgtgtcttgctgcttagctactgagcagaggttagaataagcccccagtgagtatcaggaaaagtaccagccatgggattccatctgtcataccatggcttctcagggttttaaactgccccaggacaagatgactaatttagaaggcattagaaggccgggcgtggtggctcacgcctctaatcccagcactttgggaggccaaggcaggtggatcacgaggtcaggagttcaagaccagcctgaccaacatggtgaaaccaagtctctactaaaaatacaaaaatcagccgggcatggtggcttgtgcctgtaattccagctactcaggaggctgaggctggagaatcgcttgaacccaggaggcggaggttgcagtgagccaaggtcgcaccactgcactgcagcctgggcgacagaacgagactgtctcagggaaaaaaaaaaaaaggcattagacttaaggttagaaagatttagtttgatgtcctggtgctgtcttcctcagaaaccaaaatgaggaaaagacagcctactttccaaggccagctgtcagaattcaatgacaaaagtgtcctaaaacatcctgtgtaaactggaaggcaaccatccaaagctccactgttgttacattaccctgaaataatccacagattctcttgaaactagtgaggcagtgactagactagcactatctggatctgcagtagcacctgtggcttttgagcaccttaaatgtggctagcgcaactgaggaaccagattcattattttatttattctgtttaatgtaaatgccatccaatgcaggtcctagaccttgtttcagatgttgctcggtgagtaccactcagtggccagtggtcccctctacttgttctgtatattagttggtgcgtgtggtctagaaagatctaagcagaagggaaattttgaagactttctgactctcttctgtgtgccctccagcctccgatggaaccccacagggggagaaggaaaaggaagaaagaccacctgagttacccctgctcagcgagcagctgagtttggacgagctgtgggacatgcttggggagtgtctaaaggaactagaggaatcccatgaccagcatgcggtgctaggtgagttgtgtcctaaaggcccaggtcccaacccagtggtctgctctggggcccttcctgccagcttgtttttcttccttccaggttactcctctccctcagtgtctctgtaatgagaattcaaaagagaagtgttttttctctgacttcagtataaaaaagattgaccttctcttttaatagttggtgtctttcactttatagacaaggggaatctttataactggttagctatcccatttttctttggcttcaaggaagttcctctgtgacttgattctaccatatttccctgcaagttctcattgtttcttttttttttttttttttttttttaaatcagaaatgaggtctcactatgttgcccagactgatctcaaactgctgggctcaagcaattttcccacctcggcctcccaaagtgctgggatcataggtgtgagccaccacacctagcctagttttcactatttcttcttccttatttatttttataatttgtttatgatggcaaagaggtttgcatgttgaagtttgcagagtaaaatgttacttctccatcattcctaaccctagtgctacagcctgctgtcgaggccttctttctggtccatgccacagagcgggagagcaagcctcctgtccgagacacccgtgagagccagctggcacacatcaaggacgagcctcctccactctcccctgcccccttaaccccagccacgccttcctcccttgacccattcttctcccgggagccctcatctatgcacatctcctcaagcctgccccctgacacacagaagttccttcgctttgcaggtacagggaacttttaggctgccaggtgtagaaggcttcattttaaacaggattgtttcatacagttaatccttagttgatgagagagagagagagagagagagagagagtgtgtgtg

SEQ ID NO: 43896 - DNA, 2300 bp, Homo sapien
cagtacagactttaagatggtgtcctctggcctcactgaaaaccagctacagctctctgtagaggtgagtccaagctcttctgatctgctaagacttggggagaaaggataaacagggtagataatgattttgttctcaggctggggcttactccttctgtcttctttttctcaggtgttgacatcccactcttgttctgaggaaggcttagaggatgcagccaacgtactactgcagctctcccggggggactctgggacccgggacactgttctcaagctgctactgaatggagcccgccatctgggttataccctttgtaaacaaataggtaatagcagaagtaaagcattttctctttctgaaggtttccacttaggtgcttcctctttctggaatcctttcctgaatccccaagctgaatcagatacctccatatccctataacacagcctccatgctccctctgtcgtaacacagattaccctgggttatcatctgttttcctctgctcagttgtttgaaagcaaggctgggtttgtctcctcatccccgctgcccggcacacagtggtgcttaatgaagagaaaagagaacacatgggaacagcagcgcctcctttcttctccatgctgggcactcgtaagagccccataagacagctgaggcagcttcaccccttcaaagtatgtccctacactgcattcagcctcaggaattacagagtcagaatagtactctctgcttttgtgtaattttgagggtataaaaattctaagaacagttacaaattacctcgtttctatcatcttcctccctgttttactgagaagaaagccaaaacccagggtgataaagtgattggaccaaggagtacagccaggttttctttcaacatagagtctgtctaccctgtcccaccctcatcccaatcatgagtctccctagatcttggctacatacttagttctctctctccttcacccccatgtccctaagtctggggtgataggagagttggttggcctgtataactcagggtgttctttgctgcatgaaaattacaacgttcttccagaaagaatttggcctctgacctttctctcttggctgccaccatctattccacacctatgggccaggcactgtctaggcactctaccatataattatctcttaattgtcacagcaacgttatgaggttaggcagtaatattcccatcccagtattaatattggttagcaaattgggtaaggggtcaagaaatttgcctgaaaccaccacagaacctcagtaattttgagagatatatgggatttcaaccatggtctgtttagctccagaggagatactgtttctcttctacatgaaactcatttcatgcagattcagcagatccctgtggccataggtaaattggtagtcccaggtgacggttcgtggacacgcataataagctgaacagagcacgattccagctcactctaggttctctgcagctgagcaatgaagagtggcctaagcaggtgtcttagagagatttggcttttagccactttaccaggggagtctctgaacacttgctgactcctctgcctgctcaggtaccctgctggccgagctgcgggaatacaacctcgagcagcagcggcgagcccaatgtgaaaccctctctcctgatggcctgcctgaggagcagccacagaccaccaagctgaagggcaaaatgcagagcaggtgggtggtagccaccctttggctgggggcttgaatctgggatattctggaagatggctcttgctggtttcctggtcttttttatttctctgggtgattttcgtatctttcctatacacacttgacccatttttttctacttcctacttggaagatttccttctgagtttccttacccctctggttgacaccaggaagccttgcttgctttgggtgtttatactttgatgctgtcaatatacgcaagccacctctacactatccaggtttgacatggctgagaatgtggtaattgtggcatctcagaagcgacctttgggtggccgggagctccagctgccttctatgtccatgttgacatccaagacatctacccagaagttcttcttgagggtactacaggtcatcatccagctccgggacgacacgcgccgggctaacaagaaagccaagcagacaggcaggctaggtatggaactagagtgtccagttgaggggaagggttggtggcggtaaagccagattccttggaggtgcaggacttaacggcctgtctccttc

SEQ ID NO: 43897 - DNA, 2300 bp, Homo sapien
gaatacatttgccagtgtcttagataaaaacatttcgtagatctctttcttcacttaatgttaggtaccatataaaggtacacgaattaactattccctgttaagtttctaatatgctatttttaaaaaatgaacatttttgtatctacttttctacaaatgtaaaattgattcctagaaattactgtatcagagggtattaacaaatactttttaatgtggctactagaaaatttaaattatatatgtgtttcatgttatatttctatcgacagtgctgttttataaagaagattgcttttatattatctcatgataaaaattccaaattttggccgggctcggtggctcacgcctgtaatcctagcactttgggaggctgaggcgggtggatcacctgaggtcaggagttcagaccagcctgacgaacatggagaaaccctgtctctactgaaaacacaaaaaattagccgggcgtggtggcacatacctataatcccagctactcgggaggctgaggcaggagaatcgcttgaacctgggaggtggaggttgcagtgagccgaaatcgcgccattgcactccagcctgggcaacaagagcgaaacaccgcctcaggaaaaaaaaaaaaaaaaattccaaatttcagtaagtagaaatcatacacaattttctgactctaatgctacaaacctaaaatgaatacaagcaacttttccagaatgttttttctctggtgttcagtatcaatgaggaaataaaaaaggataaactattaagaaagcaatgaagataattctgtgtataaaaatgcatcaggccaggcacagtggctcacgtctctaatcccaacactttgggaggctgaggcaggtgaatcgtttgagcccaggagttcgagacccgcttgggcaacatgacgaaactctatctctacaaaaaaaatacaaaaattagccggccatggtggtacatgcctgtagtcccagctactagggaggctgaggtgggaggatcgcttgagcccaggaagttgaggctatggtgagccatgagtatacccctgcactcaagcctagatgacagagcgagaccctgtctccaaaaaaaaaaaaaggtatcaggcttaaaacttgtacagaaattactagaaagggaaatttctaaggaactaataaagctgacataggcttagaaccaacaaacaaggacttacatatgacagctggttattgtgagggatgggataacattaataaactataaagaaacctgacaaaatgagaatttcaaatttagtcaaaacatactaaatttaactcagggaaagaataaattgactaagaactgagaatgaaattagattcactgtcaaagaattgcctctctaacagatatattttttctagcaatttaacacatttaacaaaaacgactcagcttctccacagtttttctggaatgttaagagaacaacttggtgacttgttttataagtttgcataaagctcattcttagatctaagagcaagcatataccaaagaaaaagacacatgtcacattcatatacataattcttaaatgctaggaaataaaattgtccagtggtaatctgtgatgtctagtttgaacttaacaagctataacattctagtagggcatccacattgacagcattgggtactgtgcacactgtagtccatgtgaatggtaccccctgggttgggctgtgcctacaacagtcttccaaggtagccctgggttaatactattcatatgctgtcatttgaagatgtcagcattaggtacttagaactccagaggagcatatcagtaaaatatttgggtcgtgtttttgtttttcaaatttaggaagccatgggaattgaaagagtaacaaaaaccataggtaatcttgtcagtacttctcaaggaaccaggtaaatgttggctctacattgtcctattgctcccctcttatacatctgtagatggggaacaggatggagcagctggaagtatggatgcttctacccagggcttattagaaggcattgggctagatggtgacacattggctcccatggagacagatgaacctactgcttcagactctaagggcaaatctaaaatcacaccagcaatggctgccagaattaagcaaatcaagcctttgttatcaggtgagtcattctcctttctcctaccttttctggctttcagtcccttagtcttgaaacagattgagttggaaaggctatgttgtttcacctaaggaagtttaaaacttctgtgactc

SEQ ID NO: 43898 - DNA, 2300 bp, Homo sapien
aggattttacatatatttaattaccatgaacatttgaggtagatcttaataatgcttagagggagaaaaggtttggacttagcttaaagaaacccctgttaggttccatgttgtttcagatgccgaaaatacgtttctcccagtttgaatctcacgacagcattgctggatatataggtacatgttagtttattttgcagaagaggatgctgagattcaaagaggtagcttaccaactacctgattccaagggtcatactctttttaatagtatgctgtctctgaatatttaagctcctgtaatgggagataagtattttatgtatgtggcagacgtttgagtttcatatttgtgaggtagctattaggtctgtttttctgataagagagctgtggcttagaggttagacttgctcatgatcaaacagcttagtaaacatgaagttaaaaagtgaatccagacttgtttggttccagacctctggtccattcccaggatgctgtactgcctttatggagttaaagaacaagtgtaataatcacttctcccagctgccattcattaacggaaggcttctctctcccagcccctatccctttccctccttccactttcagaaacttgactataaatgctcaatccactccttgttacctgacaaatggacccattcatcagtagaagagagcagaaatgtatggaaataggaaccccaagaaagaatggagtcctagttttacgaagttcggaagctgtttaccatcttacaagtgaaggattttatgtaacagaaaaatatagctagtgctaatcttcacctttaattgtgaattcactaggacttttcagtctctgattcaatataacctaccaggcattctggttaactttcagaccatggtatagattccttaattgtttttttttttttttttagatgtttaacttattattgtttttgttgtcagcacctttccaaatagtttgtctgcatctacctttatccaaatccaaggtgggtttttgttttgttttttgtttttttttgtttttttttgttttttaagcccaggtggattgttgggggaataaaagcattttctcatgaggtttccattttaatcccaagagattgtctggcacatctcgttttcttaagtagtaaatcctagcaaaaggaaaattgctgtgtgagcttaagggttccttttctgattctccttatttgcaactccctcattccaaaacatcttttgtgaatacttttcttttctcagcctgcagactgcagagccttaatagacaaactcaaagtttgtaatgatgagcaacttctcttggaactgcagcagatcaaaacatggaacattggaaaggtatgtgaagtcaagctcccaaaagacaggactcaccatactaatacatcattttgtatgctctgatatggaataagaaaccacaatgggatagcctcattcagcaattaataagcatctagcatgtgccatgtgcctaacacagctttaaaccagtggcaaggaaaattttgctggctgaggatggagaattgatttcacaggtgatgcttaagaatctcaatcacagaattcctgtggtttgacaatataagtttgagataatttctggatttttagtttagaagaatttttattagataactctaaaaatgaatttttctgataaaatggattctggcaaggatagttctcttgtcttcgtagatcttagaatgtaaccggagttctccatctaaagacctagctctaggggttttatggtgtctattggtgttagcacatatatctagatgggtatgacaatgaactacagcacttttagctcagagtatgatctttctcatatgggcaagggtgggacgtgaacttgtctaggtgtcatgctcagcaatctcttgtaacaaagctcagttagaaagcacccatgcggcgcttctaccttattcttacatcctctttttcctcccctctccagtgcgagttatatcactgggtggacctgttggaccgcttcgatggaatactggcagatgctggacagacagtggagaatatgtcatggatgctcgtatgtgataggccagaaagagagcaactgaaaatgcttctcttggctgtgttgaacttcacagccttgctcattgagtacagcttttcccggcatctgtacagttccatagaggtaggggaggttaaagcctgtgtaccctgttcttgactagaattgtgtacatccagaaataaggaaattgctatttcta

SEQ ID NO: 43899 - DNA, 2300 bp, Homo sapien
gagacggggttttaccgtgttagccaggatggtctccatctcctgacctcatgatccgcccgcctcagcctcccaaagtgctgggattacaggtgtgagccactgcgcctgcctggcctttgtttttttaagatggagtctcgctctgttgcccaggctggagtgcagtgagccactgcgcccatcctctgggaggcttttaaaatagatttcttgggttttctatgtggatgatcctttgacatctgcaaatagggaccatttttattttttcttttcttatctgtgtgcctgttatttctttttcttactgtattatattggctagaactttcagcagtatgttgaataaaagtcatgataacagacatctttgccttgttcctaatcttagagggaaagcatcagttatttgagttgtattgaggctggctgctacgtcttgcagcaggggcagtttaatagcctccctgcaaatgactgaagcgacaatagtgtgacagccacttgcgtaagacgtttatgagaaaaggggaggaaaaaagccttgagagtaagcgtacaaatagctcagcttatagtttccaccacatggacaggattgttgccagaatcctgttggcttcatttgagatattttgaggttgttggcatcaggcattttgttcattttgtattgatactgagataactttttaaaaagtaatctggaattacacaccctaaatatcaaccatagaaaacattttttcttcttaaggaatggtctctgcagaaatgttttagaacgtattctgaatttttcacaaactcttccttgaatgcctgctgattgaatggatacaggtcgtacaggcaaatacacgctatttccatagtactgagtatattggactaaatctaggcaaaaagctgcctaaaatttatactgtaattggtcagctttatattatggcagccttctcgggggaggaacattgatttctagtgactgccactgagttaaatacattgttaatagcagaatcttttgtgtgtaaagagcctgcaacccacttctacctctgtgcatgtgtcttagttgctaacaggagaaacttatttcttcttgtgctttggaggacttgtctgccatcaaagatctagggattatacagtggatctgatcaggctgttgtctgcttttgagccttccaaattacatggcttaataaaatgattgttttctgtgctcagaatatttctgttgtgatccttatacttcattttctagttgaaaaaagtgttgttttgcctttgctcttatgatacaactaatacatttttattggtaggaacagtaaaaggtgcataggtaaaacagtcatacttaatccttttggttaacaatgaattaatattctgatgcctagcacctctaagctgttttctttagacataagttttataccgtatgttctgtgttgtaatctttttatttcatcatgaacatctttgtgtattacatagtttgcaatatttttaacagttgtgtgacattccattttaaaccagtcgtattttggacatttgatcttttttttagccttgtgatggaacagtaggtctttttcagtcttttactattatacatggtcatgcagtatggattcttgtggttaaatatttgtgtacatctttacgactttctttggattaattcctagaaatggaagttatcaggaaactgcagggctatggtgaatttttccatcctgagatgtgttgcaaacattgtacactcttattttcaattaagagtttgagatgcttgtaaaagagaaaaaattttcattttgacctgatttggtttcagtcttgtgcaacatagggatgtgggccagtttgatctggagagattctttacctctctctacctgatagctgtgcctctgagttggcatagcatcataactccagtgtttttactttaagcattttgcattgctcttcattctgtattgtctgtgtccaagcttgtagagctcaagattgtagctttaagttctcacttcttttgggattttcttttttcagatcgtaaagctgaaaattgaaatcatgaaagtagacaggactaaactgaagaagacacctactgaggctgtaagtatccaaaagtttactttgcttattttttcttcattaaaaaataaaaaaatatttgtgaacagttcatccatgctcttcaaatctcatcacccatatatacaaaaggcagtaaaacaacaacttgtctagaaacagtaagattttctttt

SEQ ID NO: 43900 - DNA, 2300 bp, Homo sapien
agagagagtagaggccgggccttcagcgtttctcactggttcgaggaaggcggcctcagaggagagggaaggtgaggggcgggcaggcaggcttcgcgggtaactactaggcgttgcatatatatgttttgatatctaaatggtactacacacacacacacattcatttcgactaactgcttgtttaaaaatctgagaatatgtcttgtagatcttcttatatccgggaatccaaatttatgttgggttttaaacagctgcattgtatgattgtactacagtttatttaaccatttcccgattgatatacattagcttgtttctctgttgggggagggaggggactattacaagcaatgccataatgaatgggtttgtgtatatgtatcatgccatgtatgagtatttctgtaggagaaattcttagaagagtaaccgctgggtcagggtgtatatgcattttgaattttgatagatttgtccaaattgccttcccaaaagcctgtactaatttacactctttaatgttgtgcgagagtgcctatttttccacagttatgccaacacgtattatcaatctttgtaattttagccaatttaaagggcaaaaaaatcgtatgtcattgttttcatttgcatttccctgattactggcgaaattgatcatatttttgtttgtaaataggcaaatatcaatagtttatataggcagttttcctatctataagcaataagcattttgaaattttaataataaaaaacctgttcgcaatagcaagagaaacgaataaaaatacctagaagtaaactataaaactttattgacgaataccataaaagaacatctgcatgaaaagagaaggaatactatgcttctgaataagaaggctcaatattttagtgatgtccatttttcctatattggtttatacagttgatgcaatttcaataaatataccaagtttttttggaacttactatgattctaaagttcatccgggggaaaaaaatggctaagaataactgaaaaaaaatattttaaaacgtaagtaaagatagggatatttgtactactggctattaaaatgtactctaaaggaactatttaaattagaacggacagaacaatgcattagaatggaaaagcccacaaatcaagccagattggatcccaagatttattggagaaacactgttggctagacgtggaaaaactgccatattaaaagcttcaggcatttccccccatccccgaagcttgaatattcctttgagggcagactcctttgtttggagaaaaccactttattggatctttttggttatgccaaggtaaagcttcagtagttaaaattggtggctttggaactagaactaatgatatggcctttagttagattaagatggattcaggttagcctgcagtgcggcgagggaaggagtctggataatgtaggtttaaaaatttttttccctatctaatgggcaaaaaatgttatgtcattgttttcatttgcatttgtgtgcttactgtgagattgaacgtcttttaaatgttagtccaggataatatgttattcctggagacaggtaacaatgggggactctttgctccgcttccagaatggagtttggctaattggtacagccttgcccggaagcgtgagaataaacaggttgactttttaaattttcctcaagcactaggctctagacacctagatcgggggcggaggcagttttcaggacatggccgagatttggcgctgagctgtgtcatcgcgaggtttggcagccagctccgcagtgggtcggaaacctcgtggtaggcgagatccctgcaggacgggagggttcctcccttcccccgaaaaactcccagtcattttcatgaagctccgcctttctcctttttaggagtgtgcaccaggtctcgcgatatctcatgtttcctaaaggcgaggcgcgggcggcatcctgcggtgaattaagaaggtctcgccgaggctaaagcgtaatatcgcgatagttctcaacgcatgcgggagccggccgtggtaggttggctccgcccctcactgcttcgttaggttgtgcgtcatttgcttttcgcttcgcgtagggtgaagctgtagctacttcggctttggtgggagggaggaggggtctggaaagggctgggctcaggcttttcccgtccggtagaggttctcgcgggatcgcgcggaggcggcggtggctcggttactgactgcagtagccgcggaggcggcggcaaggtcttcggctcgtgccgttct

SEQ ID NO: 43901 - DNA, 2300 bp, Homo sapien
aaatgctaattcttactcactgctagtggaggtataaactgaaatagtcgttctacgtggcaatttgtcatttgacattatgtattagaatttcaaaatgtgctatctttgggcagagaatagtggctcacgcctgtaatccaagcactttggtaagccgaggcaggaggatcacttgagccaaggagtttgagaccagcctgagcaacgtagtgatacctcatctctacaaaaaatacaaaaattagccaggcgtgatagcacacgcctatagtcccagttactcgagggaagactgaagtgggatgattgcttgaggtgggaggatcgcttgagccttggaggtcaaggctgcagtaagccctaatcgcaccagtgcactccagcctgggtgacagtgagacactatcttaaaaaaaaaaaatgtgtgctacctttatccaactatttcatttctccatgtttatctcacagaaatattttagcatctgcagaaaaaagcatgtacaaggaattttattgcagcattgttaacagtaaaaaaaaaccccactgtaatagtcaaagattgaaaataacatgtgtttatccatagatgaatgattacagtatattcattcaatggaatactatgcagtaggtaagataaatgaggtagatttatatatattgacatggaaagatcttcaagctacattaagtgaataaagcaattaacataacaatacataaaaaggatgctatttattttttaaatgaaaaacaaaaacaaagccatgcttttctatttgtgtatatgaatgtaaggggaactttaaatttatccgtgttttacaataatcatgtgtaattaggaaaccaattttaaaatgaaaaaagaacaaccgaagttaattacatgctaaagaaagtatagcttcatgttgccactaaatgttacagatgggccgggtctttcgcctgtaatcccagcgctttgggaggccgaggcgggtgaactgcttgagcctaagagtttgagaccagcctggcaacatagtgagaccccgcctctacaaaaaataaaaagttatccaggcgtggtggcgcatacctggaggcccagctacttgggagactgtaggcaggcaggaggatccttgagcccaggaggtcgaggctgcagtgagtcgtgaccgtgccactgcacttcaccctgggtgacagagtgatgctttgtctcaaaaaaaaaaaattgtaaaaatattcaatgaaacagtgtatctcgaaggggccctgtacatctcctgagatcatatacaaaattttatgtgtaagtatatattggggtgggggacccattcattagattctcaattcgagggatgaaccactgctctggagggctggaattagagaagtggagggtataatcacagtttttatttcctcgatgtctcaggagttcttttaatagtgcttttgtctttaaatactaaattaatacatactttttattaaaaattgaaaccttatcgaagtagctagagttccaagtcaaagttcttcgcccctccaatgtcgtccgcagcccacaataattaagtagggttaacaggtgatctcccaccaggtcctttttattcccatgtatttacagatgcagatcctctacaggatccttgtcaatcgcactgccgttccaaataattaaaggaggaaaaaagaatgtttattgagggcttactatgtgcctgaagtgttttaagggtttgctcgcgtgaactctgggtggtcggcttcccacgtcgtctcccaccctccgctctgggtccagccttgccctcttgccccacactccccattcttcacaaggcatctggcgaggtcgttaatttttaaaggtaaatcagatcaaatcatgttcccttccgcggcttccaccgtgcctcgaatcaaatcccaattcttagcgaccctatcatcctctatggttgcatttactgggccttgggtagctcaggcgcggtcccctgcaagggacccgacttcaccgcggagggagctccctcccgaggggcaggggcggggcttcgcttgcggtgggtggagccccaaatcgagtttgagctgagccgaagcgaggaggctttcgactgagggctagcgaggggagcacggctggagcagggctggagcagggctggagcagggctggagcagggctgaagcagggccgcggaccccgcacgctcctgcgggccccgcggagccattgcggccgaggtgagcgtctatccctgggctggagggcgagctct

SEQ ID NO: 43902 - DNA, 2300 bp, Homo sapien
ctatgatccattttaagtttgtgtttgtgtgtatggtgcaagatagggattgaggtttgtttgtttttgtttttttttttgcatgtggatatccaattggtccagaatcatttgttgaaaagactactctttctccattgaattgccttggcatatttgtccaaaatcagttgtctctttatgtgtgggtttattcctcatgcctcttgtttgacaggctctgccagaccatgaggatgagatcccggagacagtgcgaaccgtacagctcattaaagatctggccagggagatccgcctggtggaagtaaggagcatggggcagggaagaaaaggcatttggaaaggccttgaggctcaagtggcaggttaggcctctgcagttagcatgagagcccaggggaagggtcgggaagaccctaccaaagacccaattcattcgttcaaataattattactgtgtttcaagtgtgccgcacattgggctaggctcttaaaatacgtaaatagtgcctgcccacaaagaactcagcctaatagaggaccctgagcaaagttaacctctttgagtttcagtttcctcatctctaaaatggggataattgtacctactcgaggattgttaaaaggattaaataaggtaatgtgggttgagcacaaaaatagagtgcttggcacacagtaggtgcacagtaaattctgacggtgggtcgtggtggtgggtggtggtggtagttgtagttgttgttattattaatattttgactcagtctctgcattctgcaaaatgacagttctctcggggtgaagatgattacaaagccatgtttcaacaggtggcatataccacgaggcagtaaggtatagtggtaagagattcagagaaacctgggttctggttcctgctctgtcacttgcaagcctttcagagcctcagtttcctcatctgtaaagtgaggataacatcaacctttcaggattttgttaggatcaaaagctaatatatgtagagcccctcgcacagtgcctggcagagtaagtactcaataaatgtgagccattgttattagtagactttaatagcaaagagagaagttggtgtgggatggtgaagtagcagaggcaccagaggagaattcctttaagctcagaagctgtaaagttttatttagtgcccaggatatatacatccatgctgaagggtggtcaaagtgagctgggaagttgtgcttctagcctcaatgcttgcagcatgtttcactgcctacaccatagcttacagtgtccacctcctacctctcattttcctccagtcccatctgtcaaaatcattcaggatagttaaaggcttaccttttctccagcgcctctcacttaaaccacaaaactttgggctggttggaagaggacttagagatagattatatgtggtccatgggctttcaaatgttttaaagcaatggaatcctttttttaaaatgacatcttaggtggaagcccaatattcaaagcataactgctttgaataagatgaaggtgggaggcccagggctccacttgttcttctcattcgccttctaccttcccccgattctcggggctcctcccaagaagctcaaaggagccacagaacatcttcaaaaatcacctttccagtctagtcctttaattttacagctaagcaaacagtctcaaatggtcagataactttcctgagctagttacagagctagctagcagcagaattaggactagaacctctccttctctcaaatcctgtagtccttagaatttgaaccacacagattagtacttgattattttctgtctcatgtcagctacttaatggagtattttctctccagttttgacagtagtgctttgctcgtcttcttacttgtcaatggctgggtaaagaaatgccacccaataaattcttgatgactcattatgtaaaagctagggtgtgcatatgtggagcatctataagccacttccatggcagtaccaccagtaccaggaacagacctctgctgttagtgttgagagaacccttgagtaagctctaaccccctcatgtactaacactcttgtaggacatcttccaacagaacgttgggaagacgagcaatatctttgggctgcagaggatcttcccagccggctccattcccctaaccaggccagcccattccacttcagtgtccatgtccaggctgtcactgccctccaaaaatggttcaaagaagaaaggcctgaagcccaaggaactcttcaagaaggcagagcgaaagggcaag

SEQ ID NO: 43903 - DNA, 2300 bp, Homo sapien
ggtgtgagccaccgtgcccagccaccaatattatttattatcaattttttttttgcctttctgataaaataaatcgtgaaatcctgctgttcccacttgtacttcttttctttctttcttttttttttttttttttttgaggcggtgtcttgctctgttggctaggctggagtgcagtggtgcaatctcagctcactgcaccctccgcctcctgggttcaagcaattctgcctcagcctcccaagtagctgggattacaggcacgtaccaccatgcccagctaatttttgtatttttagtagagatggggtttcaccatgctggccaggctggtctcaaactcctgacctcaagggatctgcccaccttggcctcccaaagtgctgggattacaggtgtgagccactgtactcagctcacacttgtatttctttaattatgaaggaaataagtagattttttttttgagacagggtctcatttgagacaggctggagtcgggtggtgcaatcaccactcactgcagccctgacctccctagcttaatccatcttcccacctgcgcttcctgggtagctgggactacaggtgtgtgccaccacgcccagctaattttttttttgtattttttgtagagacggggttttgccatgttgcccaggctggtctccaactcctgggctcaaacaatctgccttccttggcctcccaaagtgctgggattacagttgtgagctattgcactcagccttagatttcatacatttataaaccagcttgattgttttctctgtgaactacttgcttgttttataggcattctgttgtgttactattactgatttataacagctttcttggagaaaattttaatttctatatggttaagtttattactatttttaatgactgctgggtttttcccaggtttttctactcttaaagctttattttttggaatttaatctttggaccatctaggattatgtaaagaatgagataggcaggccaggcacagtggctcatgcctgtaatcccagcactttgggaggctgaggcgggcagatcacctgaggtcgggagttcaagaccagcctgaccaacatgtagaaatcccctatctactaaaaatacaaaattagctgggcgtggtggcgcatgcctgtaatcccagctagtcgggaggctgaggtaggagaatcgcttgaaccctggaggcggaggttgtggtgagccgagattgtgccattgcactccagcctgggcaacaagagcaaaactctgtctcaaaaaaaaaaaaagaatgagataggcattgagcttgagcttaatatatttgtcccaacacaagttgtcagagttgtcaaatacaaatctttcctccaccatgatttaaaagaaaactattttctgcaccatgatttaaagaaaactattttctttcttttctttaaaaaaaaaaaaaaaaaaaagacagggactctctctgtcacccaggctggagtgcagtggcatgttcaaagcccactgtaacctcaactcctgggttcaagtgatcttcctgcctcagcctcccaagtacgtaggactgtaggcctgcaccaccatgccctgctaattttgaatttttttgtggagacgggtttagaaatgatgcccaggctgaaactcattaagtatgcacgttgagaaagttgttgtatatgcatgttgagaaagttgttgtaaaaatgttgttgttttgtttaaatcagtcttttctctttgacagtgttttaaattgggtaatgctgctcttggtttgaacaaatctgtcaaacttgtcagatgtgtcttttctttctggccaggctgttgactgatttcttcttgtcacccagagaagagcaccatgttggcagaatactccccacctctgccagtgacctggtctcttgccttggacagatcatttcttccctggcagatgaggtttttggcattagttgccagctcacattaagtcccctcataaaaaccccacctcttgggtgagtggcagcctccaataaggcctttagtgggcagggcctcaggctcaagctttctctcctgcggcccacagctcagatgaagtgattctgaagcccactggaaatcaactgaccgtggaattcctggaagaaaatagcttcagtgtgcccatcctggtcctgaagaaggatgggttgggcatgacgctgccctcgccatcattcactgtgagggatgttgaacactatgttggtaagacactacagacccttttaactgtaacattg

SEQ ID NO: 43904 - DNA, 2300 bp, Homo sapien
actaactcagcctttcctctcatcccccctcctctcccctcccctcaggctatagtcagaaaattgtgggacaggtgcaaacaaatccttgaactgtatttgaactgaagtgaaacagtagggtcaaagaagagttcagagggagttgtggagttggcagcagctttacagaggaactacactgagggcctggggacagaacgcgggtagcacagggcacaaggttcaacgtccctgctccgggactcaagtcacttggcttctcgaagcccctgccttcatttggtgataatcacagagcttccttcacagggggaagaaccaacaacgcagagaccgtgggaaagagcccagcctatcgaaggtgctcaatgaacaggagccgcggtgagtactccgcctctaccccggctgaagcccgcccccgccgccacctattaattttgtagtttggagtcaccgagttcacctcctctcataggaggagaaggctggggaggaggagtgtgcgagtcggggtagctgaactccctgtttgcccggaggagggggaaggctaggaagtttcgggccccactcaaaatggagccaaacgtctgcctcgcctaagatggcggcttctccgcctctgggctcaaggtcttcagcggcgattgggcaccttaaagagacgagcgggtccaaaggtggctgagaaccgccctcctttctcaaggtggcgccccgcccccccgatgacgtcacccgggagccggcggctcgcggttccccgcctccgccgcgctcacctcgcgagtccagccctcataagatggcggtcgccttggttgtctgggtagcgccgccactctcaacatggtagctgtttatcccgtatttctcctcccctctccgcctcaacttcctcattgttttgaataaactttattgactactccgaattgcctaccaccgccactgggcttctcccagcgacttttcgggccgtgtgcctcggacgtggcggccggttcatctctttccccgttggtttgctcgcgagtatctcctgccggcccagcgacgacgccacttgcccgttcgccgggcggccgccagactaggcccaagccgcggtctccagtaggcccgaacggccgggccgaggggaatgttgtggaggaggctgctctgaagcaccgttgagcggctggcgccgcgcgacccagcggggggctcgaggggaaggcgagcgaggttcccggcggtacggggactatcccagaattcgacgcgcgtcgccgtaggggccggaactaccggacgagcctccgctgaggcgcttcgcagtcccggagctagcccggctgccggcgtgtcgctggggctgagctccgcgggcgtggagtccttgcagcccaaagcatgaggaggtccctgtaggattctggactgaagacgttcttgtcaggtttggggcgtgaggaggttcctgtcagttggggaagcgttaagattcctgtaagttttgggggctgcgaggctattactgtcagttttaggatatactgtgaggtacctgaacatttggggagactagggagctctcatcagtttgagggggggctgcaaggaaacgctgccagtttccgagcgatgcaaaagaatccttgcttagtttcgggagtgtgaggaaattctagtcagtttgaggggttttgaatagatccttttgagtttcagggatgcagccagaaccctgtcatctttaaagtacagaacgagctggtcagtttagagatttatatttatttcagttttgggggtgatgagactcctgactggtcggggaaggaatgatattgagagtgatggaaaggattatttaaactctccgaacacgaccccagaactgtgatttgagttgggcgcctagtcttgtctgtcttgttcgtgaaggctttgagtaacctgaagagactttcagggatcccttatctctctctggttggccctatttcaggtggtgagaggagggtcttgtcttgagatacccccagcctcatttttgacgctgtggtttgcgtcataatagagggagccctgtgaaacaggggtcagctaggggagggttcagtgagagatgaaagaagcttcccgaaaaggcttcaggtattttcttgaaacccggaaagaagttatcactgacaacggggccgaagaaggtggggggtggggagtggagagtgtgggggcggtgggaagcctggaaggttgagctccgttctttacgtgtgaaagaaattctaagggccgggtgg

SEQ ID NO: 43905 - DNA, 2300 bp, Homo sapien
gagtgtggtggtgtgcgcctatagtctcagttactcatgaggctctggcggaaggaccgcttgagtccaggagttctagggtgcagtgagctatgaccgcccagcctgagttgacagagtgagaccttgtctctaaaacaacaaacataaaaaaaaaaaaaaaccctaaaccatcctctgggtaagtcacaaatatgagactaagctacccctgctcaaaaacctgtgttttctttttgctaactgcatacaatctaaactcttttgcatttcgcaatctttcatgttgtgaccctttactgtttgacctcctacctatctctcttctgttttccttgttccaacaatattcaacttctagtaaatatttttctatgtgcctccatgcatttgtacacgttgatccttttgagtacaatgttctcgcttgtttatttaagtgaacttaatcgtccatgtccccctgccgtctttcttacagcagctgcaagcagcttgtaaggctcttttgtagcttcatgttgcattttgcaaaggtcattttgcaggtggtatttgtgtgcttactgtgccttctattccaattgtttactcgcaactttgtttcctgcactggcagatgccctcccactccagaggccctgttttcaccattgcatccccagggcctaccccaccatcactggttagtaaattgtgtgcacgcacacatttcctttttaaagcaatgggaccctttaagaaaatgaaatagtaagataactcctagagaattttctagaatgtttgagaaaacctaggccatcttgaagcatatgtacgaagctccactaactcagcaaagctccactaactcagcctttcctctcatcccccctcctctcccctcccctcaggctatagtcagaaaattgtgggacaggtgcaaacaaatccttgaactgtatttgaactgaagtgaaacagtagggtcaaagaagagttcagagggagttgtggagttggcagcagctttacagaggaactacactgagggcctggggacagaacgcgggtagcacagggcacaaggttcaacgtccctgctccgggactcaagtcacttggcttctcgaagcccctgccttcatttggtgataatcacagagcttccttcacagggggaagaaccaacaacgcagagaccgtgggaaagagcccagcctatcgaaggtgctcaatgaacaggagccgcggtgagtactccgcctctaccccggctgaagcccgcccccgccgccacctattaattttgtagtttggagtcaccgagttcacctcctctcataggaggagaaggctggggaggaggagtgtgcgagtcggggtagctgaactccctgtttgcccggaggagggggaaggctaggaagtttcgggccccactcaaaatggagccaaacgtctgcctcgcctaagatggcggcttctccgcctctgggctcaaggtcttcagcggcgattgggcaccttaaagagacgagcgggtccaaaggtggctgagaaccgccctcctttctcaaggtggcgccccgcccccccgatgacgtcacccgggagccggcggctcgcggttccccgcctccgccgcgctcacctcgcgagtccagccctcataagatggcggtcgccttggttgtctgggtagcgccgccactctcaacatggtagctgtttatcccgtatttctcctcccctctccgcctcaacttcctcattgttttgaataaactttattgactactccgaattgcctaccaccgccactgggcttctcccagcgacttttcgggccgtgtgcctcggacgtggcggccggttcatctctttccccgttggtttgctcgcgagtatctcctgccggcccagcgacgacgccacttgcccgttcgccgggcggccgccagactaggcccaagccgcggtctccagtaggcccgaacggccgggccgaggggaatgttgtggaggaggctgctctgaagcaccgttgagcggctggcgccgcgcgacccagcggggggctcgaggggaaggcgagcgaggttcccggcggtacggggactatcccagaattcgacgcgcgtcgccgtaggggccggaactaccggacgagcctccgctgaggcgcttcgcagtcccggagctagcccggctgccggcgtgtcgctggggctgagctccgcgggcgtggagtccttgcagcccaaagcatgaggaggtccctgtaggattctggactgaagacgttcttgtcaggt

SEQ ID NO: 43906 - DNA, 2300 bp, Homo sapien
catggtgatgtgttttataaagttcacaaaatacatttaaacaacaattggttcaaagtgctgtccctttccactgagggcctggccatactttcccttgcattaggtggtgttggagctgcctgacatttttgagatccacctaaggggaagttgatttgggggatatatttaggttgggtttcatgggatatttgttatttaaaaattcattttatttttattttgtagagacagggtttcactatgttgcccagcctggtcttgaactcctgggctcaagtgatcctcccatcctgacctcccaaagtgctgggattacagacatgcaatctgcacccggccccatggtacatttacatgtgccttgtatcacttctcttcgtaattattacccaggtgaaggaattgcttgtagaaatactcttactgcctacctttgaacctaattttgtattcataagtcattttttttttttttgagatggagtctcgctctgtcacccaggctggactgcaatgacacagtctcggatcactgcaacctccgcctcccgtgttcaagcgattctcctgcctcagcctcctgtgtacgtgggactgcaggcatgtgccaccacacacggctaatatttttatttttagtagatatggcgtttcaccatgttggccaggctggtctcgaactcctgaacttgtgatccgcccgcctcggcctcccaaagtgctaggattacagacatgagccaccgcgcccggctatttttttcttaaagacgtctcacccttcctcccccaaaccatataagcttcaggtcccattaaacctggacctttcagtgcagtggctcaggcctgtaatcccagcgcttttagaggatctgaaaccaggagtttgagaccagcctgagcaatatagcgaggcctgggctctataaaaaataaaaaataaccgagtgtggtggtgtgcgcctatagtctcagttactcatgaggctctggcggaaggaccgcttgagtccaggagttctagggtgcagtgagctatgaccgcccagcctgagttgacagagtgagaccttgtctctaaaacaacaaacataaaaaaaaaaaaaaaccctaaaccatcctctgggtaagtcacaaatatgagactaagctacccctgctcaaaaacctgtgttttctttttgctaactgcatacaatctaaactcttttgcatttcgcaatctttcatgttgtgaccctttactgtttgacctcctacctatctctcttctgttttccttgttccaacaatattcaacttctagtaaatatttttctatgtgcctccatgcatttgtacacgttgatccttttgagtacaatgttctcgcttgtttatttaagtgaacttaatcgtccatgtccccctgccgtctttcttacagcagctgcaagcagcttgtaaggctcttttgtagcttcatgttgcattttgcaaaggtcattttgcaggtggtatttgtgtgcttactgtgccttctattccaattgtttactcgcaactttgtttcctgcactggcagatgccctcccactccagaggccctgttttcaccattgcatccccagggcctaccccaccatcactggttagtaaattgtgtgcacgcacacatttcctttttaaagcaatgggaccctttaagaaaatgaaatagtaagataactcctagagaattttctagaatgtttgagaaaacctaggccatcttgaagcatatgtacgaagctccactaactcagcaaagctccactaactcagcctttcctctcatcccccctcctctcccctcccctcaggctatagtcagaaaattgtgggacaggtgcaaacaaatccttgaactgtatttgaactgaagtgaaacagtagggtcaaagaagagttcagagggagttgtggagttggcagcagctttacagaggaactacactgagggcctggggacagaacgcgggtagcacagggcacaaggttcaacgtccctgctccgggactcaagtcacttggcttctcgaagcccctgccttcatttggtgataatcacagagcttccttcacagggggaagaaccaacaacgcagagaccgtgggaaagagcccagcctatcgaaggtgctcaatgaacaggagccgcggtgagtactccgcctctaccccggctgaagcccgcccccgccgccacctattaattttgtagtttggagtcaccgagttcacctcctctcataggaggagaaggctgggga

SEQ ID NO: 43907 - DNA, 2300 bp, Homo sapien
ggaggctgaggctgaagtcgaggctgcagcgagctgtaatcacaccactgcattatctggaagctgggaattgaacacaatgaagactctatttctcacctttgttcttctctgaaagtctgcattttttctctctttctgcagaccagcatctttcacttctgtccctctggtgggaaaattggttgacagcttccaagctttacacttagagaaaagctggtatctcttgtctaattgcaaatttctagaaaatgagattttgattgccccaggttggattagctgcccacctctgacccaataagctatggttataggaacacgacagtttttgccataaccctataaatgggggaaggtggagggtcaattcccggaaaagaggggctgggcagaccgtcccacacgtgtccattatactaaaaaacctccattccttccatccttcatcccttcaagccactgctctctcctttcactgcttgctttcaagagttaactatgtacactgccttgccatctacttattctttgacaatctggcttgttccatctccactattttataatttcttttatgtagcttgaagcttttttgcttttgcatcctaatagagtattcccctatctcattcatcccgatcactcttgggttctgcacttctgcattctaactctgcctgccattatctcccatcttccagtaagttccaagccagatctggctactactcatttcagatcttgttttctgctttattcctgctgaaagagtgggccggccctaaaagccagaaagaagacaggcactgcatctgtttcatctcagtatgttgaaaatacatttttcaaaagattatgactccatacatctgaaattagagcccttgcagctatttagaaaagctcccgacagactaaaacacaatgaagtttggaaaccaaaggccctaaccataggacatagtggatctaggagtaccaaaaaggtacaatttgtaatgtaatttgtgttggtaattatctccctgcccaaagagatgctgagggcaaggatattcgatttaactttgtctctgcattgccttaggcaagtaaataatgtaagtttctttttatttatttatttatttttgagacggagtctggctctgtcaccaggctggagtacggtgacatgattttggctcactgcaacctccgcctcccaggttcaagcgattctcctgcctcagcttccccagtagctgggattacaggcacgtgccaccacgcccggctactttttgtatttttagtagagacggggtttcaccatgttggccaggatggtctcgatctcctaacctcgtgatctgcccgcctcggagggattacaggcgtgagccaccgcgcccgaccagttacgtctttcttaattgggaccaacagctctttaaatattatctttccactaaggggaaaatcctccctcctggggagttttagctcactttagctgaattcagtcaatccactctaacttccattcccatgatgcatcaatccatcccccaaaactctttttccaggaaaaagcagtaaataacctaagcaactcagtgagatgcaaggagttggagtgcaactcctaaacactcatcatcacgccccgcttcctgtgaccctgtgagcacaagggctgagaagggtggtagtctggttcctcgactatatcctaaggccatagagaagactacaactaccaagatgcccctctccccgccccgccccgcccctcctcgctccccttcctccagctagaaagcgtgtaccaccgagaagacgaggcaacatggctcccggaggtggaagaaagaggcttcaccccttctaaagcgggaagaagagcggccggaaaggagaaaaaagagaagtgactagagcccatcctcgcttttatcctcccagcctctcccgggtccggtctgcccctccccttctctctacccaaatccaatttgtggtctcctcccctccccgccctcattccctcgcttcctcacccctcccctcgggaatccttttcccgccccccctcgccccccgcggagtgcgcacgcgcccgcccccagcttcgcgcccagatcgtcgcctatcctgcttgcgcagccgctatcgcgtctgcccaccgacgaagcatgggtgtccagggcttccaagagttcctggagaagcgctgtcccggggccgtggtgcccgtggacctcctaaaactcgcgcgcacggtctcgcgccagcagcagcagcagcacttg

SEQ ID NO: 43908 - DNA, 2300 bp, Homo sapien
ttccagtgtggtatttgatacagctcatcattctgtagaaatgtgcagtttgcagatagaacactgcacacagaaatgttttttcacttcaaattctatcctctttgatacttgattttttaaaaatactgttcagaatgctttaataagctcagcttgagcattaccatttccaggacactttccatgaattgttgagaagctccccatcccccgccttttttttttttttttttaactgctgctatctgcagctggatactcttctttaaaaatgtttaaaaattatttagattgattctccccaaatgtggatgaactgagaccctccatcagccagagtcttatgggatcttcacttcacatgtttgtcttaggtttacctttcacagaaggcagggtaacttgctgcaggaaacgttttggtgtataaaattagaatcacttttttttttttttttgagatggagtctctctctgtcacccaggttggagtgcagtggtgtgatcttggctcactgctgcaacctccccctcctgggttcaagcgattctcctgcctcagcctcctgagtagctgggactacaggcgccagccaccatgcctggctaatttttgtatttttagtagaggatggggtttcactatgttggccagactggtctcaaactcctaaccttgtgatccgccctccttagcccccccaaaaaattacaataattttgtcaaccaatacagaacatgagccctttttaaatgtgatttcccgtcatcacagcagtaggatgaagccttgttttgggtgagacagagggaaagggaaaaaacagaattgtaacagttccttgattctgcagatactgctgctgttttacgatttcagtaataattcaaagcagctgtctccttgtttctcacatgcatactacattggttttgagcatctgagaggcattggtttgtcttgcattcttttgcaaggcatatattgcagctgatatgaatctcgtttggggggaatccttgtattcctaacaagggggattaaagctacacctcaatccattcttctgaagtgaaatttacttgacacagtaggtttcgagacttacatatgaaacactggctttacagggttctcagagatgtggggtatacactgtcctgcagtgagatagtagaccctagaaggatactatttaagttgtccttagctctttttaattacaatttttagttgttagaatttctttttagtatctatagtatcttagatgattttagatcttaaatgagtttggcagcctctttagaatctgagagagatcactgtcaagttgcactttactgggttttatccagttttaggaggaggggaggcaatgtcaaaatgtacacctttggtttttaagaaggttaactataataatgttaaaggctagtcacagggttacctaatgctcagtctgtgaaacctaaatagaattcttaaaatgttatttaccaactaagtattcatgttcaaattacttaccttccactctgaagactttaaggtcatttctaatacacatttacctaattaggagttctgtctactagtaaacattccaaattgctacccaacattactgttaacagattttcctccgtattcttctaaaaattataccccatgggcttgccaggtaatgacgaaaacttaatgggtgtacttttttttttttttgcacagtctactttgtgacattaagtacctcttttccaaaaaaaaaaaaaaatgtgttttatgttgcttacctgaggatcacatccattatcaagaagattctgtcgctataatttgaggcatctagggcagcattttgagaattgctgttgataagatccactgtttcttttcatagaacatgatctgttttgtatgagtctttccaaatgttaagtacagattcttcaaatttcttgtacagtattggtttgcagtttaaagtgattttaggacattagtgtaatgcaaatgcttgcattgcactgttttccatatgtataaaaacaatgctcctaaaatccctaattctttaaaactgcctgtgtttcattataaaaagttggctttgtgtaattacaccgagccatacaacctataaagtgaaaatactgcagattttaggaccccttcttctctagtcacaatcattttaaacagtgtaccccaggatgaaaaaagctccatggctgacatgtacaattacatgtattaatgactgctctacatcctatgttctgcctttggcca

SEQ ID NO: 43909 - DNA, 2300 bp, Homo sapien
cctttgaaactttgaaattgccccttactggttgttcagctactcttcctctgtttttcctacactagtcaaccaatcaacagggaaaagggactatcttcagggacagtgaggaaaggagcgtgggagaccccatccatttttcagctaattgagacttcagagactcttaaggtagaatggtgaagctatttggagaaaccacaccttgctctttcaaatcggccaggaaggaagatctccaccattctagtggctggacctcatagccctattgtttcctcagcatctccctccgttgtcaaaacggaaagatgggagtttgaatgtattaagggcatggtccggtttccttacatattctggcaatatggaaattaataaggaagggacagaggcaagagatagggctacaaggcctcccatcattatactcaccccccccttacaaagtcaaagataaaccattacactttatttggactttggaaacctgagttaaatgtattgattgtgctgttttaaagagctgaaaaagactgagatttctgaggcctacagcaggaaaagaaaaataggtagtggagaagggataactcagtgatagggccgaggctggagggctgaaagcattagtcagatatttcccacacagcctcctagcttgaggggcattcgaaaagaatgccctgccctttagctgcgccaccagatgactcccgggagattgaaaaatgcctcggctctggagtgagcacacctgggttcaagttctaactccacaaatagtatgaagttgagcaattcatgtccatttcccctcctgagcctcaatttcctcctctgtcgggccgggattattcatgggagaatgacggaaacaattctatactgcttctggcatagcacaggaagcagtttgaagccgctgcgccgaggctaacatgtaccgaaagctcgaaggaggcagcattcactaccagctagaggatctgggagtttttcaaggaggtggccggtgggagacacagagagccagtctcagtgggaggcagcctttccgcatgcgcgcgctctagaagcctggcggcggcgagggggcgggaccaggtctctgaaggggttgctatggcaccaaggggccgaggaggttcaccgaacccttaaaaccattgctccctcccccacctgccaccatcagggccgagggccattgttcccggcaaaatggcgtcggaaatccccctcccggtcagaggcctaagtaaaactgagggtgggagtcggaccataggtgggaagaaaaactacaattcccagggtacatcgcacccgtctgcgaggcgcagggcacgtgcccaggcctagcggttacatgccgtcaaaaatcagtttcatagcttccctttcccatccctgctttggtcgtttcccagcccccgcgcgcgcgcactgcggtcctggggggcgggggagacatgccgtggctgttgcccccgcaacgtaactgggaggccagtatttgtaaatcggtgcttcgacttctaatcccaaagccggcaggtatgggtctcgcgagaaatcccgggagttggaaaaagggagtcaggggtggcgggcgaaaaggtgccggcgggtaccacctcctaacagcggcgctacagcattcagaggctcgcggagacccaagggtgggcagtggggggctaggaagtagtgtgtgcttggacttttcttcttcttcttcttctctgaggggagagggtagagcagctgagagagagcgagagcgcttcggaacacacaggagatgtcgcgcgtgcttcctctaagagattttctctttggaatggggagaagcctttctcctcgacgcgcatccctctctcccgcggcgccgaggggggcgggaggcgtgcgcgcactctagttggctggccactcggcacctcgctgcgataggggcggttccgagttggggctgctccgttggctttctccgcccctccccctcttctgttctcccctcccttccccgccccccctccgcccctctctcctacccgtccgaattccctggctggagtacgcgtgcgtctgctcagctccgggccgagcgcgagcttgggctcgtaccccgctcccctctctccgcccgctctttacctaccggccgtagctggcccggtgggctcgcggggagacgctcgcgcgcgcaagcgcacacgacgcggagcggagctcgagacatcgaggagaggagtaagaagcatcggaggaggcgatcgaggaggaggcgg

SEQ ID NO: 43910 - DNA, 2300 bp, Homo sapien
tcgtttgtttgtttgagacagagtctcactgtgtcgcccaggctggagtgcagtggagtgatctcagctcactgcaacctctgcctaccgggttcaagcgattctcgtgcttcagcctcccaagtagctgggattacaggtgtgtgtcaccatgcctggctaacttttgcatttttagtagagacagggtttgttcatattgaccatgctggtctcaaactcctgacctcaggtgatctgcccacccaaagtgcgggaattataggtgtgagccaccatgcctggcctagttttcaaatttatttatttatttagtttgagacagagtctcactctgtttcccaggctggagtgcaatggcaccatctcggctcactgtaacctccgcctcccgggttcaagccattctcctgcctcagcctcccaagtagctgggattacaggtgcttgccaccagacctggctaatttttgtatttttagtagagacggggtttcaccatcttggccaggctggtctcgaactcctgacctcaagtgatctgcctgccttggcctcccaaagtgctgtgattacaagcgtgagccaccacacctggcctaatttttaaaattgtttttagagatggggtctcactatgttgcccaggctggtcttgaactcctgagctcaagccatcctcccgcatcaacctcccaaagtgctatgattacaggcatgagccaccatgtccggctcttctttttagatatgcatgtttacagctaaagatttccctctaagttttgctttagctgcatctcatgcatttttttatgtttttgttttcattcatttaaaagtgttttctaatttgctttgtgatttttttctttgacccatttattgcttaggagtgtgttaatttccatatatttgtgaattttgtaagtttctttttactgatttttaacttctttccattgtggtcagacaacatactttgtatgttcaatcctgttaaatctatggaggcctactgtatggcctagtgtatgatctgttctggagaatgttcttgtgtacttcagaaaaacatgtacagttatccctgggtatccgtgggagactggttccacgacctccggaggataccaaaattcatagatgctcaagtccctgatataaaatggcatagtatttgcgtataacctatgaatattctactgtatactttaaatcatttccagatgtgactcacgcctataatcccagcaatttgggaggctgaggcaagtggattaaacccaggagttcgagaccagcctgggcaacatggcgaaaccctgtctctactaaaaacacaaaaattagctgggagtggtggtgggcacctgtaatctcaggtactcgggaggctgaggcacgagaattgcttgaaaccaggagacggaggttgcagtcagccgagatggcgccactgcactccagcctgggccacagagtgacactcggtctcaaaaaaatagataaataaataatttccaggttacttataatgcctaataaagtgtaaatgctatgtatatagctgttatactgtactgtttaggagaataatgtcaagaaaaaaagtatacacatgttcaatgcagatgcaattttttcctgaatattttccatctgaggttagttgaattcacggacgtggactgccccccatagggagagctgattgtattttactgttgttggttgcagtattctatacagatgttaggatgctttttttaaatgcagatttttaaggctatactcactgagtcctctgccccagggcctggaatctgtatctgtaataagttccccacatatttcctccgcagtacccacggatccggaaaccatggccccacacgtccttcaggtctggtgtcctttgatttaagtgagtaactctggtggtgtcatcgatcgctctgacagatttttcttttgctctagtcttgctgccaggtctgcggaaaagagaatcctgtgttctcaggctcggcttgcgtctcgttctgcctgggccgagctacagagggattgggccgccgggacgtcacgtggactggggccggataatggcgggcgctgcagaagatgcgcgagctcttttccgggctggggtctgcgcggccctggaggcctggccggccttgcaggtcagtggggccagggccagggcaaggtcaaggttagggcccggggcagaacaggagttggttgggctaggtgcctgaggcttggctaggcggcataagaggagttggctg

SEQ ID NO: 43911 - DNA, 2300 bp, Homo sapien
ctgctttgactggggtcattcactaaggtaagacacaaagaaggacaaacaggttggaaggaggatgccttgagttgggaagaagctgaggttttaggtgtctctgggatattcaggtagagctgcctaataaccagttgaatgcatgggtcaggagaaatatctggttttgaggtatcaatttgggagtcatcagcaaagatatgatcattgaagccaggggagcaaatgagataaagaaaagagcggcctgtaatccgaggcttctctttcctcaagtggatcacttgaggtcagtagttggagacctgcctggccaatatggcaaaaccccgtctctactaaaaatacaaaaattattcgggcttggtggtgcatgcctgtaatgccagctacttgggaggctgaggcagaagaatagcttgaacccggtaggcggaagttgcagtgagcctagatcgcgccactgcactccagcctaggcgacagagcaagactctgtctcagaaagaaagaaagaaaaaaaaatcacatgtagagagaggacaagagcgctcaggccaaagccctgaagagcaccagcataaagcgttggacaaagaggagcctggaaagtaaaaaaagaattactaaggaagtagaagaaaaacaaggaaagtgcagtgtcatggaagtggtttaaggaggagggagtggtcaacagtgccaaatgctatcaagaaaccaagtaggataacctctgaaaagattctatgggggctgggcgcggtggctgacgcctgtaatcccagcactttgggagacagaggccggcgaattacaaggttagaagttcgagacaagcctggccagtatggtgaaaccccgtctctactaaaaatacaaaaaaatagctgggcgtagctactcgggaggctgaggcagaagaatcgcttgaacccaggaggcggagattgtagtgagccgagatcgtgccgctgcattccagcctgggcgacagagtgagactcttgtctcaaaaaaaaaaaaaaagaaaagattctatgggatttagtgagatgtttcatggcagaccctgatgagagagagcagtttcaagcaagtagtggaggcagattggagtgggttgaaagataagtgggaggtgggaaaatgaagacagttgggtgtaggcaactcttttgagaagtttgtagaagagaagagaaggaggtggttggagaggcagaattcttggtaattgtttatttgtttttagatggaagaggtctatgtttagatgctgttgggaaggagcaaggacaaattcctaggcttcgtagcaaaaagtcaagagcttcctctacggtggctctgtttactctctgcagcaggtcaggttatttgctgagggttacagggcagatggagcacttggggtttgaggggaaaggagaaggtttgaaatggtcactgtggagaacagagggagagctgactagtagggttgtgggtcaaaactgagggcctggtagaagctgggaaccatgggtttatagtggcacaaatctgtgaagttgaatagttttccccagcaatgtttagctgcctgggcgcaggcatggaaaaggcggacagttggaccgattcaagactgggatgttgccaggcggatgcgacaaatcagggaactgagggtatttaagaaagtgactaagtaagggaccaagatatctggtctgagcaaagtgaaggagaatcagagacaggtcctctatgagccaagccctaggaacactcaggaacatgaagaaagggttttggaaaagagagtgaacggcaagcagaggggggaagacctgagatgggatggaagggcagatatggggggagggggttgagcccggagacttgcctgtggggaaagcaggctgagggggaattttttaaggggcaggagggccttgagagcggtagcagcgagaagtgaggcggccccgagcgagggggcgtggtcaggcgcaaatcccgggcgagggggcggggccccggtaactgggtcccagtgccgctgtggctgcggctgcctctgcgaggctcccgcctccccaccccccttcccagggctccttcccgcccgccgccgccgagacccaggctgaagctggggaggacggtggagcccggcccaggccgttctcctgcccccgcggctggagcatcgtctgggactactggctgaaggcgagccccgcagcccaagcgcagcgcacacgcgcgcccccggccaccgccgttctctcttccctcccctcctctcc

SEQ ID NO: 43912 - DNA, 2300 bp, Homo sapien
tgtctgaaaaaaaaattattgtttatatatctatataatctataagcaacattgtttgctgttttctagattttaaaactttatataaatggtttcatactttatgtgtcctctgcaatttgtattttatctcagtattgtgtttttgaaatttagctgggtcaatgcatgcaacatgattcattctttttcattatagtattctgcatagtattctgtcatatggctataccataatttacttattcattctcctgttggtggaattttgggctgttcacatttttttctctattacaaacagttctgcaatgaacattcttccacatgctcattgagcaagtgtataagaatttctctaggagttaaagtttagaggtgatctctatctatctatctacctattaatcaatcatctccaatactagaactgctgggtcccagggtcatcttcagctattctggatacttcctaattgttttccaaagtcgtaataactagtttccacaagatttcattgtattttttcccttatatcttgtgcatttgggattttgtttaaaaagtccttccccagtcacaagtcacaaagatattctcctgcatatattaacttcatagttttacctttcacattcacagtctaccctcttaggtggaataaatagagatccagttttatatttcttttcatggagagccaaatttcccaatgccatctactaaacagcccatttcccattttttgtggtgcaggcctgtaaactcacccatttaacaaacagttgttgaagcctgcctcataccagtcttgtgctgggtgttgttgaaagcttgaagatacatggcccctgctctcagggagttcaccctcctgtggagacacagtcacataaacaactacagtattgtgataagtgctagcttagctgtataggtaaggtgctctgggtttctaactcatctgcgaaagtcagagaaggtttcatcgaagtgacaagagttaggtcttagagaaacagagcaaaattgcaaatgcagggggaaaggtgaaagtggtcagggctggtttcaggtccagaggaatttcatgtgtctctaggatgagaggttagaagccctccaacgatgtagagaggtagtgagtcctgtttatgtaagggataaagggacagatggagtcattttcagcccgtctgtgcttgaagtggagaaacaaacccaccctcggaggcacagagttccacctactctgtgccccaccccagggtttaggcttgaggaagaggaggggctggaattaaaccatcaagaagaaaacatttgcagactaatatttactattttgtgggggagacctcacttcccagccagctccttgagatggcttcagaaacccctacttgccccactccagagatataaattcattcccttctgcagacgctgctccgggattgagggaaggatggagtaggaggggaagaaggcaaaagggtgggagaggcttctagtgtgggagaggcttctagtcgttctggctcctgctccagctcgggttgggtatggccatagatctgaacgtatgcagaaaaagctaggagtgctcagggatggtctggggctcaaggacccgggaaggtggttgggaatagctaaccaattcacttcaggtggggaaatactcggccagacacgtgacccaggcggccattttctcacaccctgctgtcgccatcttccaggcagacaaagacaccatcccccacccttgtctgattcgggcgtggtgactgcctggttattgagatttgggagcacgcatatttaaccccagacagatgcccgcagacaaaattttggcttgcaagtaaggtatatggccgcaccagtcgacccgccgcttcttcccggtcatttccccgtcctccttctccctcctccgctatttccttaactacggggcaggcaggaggcggggccagcgtggtcgcgaagaagggacgggcgggcgtgagctgtcagtcagaagctccgcccccccccccccccccccgcggagaccgcacggtgggcggagtcgggcgccgccggcctgggatccggaagtcggagcctagctgcgcgagagtttctgctcgctcaaccgagttgtcgtgttgccctcgcttctcagatccccgccggaagtgtaagtaagaaacttctctcctcttttctcacaatgtgcgctcacctagacggccgggcagttaggatcgtctattggatgtgaaaccagagatgcccgccaacctgg

SEQ ID NO: 43913 - DNA, 2300 bp, Homo sapien
acgaggaaggcttattacaaggagttccgtaaggtacagggttccatttcttcaggcttttgcgggagggttccagtccagccccttttcctctccatttctgttttttcctgactgagatggagatttttgtttcacaggcctgcatcactgctaccctatccttttcctgccctcatctcctggtcctctgccctgcaggtggtggaatactctgatgtgattctggaagtcctggatgccagagacccattaggctgccgctgcttccaaatggaggaggctgtcctgcgagcacaaggcaacaagaagctggtcctggtcttgaacaagattggtgggtgttaggcaggattgggtgtgacagggaaggtgggcaggccatctttaacgtctagcttggaccagacactgaacccagcaactcagtgatactcataatagtcatgcaaagtagaaatttttgttccgattttcaaagcctgtatcacagagtatggtacaagttaggtgtggaatccaagcctgtctgcctttcagtcccctgttcttgccattttgagccttctctgtttttggacaaccctggagagttcctcctccctcaactcaaagactggggcagaggagcacatgggctcaggagtcactcatgtctagggttcagcctcccacctgtcctgattcttttctctgagacactggataagtcatgccacctccaagagctcctgtttctctagctgtaaaatgggccatgggtatcccaacctcacagatttgttgtaagaattaatgataaaatgcttggtacatggtggtcagtacttcacacatgatagccattctttttagggttatctttgtcatttggcccaacctagaatgatccagagaggggataggaaacacaatatttggggggtctctgatgctcctggcgctgttttggaaagagaacatttgggaccagatagctagtttgtccattttccctgagggaacagaggccccttcagggagggctaacgcatcccgtagaccagactatcctttctaactccaacctgcggactggatgggaatgacagggccagttgagagacctgttgatggtaggtgggcctagctttgggtacgggtggaggtgtctttggagggaaccatggaggtgttgttctgcttaccagccccatctgttcctatatttaccccagacctggtccccaaggaggttgtggagaaatggctggattaccttcggaatgagttgccaaccgtggctttcaaggccagtacccagcatcaggtcaaaaacctggtaagcctggggctagggtcatctagccgctttcagggtagtttggggccagagctgggagggtcgtgacttggactgggacctccagccctttagtaattgaactgggccttcaactttgagctttttgctccaccgagtgacttttttttttttttttgagatggagtttcactcttattgcccaggttggaatgcaatggtgtgatctcggcttactgcaacctccacctcctgggttcaaatgattctcctgcctcagcctccaaagtagctgggattacatgcacgcgtcaccatgccctgctaatttttgtaatttttttatttttagtagagatgggttttgccatgttgaccaggctggtctcgaactcctgacttcaggtgatccacccacctcggcctcccaatgtgctgggattataggcataagccaacatgcctggccagtgacttcttaatattagtttcacttgacttcttcctgtattatcactcttcaggaagcatttcttttttttcagttgtaaggataaaacataatgtctatagggaatttgtaaaatacagttaactacttgtttgtttgtttatttatttatttgagacagagtctcactctgttgcccaggctggagtgcaatggcatgatcttggcttactgcaaccgctgcccaccaagttcaagcaattctcctgcctcagcctcccaagtagctgggactacaggcatgtgccaccatgcctggctaatttttgtatttttagtagacacggggtttcgccgtgttggccgggctggtctcaagctcctgacctcgggtgatccacccgccttggcctcccaaagtgctgggattacaggcgtgagccaccactcccggtctaactttattttttattttttgagacagagtctcactttgtcacccaggctagagtgcagtggcaccatctcggctcactgcaatctctg

SEQ ID NO: 43914 - DNA, 2300 bp, Homo sapien
tctaatatatctatttttttgagacagggtctcactctgtctcccaagctggagtacagtggcacaatcatggctcgctgtaacctcgaactcctgggctcaagcaatcctcccgcctctgcttcccaagtagctgggatttacagatgagagccatcacgactggctatttctttttacttttttttgtagagtcagggtctcactatgttagccaggctgatctcaaactcctggcctcaagcgatcctcccgcctcaaccccccaaagtgctgggattacagatgtgagccaccacatctggcctaatatgttttcaataaagtttccttcattgttttgttttctctatctagaactcctattatttgaatgtctaatttgctagattaatccatctctcttaaattttctctcacattttctgttgccttggcttttttgccctacattctggaagatttcctcatttcctggtcctggaaaatgtattatttcagtaacatatttttaatttctaaggaatctctgttttctctgattgttcctgttttatggcatctagttcttgttttatgcatgttatatcttcttgaatcttattcagaatagtatcaatttttcccctgaagttctcttttgtttcccagatcctcaaattgctctagggtcagttgttctatttgtttcttttagtattttgctttcatgctacaggcttccttaatttgcttgaggctccttggctactcattcatatttaagagaaaaggactgggtagccgatgggagttttctctgttgctgtataagcagagctgttctctagctaggactctccctcgtgaggaaatcctgagaggaaacttggtgcggacttgtgcgaggtggcaactgacaggttttgggacccacagatgccagaatgagaagactttgttgggatgccaaatgccctaggacaaatctgagtgttcctggggcagtttgtaaaatgtcatcagagattttgcccctgagagtaagtactggagctgtctatgctccctgtgtggatgggtagaggccggagggccagggtcggcaggattctgactgaggctgatagtccttgtgcagaccttcaagtactttcctttttctcagccccattcctcacccccaccctccacaggacctgcagatcctgagtccagagcacctcagctcctcccttctccctccactcaggtctcagaggacagggagctttccagacttttgatctctgtcatgcctcatcctgccctcctcctagcagctatttactgatcacttaccatgtgccaagcattctaaaagtacaaactcacttaatcttcataagaactttatgaagtaggtgctattactattcttattttatagatgaagaaactgaggctacagagaggttaattaacttgctcagtattatacagtcagtaagtggcagaactgagattcaaacccatgtggtctgggtctggagcctgtattttgaaaccactgtgttatattctttctcagtcctgccccagcctgtcttggcctctggctattctagagattgtaagtcttattatgtctatgggacccctaaattgttataggatcctgagtaagtccctcccggcactaggctaaagtcaataataccagggaagaccagtattgggggcttgccttgccaatccctctctcatcgccactacctttttaagatgatcagtgctaagtgacctttctctggccccagttactgggctcctgtggatgtttataggaaagaaaaaccccaccctgagccaacacagcaaacagacagacccagcactctggtatgtttagtttccattcatcttacagctggatgaggggaaaaaaggaagcgtagaactggcccttctccaggcaagatgccagccccagctcttggacaatcctggcttgtgtgagcctcaatgccacattcagagccttccccacccttcaggatggtccctccctctcaagagaagggatacctggaggtttaaaagagcaagggtttggagatcgggctcagatcttctggatgtgaacaacagatccaggccagaggtggcatcatgtctgggtggaggtacctcatctgtgtcagctttttgctgaccattcttcttgaactgacataccagggaccccctgtccccgcttcatcaagcacaaaggtcagttctgggatgagggaaaaaagcttggggatttgtgataaaattagcttcttgggggaaatttg

SEQ ID NO: 43915 - DNA, 2300 bp, Homo sapien
ttcagatatgtatattcaactgcctgtggtacatttccacctggacatgccacaggtgcctcaaaagcaatgttcagttcttgtctaacctgctcctcaaacccgctcttccttcagtattcctgatctcagtgaaaggggttaccattcacacaatctctcaaatcagatcgccaagagttccctttgacactcccctcctccttgcccttctcttcacaatccagttactcaagtccagttactttttacttctttactatctcctcgattcaatcacttctcactatctgccaccactctaggccaaagcacaatcattgcttacctagatgactacaaaagtcataagcactctccctgtttccaagacaacacctaatccacactccatatagcagctaggtgttctttctaaaacacaaacctatgctgtatccttgcctagaattctttagtaactcctgggtgctctcaggatcaacaccaaagtcctcatcttggcattctaaacttgccaacttgccatgatttggaaggggtggggaatttgagatgccagaagtagaagaaaaggaggggctatgtctagtgtggataagggagaaaatctaggaggcaagaacatggtgaactgatatcacacacttggagaaagcaataattcagagaaagagaaaagacaggaaaacagaagcctgccttgaatatgcaagaaatttgtgtgtttgtctatcttgaattatccatggaacacagggattcattatatgttatttacatagtaaaaggtgaccacataaagcagaagacttgtgtccatttgaattacatttatatgtggaaaggcactgaatattatttctgcaactaacagttgtgctgaattttattatggtttctaataactttttagttgatgctcttgggttttccaggtctgcatttatatattcagtaattaatgatgatttgtctatttcctattattttacatcttattttgttctcttgaacagatccaattggttatgtgaatttattatgtgatagaggtgccatttcaaagcagagagggaaaagatggattagtttgcacatgatgtagaggtaagagactatgattttgaagagtaatcaagctgaatccgtatagaaaataaattttgaaatgatcaaacatctaaatgtaaataataaagccacaaaagtgcttgaaaaaaaaaacggggtttgttataggagtgtgaaaagcatctttaagcaagcagcagaatccagttgtgatgaaggaaaaatggatatatttgactacataataattaaacatttttgtttggcaaaaattatcataaataacatgaaaaatatttgtaatatgtgacatgtacaggagagacattgctggcgggaatgttatccatttactttttaggagtaagttgacaaattttgcatcaaaatggaagacttttttgtagcatttgagctagcaaaaaataccataaataacaaaaagtgcaccaagcaatctaaatgtacatgtgtactggactggttcaataaattatgggacatctatgcaagaaaagatcatgcagctgtttagaaaaatgtgcactaacggaaagatgttttatatataactggaaaaaaacaggtcgcagaacagaaggtatgtatagtgtaccatttgtcggagagagaacctgaataattagtatacgaatagaaaaaaaatctggatagcaaaatgttaatagtggttatttctgggagatgagtggcctttcattggtgtgttatatattactgcattgtttgaatttttacaacaacaacaaaagaacaacatattacctttgtaataagaaaaaatgaagatataaaaataaattcaatgaatgacttgctttcagggggcggtttgagttggaagagcttcagactgagcctggtacagtggcataaacatgggctttggcgtcagacagccctgagcggggccccattgccccacccccgaggaaggcgagggggggtggcagggggctgcggaaaggggctgggctgggttgggctgtctgcagctctagtccaggaggctgagacttcgagagggacttagagaaggcagacgcatcccgaactcgctggaggacaaggtgaggggcgttgatattggggttttatggaggtcagacagtggttccagacccctcgaacccatagccaggcagatgagcaattcttactgcaccactgcagctgaagcagaggtgacctggagtggggtgtag

SEQ ID NO: 43916 - DNA, 2300 bp, Homo sapien
acatggtgaactgatatcacacacttggagaaagcaataattcagagaaagagaaaagacaggaaaacagaagcctgccttgaatatgcaagaaatttgtgtgtttgtctatcttgaattatccatggaacacagggattcattatatgttatttacatagtaaaaggtgaccacataaagcagaagacttgtgtccatttgaattacatttatatgtggaaaggcactgaatattatttctgcaactaacagttgtgctgaattttattatggtttctaataactttttagttgatgctcttgggttttccaggtctgcatttatatattcagtaattaatgatgatttgtctatttcctattattttacatcttattttgttctcttgaacagatccaattggttatgtgaatttattatgtgatagaggtgccatttcaaagcagagagggaaaagatggattagtttgcacatgatgtagaggtaagagactatgattttgaagagtaatcaagctgaatccgtatagaaaataaattttgaaatgatcaaacatctaaatgtaaataataaagccacaaaagtgcttgaaaaaaaaaacggggtttgttataggagtgtgaaaagcatctttaagcaagcagcagaatccagttgtgatgaaggaaaaatggatatatttgactacataataattaaacatttttgtttggcaaaaattatcataaataacatgaaaaatatttgtaatatgtgacatgtacaggagagacattgctggcgggaatgttatccatttactttttaggagtaagttgacaaattttgcatcaaaatggaagacttttttgtagcatttgagctagcaaaaaataccataaataacaaaaagtgcaccaagcaatctaaatgtacatgtgtactggactggttcaataaattatgggacatctatgcaagaaaagatcatgcagctgtttagaaaaatgtgcactaacggaaagatgttttatatataactggaaaaaaacaggtcgcagaacagaaggtatgtatagtgtaccatttgtcggagagagaacctgaataattagtatacgaatagaaaaaaaatctggatagcaaaatgttaatagtggttatttctgggagatgagtggcctttcattggtgtgttatatattactgcattgtttgaatttttacaacaacaacaaaagaacaacatattacctttgtaataagaaaaaatgaagatataaaaataaattcaatgaatgacttgctttcagggggcggtttgagttggaagagcttcagactgagcctggtacagtggcataaacatgggctttggcgtcagacagccctgagcggggccccattgccccacccccgaggaaggcgagggggggtggcagggggctgcggaaaggggctgggctgggttgggctgtctgcagctctagtccaggaggctgagacttcgagagggacttagagaaggcagacgcatcccgaactcgctggaggacaaggtgaggggcgttgatattggggttttatggaggtcagacagtggttccagacccctcgaacccatagccaggcagatgagcaattcttactgcaccactgcagctgaagcagaggtgacctggagtggggtgtaggcaatgaggacgactgagaaagtagtaggctgtacagactgggagcagagactagcggagggaggaggggagaaaaacggggaaccaggaatgttgggagggggacgaggaatacaaggagggaggggaacactgagggggagtgaagatccagagaagagaatcggggatgcagagagggattaaggaatactgaggggcagggtgtgcaaacgtaacacggaggaggatgtaagaaatgggaagaaggaattctggagtaaataggaaatgtgaggtaggaatagggagtagggagccaggctaagggaatacggaggggggcataaggaatgaggagcagggagcgggggaggggcagacaggctgggacggaggccccctagggaggcggaaaggggcgggaccacttccggcctagagaggggagggcagtctccgagtttcggaggggcttggagtgagtggacgcactcgggaattgtaggaggacgaggtgagcagccgggtcggcttttggatgagagccccgctaggggtcggccccaccctctgggatctggagaaaacctgccttaaggaccggatcgtaccggatccatccggctgggaagggaggggact

SEQ ID NO: 43917 - DNA, 2300 bp, Homo sapien
ttaaacatttttgtttggcaaaaattatcataaataacatgaaaaatatttgtaatatgtgacatgtacaggagagacattgctggcgggaatgttatccatttactttttaggagtaagttgacaaattttgcatcaaaatggaagacttttttgtagcatttgagctagcaaaaaataccataaataacaaaaagtgcaccaagcaatctaaatgtacatgtgtactggactggttcaataaattatgggacatctatgcaagaaaagatcatgcagctgtttagaaaaatgtgcactaacggaaagatgttttatatataactggaaaaaaacaggtcgcagaacagaaggtatgtatagtgtaccatttgtcggagagagaacctgaataattagtatacgaatagaaaaaaaatctggatagcaaaatgttaatagtggttatttctgggagatgagtggcctttcattggtgtgttatatattactgcattgtttgaatttttacaacaacaacaaaagaacaacatattacctttgtaataagaaaaaatgaagatataaaaataaattcaatgaatgacttgctttcagggggcggtttgagttggaagagcttcagactgagcctggtacagtggcataaacatgggctttggcgtcagacagccctgagcggggccccattgccccacccccgaggaaggcgagggggggtggcagggggctgcggaaaggggctgggctgggttgggctgtctgcagctctagtccaggaggctgagacttcgagagggacttagagaaggcagacgcatcccgaactcgctggaggacaaggtgaggggcgttgatattggggttttatggaggtcagacagtggttccagacccctcgaacccatagccaggcagatgagcaattcttactgcaccactgcagctgaagcagaggtgacctggagtggggtgtaggcaatgaggacgactgagaaagtagtaggctgtacagactgggagcagagactagcggagggaggaggggagaaaaacggggaaccaggaatgttgggagggggacgaggaatacaaggagggaggggaacactgagggggagtgaagatccagagaagagaatcggggatgcagagagggattaaggaatactgaggggcagggtgtgcaaacgtaacacggaggaggatgtaagaaatgggaagaaggaattctggagtaaataggaaatgtgaggtaggaatagggagtagggagccaggctaagggaatacggaggggggcataaggaatgaggagcagggagcgggggaggggcagacaggctgggacggaggccccctagggaggcggaaaggggcgggaccacttccggcctagagaggggagggcagtctccgagtttcggaggggcttggagtgagtggacgcactcgggaattgtaggaggacgaggtgagcagccgggtcggcttttggatgagagccccgctaggggtcggccccaccctctgggatctggagaaaacctgccttaaggaccggatcgtaccggatccatccggctgggaagggaggggactggacccggtttggccgggcccaagatggaatcactagctcagtatttatttgaggagggggtgtaatagggaaggggcggaaccaagatgcgcctgtttggaggggggcgtgttaggaagaagggcggggccaagagacactggactctgtagggcgtgagtaggggaggggccgggtccaccagacactgcgacaattttggaggaaggcttgttgggcagggggcgggaccgaatggtactgcggacctggagaggggcgtgtgttggggcagagtgccagactgagaccacgaccattgcgcatgcgcactatgtttcgctagaaaggggcgtgttgagaagggccagcactgagaagagccagctgctgaatgcgcatgtgcacggtggacatcaaagaaagggctcgtgctgggaaagcgggcggggctgagagcggccctgcagccgacgcgcatgcgctctatcgacctgcggctgggtggggggtgcactgggaaaaggggcggggtcctcagagctgccgcgctggcacatcttcctggagaaggggagggtgcggctgcagagaattgagacttagaagctttgaattcctgtatctgagaacggagtcgttgggggtggtggagggggttggaattggggacctacggaaggtgaggatcagcctccaggcacaacaggggagagga

SEQ ID NO: 43918 - DNA, 2300 bp, Homo sapien
aagccaaaattgacaagtgggatctaatttaactcaagagcttctgcacagcaaaagaaactaccatcagagtgaacaggcaacttacagactgggagaaaatttttgcaacctactcatcagacaaagggctaacatccagaatctacaatgaactcaaacaaattgacaagaaaaaaacaaacaaccccatcaaaaagtaggtgaaggacatgaatagacacttctcaaaagaagacatttatgcagccaaaaaacacatgaaaaaatgctcaccatcactggccgtcagagaaaggcaaatcaaaaccacaatgagataccatctcacaccagttagagtggcaatcattaaaaagtcaggaaacaacaggtgctggagaggatgtggagaaataggaacacttttacactgttggtgggactggaaactagttcaaccattgtggaagtcagtgtggtgattcctcagggatctagaactagaaataccatttgacccaggcatcctattactgggtatacacccaaaggactataaatcatgctgctataaagacacacgcacacatatgtttattgcggcattattcacaatagcagagacttggaaccaacccgaatgtccaacaacgatagactggattaagaaaatgtggcacatatacaccatggaatactatgcagccataaaaatgatgagttcatgtcctttgtagggtcatggatgaaattggaaatcatcattctcagtaaactactgcaaggacaaaaaaccaaacaccgcatattctcactcataggtgggaattgaacaatgagaacacatggacacaggaaggggaacatcacactctggggactgttgtggggtggggggaggggggagggatagcattaggagatatacctaatgctaaatgacgagttaatgggtgcagcaccccagcatggcacatgtatacatatgtaactaacctgcacattgtgcacatgtaccctaaaacttaaagtagaataataataaaataaaataaaaaagacttgtttttggcctaacttatgatctatcctggagaattttctatgtgtgcttgagaatattatatattctattggataaaatattccgtaggtcctttttgtctaaagtgtatttcaagttcaatgtttccctatcgattttctgtctggatgatctgtgaattgttgaagatggggtcttgaagtctcctaccattattgtattgcagtctacttctcccttcagatctattaatatttgttttatatatttaggtgcttctatgttgggtgcatatattaaatatgtttataattattcgatattcacgatgaatttatctcattatcattatataatgacctttaagatcttttatggtttttgactttaagtctattttatttgacatatgtgtagttatccttgctctcttttgaatgattgatggaatagataaatgtcatgaattgttttctgcatgggggcacagtgcaccatgtcacaagagacagtctaagtacaaactgatattgttaaaacatcaatatagtcattgtgggatcaataaaaacttttcatagatttttatacattactgtttttattctgaattgcataagatggacgggcaccctatcttttagtgtttagaacctctaaatgttttaatgtggtaacacttgaaaaacagaaatgaatatgacctagtcccctgctccagagcagctctagggaagagagacatagacacaaggtataacaacactatgtaaatagtgttgggatagagggtctgtaggaagggttggtgtgggagttcagagaactacattcctcctaggggaaacaggagaatcaaataggaacggagatacagagtggggaatagagaagtcaaatggagaataagagggagtgataactgaataggggtagtaagaagaaaaagggagctacattgaggagaatggaaagttgaaagtaggtatggaggggaggagactgacaggcaggaacggagacccccctctggaggcggaaagaggcaggaccacttccggccagggagggggataggctcagacacaaggagaggcttggagagagcagacgccttctggattcaagaagacgaggtgagctgaggtacctggctttagtgaagaccctgtgggggcttcctggctgcggcttcgacgtgcctgactccacacgcccctaaggtttgaagaaaacctgctggaggtttgggacctaaccgcatcaaagtcgc

SEQ ID NO: 43919 - DNA, 2300 bp, Homo sapien
gtgataactgaataggggtagtaagaagaaaaagggagctacattgaggagaatggaaagttgaaagtaggtatggaggggaggagactgacaggcaggaacggagacccccctctggaggcggaaagaggcaggaccacttccggccagggagggggataggctcagacacaaggagaggcttggagagagcagacgccttctggattcaagaagacgaggtgagctgaggtacctggctttagtgaagaccctgtgggggcttcctggctgcggcttcgacgtgcctgactccacacgcccctaaggtttgaagaaaacctgctggaggtttgggacctaaccgcatcaaagtcgcctttagcggtgcctggacccagttcgcacgggaggaagtaggaggcagaatcccctttgggccacagaaagtaacgatctggactcggttcgggccgtgaaagggagggatgcagacctagttgggaccgcagaaaggaaggatcgagaaatccttcagacggtagcaagaggggaggaggatacacacagttcgggagggagataggagacggcaggactccgtttaggctggagaaagggggcagtaccccgtttgggccacagaatggagggatcgggacccagagataagagtgggcagcatcccttttgagcaacggaaaggaccagactcagacaggagaaaggaggggatatgacccggttggttccggtttgaaagggaagagacaggacctggtagggtttgagaacaggaatacacagaaggttcatacagttggatttgggggtgaggtattcatgttgcagaaagggcggagctgcacacttgcagacgtggaaagaggggggagtggtgttggttggggaaggggtggtgcagagacgtaccgcagagcggagggagggggcttattaaaggaagggaagatgaagagaaatgctgcagagcggagggaggggggtgtattgggaaggggcggtgcgtggcagtaccgcagaggagagatgggcggtgttggggtaggggcggtgcggagtggtactgcagagcggagggagggggctagtgttgggggaagggttggatcgagatgtgatgcagttagaaagagtgggtcggggtggcgccaagatgttctgttgctctgagagcagggggcagatgtgggattgagctggttagaaactgtccggtttaccaaggcgcatgcgcgcggagggcattgaagaatggttcttttgggatagaggtgggcctaagatggggggtgggggcgcctctagtcggtgcgcatgcgcactatcgagttgcggagggggcgtgtaaaggggtggggtcgtagaactgactctctcggaggcaaaaggagctgggccttggaaaccagatggcctgggttttttaggtatgaaaacccaggagttgaagggattagggcccaaggttacatgagactcccctaagtcaggataggtgagatgtctgatgaatctccccctccctctcattctctaactcaggcccattcccctcaggctcacctgttactcggcctcccagaaagatggataggagaaatgactacggatatagggtgcctctatttcaggtgaggcctctctgcattctctctaggccatctgccccatcctgagttcacttactgctcttcagaccccttccaccgtgtagtttcataattccctgcctaactcgtctcagtcctcccttacatggtgaaggagaggagaggaaaacctgcctgactctattccttccttgctccctaccccattttaattaaccactgctcagaggaagggaaggcctttgtggaaagggatgggctttagcgaggccaaatggcccagaggatggtaatcctaagtgtgtagggccctctgcctcccccggggagcctggggcttcccttccctccagatatacagactgagaccacagaagaggacagtgtcctgctgatgcataccctgttggcggcaaccaaggactccctggccatggacccaccagttgtcaaccggcctaagaaaagcaagaccaagaaggcccctataaagactattactaaggctgcacctgctgcccctccagtcccagctgccaatgagattgccaccaacaagcccaaaataacttggcaggctttaaacctgccagtcattacccagatcagccaggctttacctaccactgaggtaaccaatactcaggcttcttcagtcactgctcagcctaagaaagccaacaagat

SEQ ID NO: 43920 - DNA, 2300 bp, Homo sapien
tgcctaactcgtctcagtcctcccttacatggtgaaggagaggagaggaaaacctgcctgactctattccttccttgctccctaccccattttaattaaccactgctcagaggaagggaaggcctttgtggaaagggatgggctttagcgaggccaaatggcccagaggatggtaatcctaagtgtgtagggccctctgcctcccccggggagcctggggcttcccttccctccagatatacagactgagaccacagaagaggacagtgtcctgctgatgcataccctgttggcggcaaccaaggactccctggccatggacccaccagttgtcaaccggcctaagaaaagcaagaccaagaaggcccctataaagactattactaaggctgcacctgctgcccctccagtcccagctgccaatgagattgccaccaacaagcccaaaataacttggcaggctttaaacctgccagtcattacccagatcagccaggctttacctaccactgaggtaaccaatactcaggcttcttcagtcactgctcagcctaagaaagccaacaagatgaagagagttactgccaaggcagcccaaggctcccaatccccaactggccatgagggtggcactatacagctgaagtcacccttgcaggtcctaaagctaccagtcatctcacagaatattcacgctccaattgccaatgagtcagccagttcccaagccttgataacctctatcaagcctaagaaagcttccaaggctaagaaggctgcaaataaggccatagctagtgccaccgaggtctcgctggctgcaactgccacccatacagctaccacccaaggccaaattaccaatgagacagccagtatccacaccacagcagcctccatccgaaccaagaaagcctccaaagccaggaagacaattgctaaggtcataaatactgacactgagcatatagaggctctaaatgtcactgacgcagctaccaggcagattgaggcctcagtagtggctatcaggcccaaaaaatccaagggcaagaaggctgccagcaggggcccaaattctgtctctgagatctctgaggccccacttgccactcagatagtcacaaaccaagccctggcagccaccctgcgggtcaagagagggtctagggctcggaaggctgccactaaggctcgggcaactgaaagccagactccaaatgctgaccaaggggcccaggccaagatagcctctgctcagaccaacgtaagtgcccttgagactcaggttgctgctgctgtccaggccctggcagatgactatctggctcagttgagcctggagcccacaaccaggacccggggcaaaagaaaccgaaaggtgagatctctgacattgccatccttaactttgtgcttcttttccatttctacccttctagtttgttcatttcttctataaaagttttactttgagctagtccctgtgttcagataggctgtggaagatgctgagaagaaggtgatatagtttctgctccctagcagttcacagattggtgaggaaataagacatccatacactcagctacaacctgtatgtaatactacttgtatttaaatagtagttaccacgtgccaggctttgtgttgggtacagttacacagggtatgtctgaatgtcttgaaagtaactcttaccaacaagggatcataggtcccagttttacacttaagaaaactgagtctcagagaaatgaagtgacttgtccaagaggtaccagccagcataattggtggtagccagaggaagagaaagacccttaggctcttatcttgagttgttcctggcctggcagaggaacgaaactccttcctggaagacagtgaaagataagctcaggactcagggtggccaatggcaaggtcaggatcaggctccactacagcaaggctgagggagggggttagagggactttctgtctggagcaggcaaggtgaggagacagagccatctctttcacctggtgactctggaccttccttctttctgatgatgaagtccaagcatctgaatggggatgagagaagtggcagtaattacaggcggatcccatggggccggaggcctgcaccaccgcgagatgtggccattttacaagaaagggtaagaatccaatgctgtccagtctcttctcttcttcacttgccctcttctctgcctccttccaagttttctgcaagcatgttaagatctctccatctattcctctcctcccaggctaataagttggtgaaa

SEQ ID NO: 43921 - DNA, 2300 bp, Homo sapien
aaagtctagttctgagactctagaggttctgagctaacctgtaagaccacattcttagatcaggcttgtttgattaattaaagaaaagccctggcctgggagaaattaggtccctagtgttctattcctgacttggccactgatttactacatgaccttaggaaaatatttctagacctcagttttcttacctgagagggtgagatgaaatgatcttgcaagtctttacacaaaatcaaaagagtaaaaccaaattcatccttctaattgatttgcaggagctctttgtgtattataaatgttaaccctttcccataatattgtaagtttccttaactgagagttttctgtatggtcagcattatattagaagtttcagattagtcaaggaggtgtctgatcatttacctcccaaagggagtaacagtgttagataatatatttttaacatttcacagattgctttacattttttaacacattgaatcttcaacagtcctaaggagggtaggtactcctatcattcccatgttccagataagaaaactgaagcactgaaaagtttagtcttctgctcattgcctcatagccaacaaggggcagaggtaggattccactcaagaaatattgctccagagcctattgctcttaaccatcatgatctgctatctcagttgattcatttagataggtgggctctggaatgtattaaaaatttggtatgatttatacacaacaactggagggaatctgacccttgtgtagactacggcttgcaaatgtattttagggaacttcttaaaaggcaaagtggaactgagagcatttgagggcagggattggaaatttctgtccccaagagattgcccttgtgtagcccagctcagtggaagaaagttgagcttcttcatagccaatcgttggaggttcattgggggtgggaaggttgcaaaagagtgaagtaagaggacacttgtgcatcttcgaggcaagctgtgcagttctatgagttatacacataaaagcctcaaaacaacgggtcaggggagcgggagagggcaggtgagagtgagtcatctgggctggatgactctggcctatggacttgtcctactttgaggccattgctctctgttccctgctgcagcctccaccctcctaaatctccatcctaatagcttggcatgaggaactttagtgaaattttctatcagttcatgatgccagtgtcattctccttagggcatctgatggtggctaacagccatgtgggcagagcttaccattcccccacctccagccccaggcaatggctgcactcttccaaaggtgtcagtttactcctatttatttagcccttggctggagagagtagaaagatgatcggatagtgcccatctcttcaagagtgctccaggcagcacatttcaggtgggagaggccctgtggcaaggaaggcagcagaatccagagaagacaagggatgcaatgccattttgggtcggggaagcagagaagtagtggaccttccatgtccagtttgggcctctaattgccagctcaaaacactgcattccccagtagggactttgtgtttgtgtttttgtccttgggaaccttgcatttctgatgtgaatcttggtttctgggttggagcttgacattctacttgggcccatttttttatttcaaagctgggaaagccgctgagacctacctccatcacctttgcctctataccccacacaggctgtaagcacatgatctttggtcttttatttgcatactctattagtcttgtcttcattggagggaagtgactggtcagacctgggctgtgttgctggctgccttccttgttgggctccaacttacctcctatgtacacagcccttggagttcagaggcctctcctgacctctgcccaacctctcgccctctgcacccaataccccactagtacatacaggagcagaggcaggctaggaccagaggaaagaagagaggggactgaagacagactttgagagggctcagaaacccagtacaccccctgtcccagccctgtccacctgctgctgtggccacagcgagagaaaagacagctagtaagataggaagtgaggccaggtaccttgtgggcagtgatgtcattcggtgcgactcctaagatgtctccagagatgggagagctcacccaaaccaggttgcagaagatctggattccacacagcagcggcagcagcaggctgcaacggagaaggggctgtaagtggggtttgcttccgtgggtttaaagg

SEQ ID NO: 43922 - DNA, 2300 bp, Homo sapien
aaataggttacatatagatataatcttttcccccactttcccatgccctttaatgcacacgacaaccaaccatctatgcaaagaaaactttccagagggcctgaagaatggatgtggatttgtgcaactcctgcctactttcccttctttctcacctaccttttattctagaggttttttcttccatcgctaattatccaacactcggttctcttgcatttacagacccccaaggcaggtccagtgggtggcatcaaagaggaagcctggaggtgttcgttggttccctgagaaggctgaggacgtacccttgttaagtgggggatgtatgtgctctgttgaaatatcagctgttgtagttgccaaagacgttcctgagccaccagaagccttttctcttcagtccaaccatgtgttcaccttgccccaaaggtcagaactaatattaacaagccactgcagaatggggaaattaaaaccagccatggagacaggcaagttctggatttcgctggtgctgagtttcagatcgatcttcagtgtaaatgggcataatcccttactggaaagcaatctggcaatatgaagcaagagcaataaaaatgttcatttcctttgtcctagttatcgcactcatgggagtcaatcctgagtcaataactcccaaagcatgaagaagctcaggacatgcaaatttttattttaatcacagagctattttctgatagcaacaactggtaaccttttaagtcctccaggaggaaaagcagtttactgcgtctttgctgtaaccattgaggatgatggctctaagacttaaattctggggaacaaataattatgctgcaattctgggtgaggaacctaaagatgcatcgttatgcttttccctggacattgggcatatccattacttctaatttttgtgctctcaaaaacaagccatgaacctgtcgatgctcttgctattatcctttgttcattcattcacctgacaaatatctattgcttcccaacatatgctgtgtccagtattaggggatggggctaacaagatgaaccagacatggtcattgctctcaagttgctggcattctaatggcagcagaaatagaagtcaatgatagctgtgtattataagtactgtgacagaatggaccatagggtgccgtggggccccagaggaaaagacttaactggggaggtgtgtggtcagtaaaaacactcagaaaagtaattattgagctaattaagacagggtgtgaatcctggctctactacttcagtgtaagagagagtgaactgtgagaatgaaatgaattcattcgacgtctctaacttagcctccatgtcccgaactgggttgtcttgagaatgaaatgagataacatatacagaagagccatggatgcatccggagacaatgctgctcacgagcttacatttcctgggcttcgatttcacttatctgagaaacagaaccaagagtaaggatgtgtccggctacatccttcagaatgttaagagccaagacaaaagctacagggcaggcttgagacagcctcctcctcctcccctctgccccaataaagccaaaggccctcctcctaagtcttatctcagtggagcgactcttactgctccctcctccaaccatgaacttccctttgcccagtccaacgcgagcacttagcgccagctattcctggggcgcaagcgctgcagccatctgtgaacttaggtgggcggtccgccgcactgagggcggggctttggcagctgagcagttccgctcagggttccgtcgcttaaaaagtggcaaaatgccgtttgtaagtaaccggacgcaccacttggacttctgagtagaggaaaaacgcattgagactcagctgtccgagcggaaggagcgggagcccaactggaaactcctctcgccattcattgcccctaggcttccgctttgcttccttcagcgtccacccagttcctcctcccgccaatgagagctgaggaagttgaagcccccgcccgacgtgcgtcaggcgctttagtggtacgcacgagaacgcctgcgcaaacgcgcgcgggaggcgggcctggccaacttctgaacaggaagcagttcgctcgcgcctaggttggcgcgggctgggaggtgttccagccctttaagatgttgcgcgtggtgagctggaacatcaatgggattcggagacccctgcaaggggtggcaaatcaggaacccagcaactgtgccgccgtggccgtggggcgcattttggacgagctggatgcgg

SEQ ID NO: 43923 - DNA, 2300 bp, Homo sapien
gggggggtgggggacaaggaatgctgcaatgagtgttttctggctgtctgctggggtagagttgcagttggcccttttcacctctgggagtacagattgggtgctgacacaagagaggattttaaagtcgtagggaaaaactttcagtaatgatctgttacttggtctcaaatttcaccatcatctctttggttaaaagtattgttttaagaagatgcctggcaagcattatcacacattaggtacataagttattgaatggtagagtaaatgaatattcaacagtacctgaaattccactgtagttacagatctgttcctttggtaaggcattggtgacaaatggcatatgacctggaaagaggcctatgttagtgcagcagaggagataaatgtctagagtcaggccctcagtcaagaaaaaaaggtagtaatatttgaatcacagatccataatggttaagttaggaatctctggaaacagattgcctaggttcaaatcctgcttctcctatgtactagctttctgatctagacaggttacttaatctttttgggattcagtttccctatcatcacagggttgacatgagaacacggcctggcacagagggctctgtaagtgtttgactatcagaactaggcggaatctatgaaattatctagtccaatgtcagtggagaaacggaagcccagagaggggaattacagagcccaagttcacacaataaattgtaacaggattgggacaagaatcaattctctagcttcccaaacccagcctggtatattcatgtgacttcccttggctgtacgttcattttttctacatgggaaatggagaaaataaaaataataaagtctatcaattaaatataatatttaacacttttttactgtttactctgggataggtactctgctaaatgctttatatggattatcttactgaatcttcacaacattcctgtgatgcagattgtccttgttattaccaacattttccagatataagatgtacagcagggaagtgacttttctaaggtcccaaagctagtgagtggtggagccaggattcaaacccaagtagtttggctctagagcctatactctttataccctaaattgactaaaatgcttccttgattcaattttactcactctagtctcttggtaggtaatgagatggaatagaaacagagcccatggtaactagactacaaggtcatgggtataatgatggccaggcagagtgaggcagagcaaatttcaggaaaggagtaacagaacaagagaaatgagaacaggagcttgaaagaacttgagaattcaacaaattccaagaagtggtctatattttcccaggaccctgagcatatcatggccaaaagccccctagtaatgatgtgtgttaatttctcctgtttttatatacaggaggtaggtcttctccaccatcccaaggcaggactggactttgcctccaatattgggggctttccttcccactacataccccaatgttgttggcattattgttgccagtattgatgttaggggagtttacaggagcctggagccttgtcatctgccttgcctgcacttctgggccatccatttcttaccaccaatagccagggccagctctagccagatgctcagacgtgattccaggaaggggctcctcttctctcccacgccctggtctcagcttggggagtggtcagaccccaatggcgataaactctggcaactttatctgtggtctgcaggctcagccccaagtgctttagctttcacaagcaggcaggggaagggaaacacatatctccagatatgaggtaggcactggatccaattccttacctaccttgtgaagtggccataattacctcacgtttgacagctgatgaaggccaagatccagagaggggaagtgatttgaacaagaacatccaacaatgaaattggagagctggaattttaataagaaaagctaacatttattgaagatttactatgtgccaaaaactatactaaaggcttaacttggattgtttcatttagtccctccaacaacccttctgtcttttccaatttcagggcccacatgccttggccccacataccaacccaggctgctgtgacagcccatgagagggggagaggttgctctgggatggaacaagaaaaagaggttgttttgtgaggtacggggagggtgcttgttctatgagatcaggaagggagggagatgaaggaggttgccatatgagggcagggccatgagctgacctgtc

SEQ ID NO: 43924 - DNA, 2300 bp, Homo sapien
agacataagacaaggtgccagtagtacagtgtgataaattctgagagagaagatgtgggggcccagaagagggaacaagatccagtgtgggggtttaaaagggcctcccagaagtgatgacctttgagctcacttttcaaagtgacaaatggttagccagctaaagagttggaggtcaaggttattgcagctgcatttgaaataccttctagaagaactggaattaatctttagttttaaaaatggttaaatacaccatgctatacccatactctccaatttacatgccactgcatctccactacctagcaccacacctgacatgctataggcactcaataaacatttgttgaattaataaattaatccagatgaagcagcaaatatcacagaaaaggagttaatattaatattattcaaagttcttctcatctcatcctcacaataatccaatagggtaggttctatgactgtcccattttatatatgagagatctggagataagtgaaccaaatagctaaggtgttggtgacttggtgacttgggtgagtctgactccagagtgcatgcttttagtccactatattttactgccaacccacccccaaaatgggcaaaaagtagaccactcagaagagaaatagacaactgataaagaaacatgaaaagacacccaatctcattaataatgaaagaaaagcaaatcaaagcaacactgatataccatttttagtgcctataagattaacaaatattttaaaaattgaaaataacaaatggtattggtgagtttgtgagaaaatagatacacatttactcttatacaccactgggtggggaggggtgtataacacatgtataggacaaattggcagtatcaaaaactttaaatgtctattacctttagatccaggaatgcttatattttaggatgccaccctctaaaaaaatgctctcacaaatgccaaaagatgttcattgcaacattaatcataatggaggggggaaaatccttgggaataacctaaatttatatcaataagggagtgtttaaataaattacagtgcattcagattttgtaacctccatggtatattggcatatggttgaatgaaaaacaaacaaaaaaaagaaattgcaaatcaatatgtagactatggtcttatttatgtaaatataatattaatgatgacaatctgctctaaagatgaaattgtctggttataacatggtcctgctgccttaggattgataagggaaggggaaaaagagagtgacaaaaggggaagaaaatgaaaaagggaggagaaggtaatagaaaagataagacagagaacttcacatttttaattgtatattatgagaggaagagaagagtgtgggttctgtaactacattgcctaggttcataggcgggctctgtactttctagttgggtaattatcaacaagttacctcacctctctgagcctcagtttcttcatctgtaacatagggataatagtacctatcttttaaggtccttatgtggctaaattaattcatgtaaagcacttagtgaagggtctggtgcattgtaagcactcagtcaacagtaggtgttatttatttgggccaggcactgtggtatgcgttttccatacatgatattaccaaattgttacaacaaccggggatctagtctgtggaagctgactgtttgagctcataagcacaacactgtattctaggtctgactccagagccctcccaacttgtgccacagtcacttctgggttttattgccctccttttatagttgaggagatctatagtcagagaggtggttttgctcaaggtatcccagctctatgtggatggtctgattccaaagcccaaatgagctaattttactgtcctatagagagaagaaaatagggaagagccagagctgggggagggggtacactagagggaggggctactttgggttttatctctagcaaggaagggactgagatacctttggggccaatgcagggccaggccggcagaaggcagggtgggtggggctgagtcagaggagaagggataaatgccaggtcctaacccaagtacccacctgtcattcgttcgtcctcagtgcagggcaacaggtaagagctgctttcagcctggcaccctatctctggtctgccagctggtctctcagggctgtacacactgactctctggtctgagtagatctgactttttcctttgtttgtttcttagaatctgtctctttttcattttctttttatctcccatgtctctttc

SEQ ID NO: 43925 - DNA, 2300 bp, Homo sapien
atttcaagccagtgcttcttagcttgctgggctccataggactgggacctgatgagcaagaccacctggttccccggattcagccccctttccaggagagtgaacagttgtgtcacaccgggttccaggtgctactggggtaccaaaaaaacataaaactcctgcaactagctcagtgtctgcccgaacaactgcccagttttgtgcttgaaacccagggccctgctgatgttggcacaagagggaatctcttggtctgcagattgcaaaaactgtgggagaagcgtagtatctgggccagatagcacagtacctgacagcttcccttggctgggggatggagattcctaactccttacacttcacgggtaggcgatgccccaccctgcttttgctcaccctccatgggctgcacccactgcctaaccagtcccaataagatgaactgggtacctcagttggaaatgcagaaagtgcttgccttctgtgttggtctcgctgggagttgcagaccaaagcttttcctattacgccatcttgccagatccccgcaaccatcccatatgaattttaaagtagttttcttctaattccgtgaagaatgtcattggtagtttaatagcaacatcactgaatctataaatttccctggtcagtttggccattttgaaaatattgcttcttcctgttcacgagcatggaatgtttttccatttgtgtcatctctgatttctttgggcagtgttttgtagttctcatagtggagattgttctcctccctagttagctgtattcctaggtattttattctttttgtggcaattgtgaatgggattgtgtttctgatttggctctgtgcttgaaggtagttggtgtacagaaacactcctggtttttgtacattaattttgtatcttgaagctttcctgaagttgtttataagatcaaggagcttttgggcagagattctgggattttctaggtatagaatcacatggtttccaaacagattgtttgacttgtgtgaaaaacatagtggagtagaagcaaacacgtgtcagcaatggaatagaaaaataaaagtgcccatgaataaatttaatttgaatgtgaagaactaatatgaagcaaataacacagtcattgtgtgggatatgttaaaagacttgaggaattgaggagtggcttttttttgatagagagattctaaaataggaagatggctattgtcccagagttaacatgtaatataaaaataataactagtatctcaacaggaatattttagcacctgatcaaatgattctgaagttcatctgaaagaccaacgtgtcagaattgatagaaaaggagaaatcaatgagggagggcaagcattatttcacatttcaaatataatttaagctacagcaattaaaatagtgtagtagtggtacaggtataaacaactcaatggaagaaaattaaaagaagagagttacatacaaaattgagtggggatgtaggtgatgataaaagagccatttcaaaacagtgggtgcaacagggattcaacaaataatgttgagttcctaccactttaattttgtccagatggatcaaagattttgaacgtacaataatgcaaccaaaaactatgaatgtcttatattggaatgggttagacaattgcaagcatgacagcaaactcgtgaaggaggcaagaaaatgatttatggaagcgtatataaaacagatattaaaatatttaagatttatttctatgatggtgaagttttctgaaacacattattagagtaacctggggctcatattctccaaagccactggaagtgaaagaaagggtgggcgggggaaaaagaaaagtgctttgcaagttcattttcgttgtcaggagcgctggtggtttaggttctccacagacgcaggaaaacatcagtcacgaggcgaatgtcccagtcagtgtgcatgctgcacagacctgttgctgcacttgtctgttgttacgcatgtctgttgctacacgtgtctgttgttgcgcatgcgccttgctgcccgccttctgtccacacacagctctgcaaggagagtgtcttcattctttccgccatcttgattctttgtcactgaccgagactcagccggtaggtccgcagagcggtcttcctgggaatttagttgtgggtgaatgtgtggaggagccagctggctttggacaggtcctgcggcacagtccgtggcttccgagggaaaagggcctcgcggtcgtcgtccggcccctcccaggtcgggatgccacc

SEQ ID NO: 43926 - DNA, 2300 bp, Homo sapien
tctgtggatagttttgttttttttttttttttttttttttttgctgtgcaggagctctttagtttaattagatcccatttgtcaatgtttgcttttgttgccattgcttttggcatcttcgttatgaaacctttgccttttcctgtgtccggagtgacgttgcctacgttgtcttccggggtttttacagatttgggttttacatttaagttcttaatccacctttagttaatttttttaataagaagtggtccagtttcagtcttttacatacagctagccagttatctcagcaccatttattgaatagggattcctgtctacattgcttgtttttgtcaactttgttgaagatcaggtggtaataggtgtgaggtgtgcagcattatttctgggctgtgtattctatttcattggtctctgtgactgttttggtaccggtaccatgctgtttggattaccgtggccttgtattatagtctgaagtcaggtaatatgatgcttttggcttcattcttattgcttaggattgccttggttatttgggctcttttttggttccatatgaattttaaagtactttttttctaattctgtgaggaatgtcattggtactttaataggaatatcattgaatgtatgaattgctttggtcaattaggccattttgccagtattgcttattcctgttcacgagcatgaaatgtttttccatttgtttgtgtcatctctgatttctttgagcagtgttttgtagttctcatagtagagattgttctcctccctcgttagctgtattcctaggtattttattttttttttttgtggcaattgtgaatgggattgtgtttctgatttggctctgcgcttgaaggtagttggtgtacagaaacacttctggtttttatacattaattttgtatcttgaagctttcctgaagttgtttataagatcaaggagcttttgggcagagattctgggattttctaggtatagaatcacatggtttccaaacagattgtttgacttgtgtgaaaaacatagtggagtagaagcaaacacgtgtcagcaatggaatagaaaaataaaagtgcccatgaataaatttaatttgaatgtgaagaactaatatgaagcaaataacacaatcattgtgtgggatatgttaaaagacttgaggaattgaggagtggctttttttttttgatagagagattctaaaatagaaagatggctattgtcccagagttaacatgtaatataaaaataataactagtgtctcaacagtaatattttagcacctgatcaaatgattctgaagttcatctgaaagaccaacgtgtcagaattgatagaaaaggagaaatcaatgagggagggcaagcattatttcacatttcaaatataattaagctacagcaattaaaatagtgtagtagtggtacaggtataaacaactcaatggaagaaaattaaaagaagagagttacatacaaaattgagtggggatgtaggtgatgataagagccatttcaaaacagtgggtgaaacagggattcaacaaataatgttgagttcctaccactttaattttgtccagatggatcaaagattttgaacgtacaataatgcaaccaaaaactatgaatgtcttatgatattgcagtgggtgagaccattgcaagcatgacagcaaactcgtgaaggaggcaagaaaatgatttatggaagcgtatataaaacaggtattaaaatatttaagatttatttctatgatggtgaatttttctgaaacacattattagagtaacctgaggctcatattctctaacgccactggaagtgaaagaaagggtgggcggggaaaaaagaaaagtgctttgcaagttcattttcgttgtcaggagcgctggtggtttactccacagaggcaggaaaacttcagtcacgaggcgaataccccactcagtgcgcatgctgcacagacctgttggtgcccatgtctgttgctatgcgtgtctgttgttgcgcaggcgccttgctgcccgtcttgtgtccgcacagaggtctgcaaggagagagagtgtcttcattctttccgccatcttgattctttctcactgaccaagactcagccggtaggtctgcagaacggtgttactgggaatttagttgtgagagaatgtgtggaggagccagctggctttggacaggtcctgcggcacagtctgtggcttctgagggaaaagggcctcggggccgtcatccagctcctcccaggtcgcgacgccaccatgg

SEQ ID NO: 43927 - DNA, 2300 bp, Homo sapien
tactccctggctgactcagcctcagcccatgtgtgctagcttctgcagacccctctgaatctgggcttcatcctcccttcagcccctggccagggttgtccactccacagcctcagctgcaaggtaacctagtccttatctggcttaagcttgccccatggtagcacccctggctcttgaatcagccactttccataccctccaacccctccaccttcctcagagaatgcagccccttggggtctcacctacaacacagcaataaccaagatcagctcttgaaagcaaaatccctcatttctaaccatctatttgcccactttgtagacgatagcatgatccgatagacatggagaacatggtgattcaagtaaaaggaatgatcattacaaaagcttgttccttgagaatgtggaagggcatgggatccaagtgaagggtgttaaggaaaaaaaattattcatggcatttgttaaagaacggtaaggcagacttcattcaggaccatcaagataggtgtagggaccactgctatggggttttgcagtgaagggagagaaactgggttccactccaaatacaacaacgaaaagtggaaatttatagccaaggagcagggtggggagcaatggacggaaaattactaagaggaaacaccacgggtaagggggtattgtggctaaattgaactaacaggattgttggtgaaggtgggccagggtgactagacatcacctgggggatgaggaacctaactgagatattgatgatgggaaattctaactaaactgacttagcaggattcttgttaaaattgcacaatgcagcgacaaacatggcagtctaaaagtcccctgtccagggctgtctactccacagcctcggctgcagggtcacctagcccctagctgggttaggcttcctttatggcatgatctttagttcttgaatcagccactttccacatcttcccttccatcctcagggaatgcagccccctgtgagatcacctacttaacagcaagaaccaggatcagcctaaactctagcactccctttgccaactttttagataataaatacagatagaggaacatgataattcaggagaaagcataactgcaaaggatgatcccttaagaaggtggaaggcataggatccaggtgaagggcctggtctcaagtaggatcctgtctcttcctccagggaagcagccaagattataagtgcaggtctactgctgttgggaagtggtgtgaattcttctctgattgcttctattttctcaagggaatatcagtgaatatcatgagaaaattgggtgctggtgcttgtggagggatcttgtaagtagactagacagagaaggtacacttgtggagggtgtacattgtttgtctacttggcggcggggggactgccaggagagtagggaggagagagttaatagctttgggtaagctggctaaggaaggtgaatggtgaggaacgcggttgtggttagtggagaggaggcctccttgaggctaaaggctgtggatgctggggcactggaagaggtagctgttaggacacgatcgggtgctgcccgttatgagaatgggggatgcaagaaatggacatcgtggaggggcgcggtctttcctgaggcccagggcatgaccgcgggcagaagagacttaagtggggggaaggagacccccccgaggacggagaggcgccggccacggcctggtcagccccgggggcgctgaggtcgccgaggaggatcagcggtgtgagggctgcgaggacagggcgtgtgccacgtgagaagcgtgttcagaggctggctgggtgggaggagaatgtccatgggattggcacaggtctcgaacatggggcggctcgggcagtcgcgcagcagagcctgaccctcagcggatcgtccctcaggcgtcagctcccaactgcagggaagggagcctgcggcggacccagaggaaacaggagccgacctccccgggctccgatgcgcaggcccagagcccgtcaatccttggccagccccgccctccgggctgcgtttttccggcggcgcaggaacttcctgcgcggttgctatggttccgagggcaggactatgggaggctgccctgtacggtaagttcgtcggggcctttccggccggtaccagtccgagctctggtccccacggtcatcacgctttgctttctcagccaagatctcggggctcagggcggaaacgcagcggatatgtattttcttccggggttggtggcgctcggctctcatgacc

SEQ ID NO: 43928 - DNA, 2300 bp, Homo sapien
ttcaatcttttgcataagctagccagttatcctgggaccatttattgaatagggaatactttctatattgcttgcttttgttgagtttgttgacgatcagatggtaataggtgtgaggtttgcagcattatttctggacggtgtattctatttcattggtccatgtgactgttttggtaccagtacaatgcttttttggttaccatggcctcatattatagtttgaagtcaggtaatatgatgcctctggcttcattctttttgcttaggattgccttggctattcgggctcttttttggttccatatgaattttaaagtagtttttttttctaattccacgaagagtgtcattggtagtttaataggaatatcattgaatctataaactgcagtttggccttttgacaacattgcttcttcctgttcacgagcatggaatgtttttccatttgtttttgtcatctctgatttctttaagcagtgttttgtagttgtcatagtagagacttttctcctccctagttacctgcattcctaggtattttattgtttctgtggcaattgtgaatgggattgtgtttctgatttggctctgaccttgaaggttgctggtgtatagaaatgctccgggtttttgtacattaattttgtatccggaaactttcctgaagtagtttatgagatcaaggatctttttggcagagaatctgggattttctaggtatagaatcatattgtttgcgaacagagattgtttgacttctatgaaaaacatagtgaagtgaaagcaaacatctgtccagaagggaatagaacaataaaaatgcccaataataaatttaatttgaatgtgaagaactaatatgaagcaaataacacagtcattgtgagggatacataaaaagacttgaggaaatgaggagtggctttttcttggatagagaaattctaaaatagaaagatagatattgtccctaagttaagatgtaatttaaaaataatacctagtgtctcacctggaatattttagcacctgatcaaatgattctgaagttcatctgaaagacaaatgtgtcagagtagacagaaaaggaaaaagcaatgagggagggcaagcattatttcgcattacaaatataattaagctacagcaattaaaatagtatactagtggtacaggtacaaacgactcaatggaagaaaattaaaataagagagttacatacaaaattgagtggggatgtaggtgatgataaaagagccacttcaaaacagtgggtgaaacagggattcaacaaatgatgtagagtccctaccacttaattttgttcagatggatcaattttttttttgtttgtttgttttgttttttttttttttttgagatgaggtctcactttgttgcccaggctggagtgcagtggcacgatctcggctcactgcaacttccacctcccgggttcaagcaattatccagcctcagcctcccgagtagctgagactacaggcgcgtgccactatgcccggctaattttttgaatttttagtagagatggggtttcaccatgttagccaggatgatctcgatctactgacctcgtgatctgcccgcttgggcctcccaaagggctgggattacaggcgtgagccactgcgcctggcccggatcaatgattttgaatgtacaatcatgcaacaaaaactatgaatgtcttatcatattggagtgggtaagatcattgcaagcatgacagcagactcgcgaaggcacaagaaaatgatttatgaaagcagatataaaatgggtattaacatatataatatttatttctatgatggcgaatttgtccgaaacacattgttttcttagagtaacctgggcctcatattctccaacgccattggaagtgaaaggaaggttgggcgggggaaaaagaaaagtgctttgtaagttcattttcgttgtcagaagagcttgtggtttaggttctccacagaggcaggaaaccttcagtcacgtggcaaataccccactgagtgcgcatgctgcacagatctgttgctgcgcatgcgcctttctgcccaccttctgtctaggcagagctctgcaaggagaggttgtgtcttcgttctttccgccatcttcgttctttccaacatcttcgttctttctcactgaccgagactcagccggtaggtctgcagagtggtcttcctggtaatttagttgtgagtgaatgtgtggaggagccagcgggcttaggacaggtcccgtggcacagtccgtggctttgaggg

SEQ ID NO: 43929 - DNA, 2300 bp, Homo sapien
agactataactcccctaagttgggcctctaacccaatcccatcctttagcctgctcccctgccacttacccaaagtcatccaatcagtgctgcagtctatttcctttggattggggaggtttcttcagtattgtcctttttgtggttcacgagaaagatgttaccggaccccaccacttacccaaagttagcctttgggttgggggtttccgcagtataatcacttcggtggtcaccagagagatgttacaggaccccaacacttacccaaaggtagccattgggtcagggtttcttcactatagtcccttctgtggtggccagaaatatgtcccaggaaaggggacccgaccccatgtcccaagagagggttcttggatctcacacaagaaagaatttcagggcgagtccgcagtgcaaagtgaaagcaagtttactaagaaagtaaaggaataaaataatggctacaccatagacagagcagctgcacttgtctgattagtggttgtactcatgtatatatgtttctgcacttgtctgattctgcctaaaaactttctctttactttagaagatcagtttatcaatttctccaaaaagaacaccctctgggattttgattggaattgctttgaatctatagctcaatttggggaaactgtatcttaagcatattgactcttttgattcatgaacaagatatatctcttaattttatttgggtctgaaattttcactcagccatcttttgtacttttcaatatgttataggtcttgaatttccttattcagattcatcccttagcagttaatattcttcgatactataatgcatactattaaaaatgccaatccaagtttgtattgctgatgcacaaaaatacaattaaattttgtatatcgatttttaattctgcaactcacttgtttctagtaactgttttatagattctatcagattttctacacgaaagattatgttatctatgagtcatacagttttacttcttccttttcaatctggatgccttttatttcatttcttgtctcattgcactaactagattcaccaggacagtgctgaagagaagtgagtagggctgatatcctggcccttttccttatctgtgtgtgtgtgtgtgtgtgtgtgtgtgtgtattatatatatatataacattgtgtgaaaaattgattcacacaattatgaagactgggtcccacagtctgccatttacaagctagcaggagaccagaaaccagtgatgtacttcaattcagatccgaaggcctgagaactagggaagcagatggtgtaaatcccagcttgagggcaggagatgtggactgaacataaatatatgtgtgtaaacatgtatgtttgtacgtgtgtgtgtgtaggctatgtgtatatcctaaatgcagttctgatgatttctattttattttattgtgtttctttaaaatgctgttcgttgctcattacattaaagatgcaaattacatttcatcaacaactatgtattttgtggtaaccctagtggcccatatcaaatatgtcctttttgtctaaaaacaatgcatctttaaaggttcacattaaacttcagataacagtgtttgtttttcaaaaggcaagagttagttaatacaaactagacctcaggaaaaaggatcaacaggtacaggtgccctcttgttcacttgccatcctgtgtaaggctgtccttgggctgggcctggggtgcagttaaatgtcatgtatttatgatccctcttccctctatttatgagggaagtgtgagagttgtattgggcatgatagttaatttgacctcgagcctcagggacccttactttagatgtcaaaaagtttaggaaggaaaagtaaaagagctgtgcaagcccctttcaatactcaagaaaccttgtggctcctagtcaacagaggcaagaaaacctcagcctacgtaacacaagctgcatccctatgcatgtccgttgctgggcatgtccattattgcgcatgtgccttgctgtctgctgtctgctgtctgctgtctgcgctcagagctctgccctgagaggtggtcctcctgtcctcttcattctttctcactgactgggactcagctggtaggtccgcagatcagtcctcctgggaatttagttgtgagtgaatgtgaaggggagccagcgggctttggacaggtcctgcggcacagaaaccacagtccgtggcttctgagagaaaagggcctcgccgtcgacgtccggctcctcccaggtcgcgacgccccatg

SEQ ID NO: 43930 - DNA, 2300 bp, Homo sapien
tacaagtctccatgggcataattgctgacttcattatagaggagcacagtggggaaggagagagcagagtgggtcagggaagacgtaataggagggttttgccatatccaatatataaaagataaacagtaagtagggcctaatatttaaattttatacagctagctattggtgtttataatattaatctctcttctttgccctacgtttgagattaagtcgcagtaaaaaaaaattcatgctaaaaacaagcaaataaactgcaaaagtaatcctcccatttttgtttcatgagggtaggattgtacatgctatagacttccatgcaagacccaaattcctggaaacagtaaaataagttcatacctgtactgaaaaacaattcagagcaattatcaatggaccagaaactgcgagaattctcagaatgtgggacagcagatggagccagactactgttttgagtaggtcatgtcccagaacgcgtgcaaaggttatcccaaacggagggctggctcaagagtgctctgtgtcctggagaggtgctttctttgcttgaccaaattgatttattgctaacttacccaacaggaggtctcggtgggctctaattataaagaaaatttcagcaagacaggcataaagtattcatttgtttcttaagagttcagttaagaacacctataaaatcttttccatcatgaattccttcagcacgcatttattaaatgccacactcacacaccgcttggaaaaccttgagaggcaaaatctgtgcttaccatgtaataaatgcttttcattttttatctcatttaattctcacaaccctatgagggctgtactttagccccactttatagatgggaaaacaggcttagagagaagtgacttgcttaaactaataccttgaatgacataagaaagatatagagtgctagttatagggctttcctcaatggagtaaaaatggactcattacccttttgggcagatcaagacaagcttcagggagaaacaggtctgtgagcagtcaaatggaatttagatagttggagaaggctgagaagacaggtcaggcagagcaaacagtgagcaaaagcaagcagtggataaagttcagagtatgctctgaaagaagcaaaataaatcaggagtccaggaagactggagcctagaaaccttggagccaatctgaactccatcatcccctccacattccccacttcatccattctgtctgcaaagcccttcaacggtcacctttaaaatgtctttctgcctctccatccccatggcaacagccttaaggcatactttagttcccagtgcttcttattccaattgcttcctatgtggtctgccaggaaacagtttgcttttctgagaggctgcacaaatgcaattcctctgatcctgtcactgccctgctttcatacatacatacatacatatatgtgtggtagatatatgcactgtatataaacataatgtggtagatatatgcacgatataggtatgtatgtatgtatgtataaaagcagggcagtatatatatcgtgcatatatctaccacattttaaaggctctgcacctctttcaccctgcttgtttctgcagtcccatctcctcacatcatccagcacatctgccataacaatattatccgggtcctacatgggaccacaaattgattagtatacacacaaatgccttctgaaaacagggcgagtgaatgaacgcgctgtgtaagccaagacaggaaaggaaggctggagacagctgactccttccaagaatacaccctcccgccacccctggcctcccaacccccaacacacacacagcccgtcgtcagtgggaatggagccgacgcactccttccctagaccgtcgagccaatcttggaatgtttgtagtaggctgaaaatacagaaactttaagctatttttttctcttctgcaaactccaggcccctccaatctctagctgtcatttctgcccttgtcccacccctgtcgctgcctgccccttttcctatctgctagcggaagtccctgtggaggaccagcctacttcctctttggtgctaggagtgtgcgtggcaggagaggcggggccaattttgctgagctttctcgcgggcttgcagctgcggcaagtgctggcggcggctgctcgcgcaagtcagctggcgtgggaactaccctttgtagctgagaacggcttgtttattgctacaaagactctattgacattggtagcttcagcggcagcagcttcttacggtataaagctg

SEQ ID NO: 43931 - DNA, 2300 bp, Homo sapien
gattttgcacaggagaaagcgaaggctcagaagacagaagtatttataaattgtgccctgcctccctgcctgcataaagggtgcagggctgtctcagagcagctgggatccaagccacaggtggcacagctagcaaatgactgactcagcatttccttctagggctgctaacccagagtggagcaactctttgcttagctgtggctgagaaaatgcccttccctaggggagaaaaagcacgttttcctgcacaagccagtctataattccaaagcactttccctccgggtgctagtatgtgactgagatatggtcgaatctaaaccaagtcacaaaatcagtgatatccattgtgcggaggtatccactagatgccactgccaagttaagagagctgaatcctaatcgtgaggttttgaggggaggtgtgtgactttctcagagagattaaatgtagcattaaacatccgctgtaataaaccgtaattttcttgggattggaccggaagggcaacaagccctggagatagctttcctccgggttgtcgccttggatgccggatctgtcaaagaaaaggaaaagtctcctggcgtatggacttcaggacacaaacagttgtatcttgtgcttctcccagcacaatctagcgctataatgcacctatggcatctttgttgaatacatgctcctgtatatggactgcctaggatggatgatcgggtgaactgagccataactttgagagagctttgaaagagaaaggcattctcttctcctctactctgcatcaggagttgttctctatgctgattttcaggagcggactgaaaaaagaggtgtgacagataaagctcgccaaaaaggtcttttacttgatatatactatgactcagtgttcacattgggctagggttattatttcaatttctctttaaaaattgacacaactaaggctcagagaagttaagtgttttatccgaggtcacacagcaagcatgtgcctgggctcaggtctctctgagcctgagcccttgcttatgcttcctcccctgcacattctgggataatctctctctctttctctctctctctctccctccctccctccgtcaactcccagagaccaggctctgacaggatcctgagggattcctgccagagggttgccatctctggaagcccccacccccacgccgggtgaatctttttttctgtggagtgcgggcctggagctaggtgaggcctgagcctccatttcaggggctttctgtagaatctgttgctgctgttgcctccagcagagtctgtttcaggaagaggtttgcctgcctgcgcgggacagcggtgccattcatcactgcaggagggcagaatccggggttgggggccgcacgtcgagaggggaggggccagggggcggcccccttgtgaccagccctgaggagaggtcaggagagaaggctggctgaggagcgcctggacagcagcagttgctgacgttctatatcacgcgcctggggcccaaggtaacccagacctttaaacaaactgccgggctgggggtgttgcgggggcaggagagggaaaagggagcggagacttcgggggtcgcgcgaggatagtggtggccatagaggtggcaaatgcgtgaagggagggagtagtaatccgaattctaggagaaatcataggaattgaagtcgcagaagcaagaaaaggggtgtgagagcacaagcgcgaaaaagcgtgagagggcgcaagagctgggtggaccgaaagtgcgctgaggggcaacggcttagagtggaacacaccgggtcacagaagtataggttaggtagaaacagagggacactttcttcctgtgagttcattttccaaaagtgcgtcctttcagccattttggagagaaaatgttgacccaagtgttttttaggatacagggaaagaacgtcagaggaagctgcaccaaagcgaggctgcgcagggcgcaaaaaagcagtcagagggtggcgccttttttaaagaagtttccatcctttctgtcctaaagctcaggccgttccccacccccaccgctcgctagccttctgttcccagtcccctggcatgatctgatcgcctttgaagcaggtaaccgcctcggtctccccatcagctccaggggcctctcagttgagtgggtggagccgacagaagccgcgggctgagctcaagggccgatgggaggggtcctgggggcgctaactgcgcaccgcggccatgacgctgggcagatcattcacagaagtctctgtct

SEQ ID NO: 43932 - DNA, 2300 bp, Homo sapien
acggaggccatcttttgatggttaacatcttactctaaaactcatatagttttatgggttttgctttgtatagtacatatactgtgttgaatgtgtacctggttggcatgtgctagcctgttctccatatctctgcttctgggtaacatgtcttttaagcttaaataatatcttccatgggatcccttttgattcctattatctgggttaagttgttcctctctatgttcttctattgaagtatctaatactcatcacactgtattttaaccttttgtttacttctctgtctttccgcattactctgtgatatcctcttgggttgtgtcttactcatctgccagatctattacatacttcttggaacatggtggatgctcaatacgtaaatattgaatgtttctaaatgaggcccaaagaaacaatacacagtgataacttggttttactagccaatatctaaggattggagcactctcccaggtgaagatggaggagaaattctgtaacactagagcccccatttaaggaataaaagactgctgagcactaaaatgcttccaggctctccgtggttggcataataagctaaatatttcaagttaatctcctgcttttccaagatcagtgccccactggaaggagatccattaattccctatggggagatggaagcagcgtttttattagagaaggctttctgttgtcttaaaagatgagtagaggttagctaagtcaaggcaatgggtagtaagccattttaagcgaatgtttttgagcaaagggacatgagaaaaaaacgggtgtgtggtgaagatcccagcatttcagtactttttggacgtgaagtatgaagcaagaaagctagggtgttaagttaccctggaaaggtaagcaggggtgagattttggagggacttttatgttgcattaagttataagattttatgttataacaccaaaatagagaagattggtatagttagtaaaagcatgtgttctgcagtcaggttgcctatgtttgaaagtcagctctggcctttactagctctgtgacttaggcttttttgtgccttatgttttttactctgtaaaggaagaataataagagtacctacttcataggattattttgaagatttgagttagagtgcttacagcattctgtaataattaacagttggtacaactgttgtgttgttttttgtatttatgctgtagaaagacaactcaggccacttgtatgaaagattagagtagaagagaaccagagtatggaaacaatatggagattaaagtgcctctccaatagctcccattgacatttgctggatatgtttgcaacatagtcctatgtagtgattttaatgatatcgcatactttacacatggattttgtgcaaactgaattaaaggaaaccttgccattttatttttcttacaaatgtcctgggtgtgaacttactggaaatagaacctctggggctttcaggaccttgcatactgtggctaaattttggtcctactgttcagagtatagttcagaactcatttcctaagaaggtgacctggagagaggaaagccagctgtttcccagaaaaggattgaaaacggcagcaaggttagattctagtatcagtatgagaataatagaggccatgttctgatagttaccatcttactataaaactcaggttgcacatattactgcctgttgtatatcgtatgttgagtatgatcaagaggcaatgcgtatagtgaaaataaaagatctgggctgtggatctagctctcctacttactcatgtctgtatatctcagttgccatgtctgtgacatgaggataataataccatgttatcttgcagggctgtgatgaaaatcagttgagatcatctatgtgaaagcacttaaccaaaatccaaaggcactcgatgaatgaaatgatttttaaaaccattaaggaagactcagaaatataatgtgatctatacatatgtttgtcccttccttaaatgaactcatcaagggtttaaatatgtgccagatgatcacctattatgcaagtcaccatagtttgcacataattcagtttataattcctcttgaagtgactttctgcttccaatcaaagctcaagaattccacctaaaaatgtttttctgctcaaaagctcttttttattacttccatgttttgagccttgttccagaaagctgaggtttctccaggtctgaccactaatcagtgagacattggtgcctctttcttcagtgcttctagcaggcctactgataag

SEQ ID NO: 43933 - DNA, 2300 bp, Homo sapien
ttcaaaaaaggtgcaaaggcaatggagaaatattatcttcttgagaaattgtgttgtttcgccctgcttcttggccactacattcattgttctttactcccctgggtctgttccccatgtttctcctttgcagttcaactgctcttcagtttaactgtctgtcttccccaccacagtgtggtagcctccatggaacataccacgtgtggttccttggtcttcacatttccagcatcccagatatttcctgcaacatggcaggcacccatgcatatataaatgagaaaaaagaatgtataaatagagatattaaagtaatttatttctgtcacaaaaggtctttctgagccacatcctccactaatggtgacatgggactgtctgttcccagtgtttctggatgcatgagaatggtagggcaagagagagaacaaagcctcttagtccctttccttctactacaaacaccttagggatgcgagcctggggagagagggaaaaccccgggtggccttgcatgtgcctgactcagtgtgcacatcccttgctgcccaagtcccttgtccatgtgccttgctgtctgccttctgtccctgcagagctgtgcaaggagacatcatgacttccttctgtgctgctgactaggagtcagccagtaagtccgaagatcagtcttcccagagttgaagtgggagagactgtgaggaggagcccgcggcgcggtctatggcctccgacggggaggtccttgaggttcctgtccttctcctaacaggtggtgacacagccttggccttgctgtcgtgggggtcccagacaggggaggaaggagggccatagaggggaggaggacctagtgaacatggagtgagttttgaagggggaaactatttgtggtatttgagtcccggaggcatatgaaaccgcccacagaagacacattccatactcttcagcggaaacctgggagaaggcagaggactgcgcggtgcgggatggggtggggcgaggaggggtgccacagcccaccaggcaggcaccgacctcactgcgcatgtccactgggcgtcttcccctcggcccctttgcccatgtggtgaacgccagggagctgtgaaggcttgaggatcgcgttcctgctgtcgggactttttctgtcctgctgagacgcagccggtaggtccacaggccagtcctcccagggcttgaagtgtgagtgagtgtgaggaggagccagcggccgtcctgagtgtggggcagggtggtacgtggcctcagaggccgaagggtctcaaagtgctcgtccttcttctcgtgaggtggcaccgctgtgggccttgttgtggtagggtcagaacgagggaagaaggtggaccgagtagttgagaggggtcagatgaagatggggtgagtgctgggggtgctggggcaggtatctgagtccctgaaaccctcgacagaggacagattccagactcctccgtggcgacccaggaaggagcggggtgggcattaaggaagggaactgggaacactgcgggttggtgaccatggccctgaggtctgtagaacgcctggcagaggtgtacagtgaggagggcccagtgctgtgtggcaacttctcaactccactgtggagatttgaatgggtggggctctgcgttccaacaaaacttgattttaggggggaaacgggcctagcaaatgggtgggtgacaaaagtcgtggtcactgcagttttaattctctggctgtattttcctaaatgcctccacggaggagagttcagttgtgaaaccaaacctcatcggaaatatcctatgtcttttgccaggagctatgagacattgctcagctagcttgaccaacttaagtgactttgcgagcatttggaaggcacacatacttacacttaccctgagacttagttcgaaagtatttacaaacttttaaaaaatgacaagttaacatttggtcatggaagtggtcaaatacagctgtcctttcaagtgcatttaccaattcacagtattctgtttgcagtgtgaaatatgatttggagagtaagatcaacatataggcctagaccaaggagaagcgtaccacctcctgagctgattgggcctatgctggtgagtgtcttaacctttgatgttttctattagcagaaagttatttttgtaacttgttgttacaaaactatgttttgtaattgttgttgaaccagtatggattcaccaataaaggtcttccatgctgataaaaatgatcatggcatctcatgaaggaaagactaatcc

SEQ ID NO: 43934 - DNA, 2300 bp, Homo sapien
ggttcaccttgcctgctgcctagacagagctgatttatcaagacaggggaattgcaatggagaaagagtaattcatgcagagccagctgtgggtgagactgcagttttattactcaaatcagtttcgggggattgaaatttttaacaataatttggtgggtaggggcttgggaagtggggagtgttgactggtcaagttggatatggaatcatagggggctctaagtgagtttttcttgctatcttctgttcctgggtgggatcgcagaactggctgggccagattactggtctgggtgctgtaagtgaaacgagggaagttcccctatcccccttgcagggcatgccacagcgggagtggctcactgcttcacaacctctagggggagcatgcagaggggcaggctgtggggctccgaccccatggcaacctctaggggtgaatataacatttgggtgggaaggcaggagtgcctatcctcacctaggtccatgggcacaggccccagggtggagccctagccacggacccgcctttctctgcccagcactttcctgccccgctcctgtatcataagctggtgcatctgaatgcagggtctgcaaaacatatcaaacagtgatcttaggttttaaaacagtgatgttattcctgggagcaatttggggaggttcagactcttgcagctggaggctgcatggcccctgaattgtaatttctaatcttgtaatcttgtggctaatttgttagtcctgcaaaggccgactggttcccaggtaagaaggtttttttgtttttttgtttttttttagtggggggcagcgggagggagaaagggctattatcaattttgtatcagagttaaactataaactaaattccttcccaaggttagttcggcctacgcccaggaatgaacaaggacaccttaaaggttagatgtaagatggagtcggtgaggtctgatctctttcactgtcataatttcctcagttacagtttttgcaaaggcagtttcaataatagtactctgtttcctgcagtttctcttccttccttccctttttttcttatcaaagtaatatatgtacacacttacgtgtaaataatacatgtagtatatcatatattaattataaataatataattaaactacacatttatttaaaataacatatttataacatattatttaagtattagttgattatattaaatataattaaatgtcatattaatcttattattatatatcatttatacattatagaaatatatatagcacagaagggcttcagataaaaaataatagtcccctgacatatcacgtcctatcccctaccccattctccagaaggaacatctttgaacccctctgggcatttttcctggtgtgcatatccctaccagtagtctttctgttctcaattctagacttcacttatttacagatggggtctcgctatgttggccaggttggtcttgaactcctggcctcaagtgatcctccctccccagcctcccaaagtgctgggattaaaggcatgacccaccactcccagccctagactttatttattgacttcttactatggtacttccttcacttcctgttttaaacaagtgggaagatgaatgtgtgtgttaaaattcctgatgaatccctggtttcagcaataacgataatttatacagtatttgctatgtggaagacacagttctaagcgctttggatgtattaatcatttaattacaaactcgattgcaagaattaacaataaaaagcaggaaggcaaagacaatgctcggtcttcccagtcaaaaaccattaccggtaaccagcagtaaaaaagagaagctcagaggcactgaaattgcaaccggctcctttaattctccatagcggatgggtggggccaggcccacccacattagagaggctgaaggctcccagcgccctaccccgcccgaggggcggagcctgagccaaggccacgtgatgatgacagacggcactctggctttcctggagctgtctctatggtattcttcccagcccacccgtccctttggtagcggcagtcacgtgacagactccggggtaaggcagatgcccacgtgatcctggcctgcagttgggtggctgcggtgagatacctgggttcctgaagggcgggtggttaggtcgtaactactgcccccgccggctgactctccgagcggccgggctcggaagccacgagccagctgaggcgttctccgcttagtgcctacggcatgggtcagctctttctgcca

SEQ ID NO: 43935 - DNA, 2300 bp, Homo sapien
tgaacccaggaggcagagcttgcagtgagccaagattgccccactgcactccagcctgggcgagagaatgagactccatctcaaaaaaaaaaaaaaaaaaaaaaaaaaaaaccccaaaaaacacacacacaaaagttagagaaaggggaaatttattgaaagagtcctttctttgcctatggtccacagtgcttagcattgtgctgagaatataaccatggtatctgtcaaaactccctataatattatgctcacgtataagtagcagcctagtaaaagctgcctggcattcatggctagaggtccagagatttgggctgagtaacctctatgaacaggcagatagttaaggttaggacacagtgggtataagcaaccaatgacatgttaatgacagctcaagacaaccctgaaaaaaagattgttgtcctcctaagttttctcttgttgagactaaatagccctatactcttctagtggtgaaggaaaatggctgcttcttatgaccctgtatcaaggtcatagtttacaaaattgcttaaaccacccttcttgctttatgtaaccaatgctcttaattttattcttcccttcatctttaaattaagaacacaagtcaaccatcagctatccactgccaaccctaaaagctaacctgaaagcacacttctactatgtcactgctccaatcatgttgccaactcagcccagaggcaagatattcaagcagatgttctaaggaagaataaataggggaagtagttcatatcaggtgtgtatttctttcttgttttctgttttgatttgtttattgtttacaaacagatatcacccagataaatccctgatgatattgcctttaattgttctttcaacaaatttttattgagtccctactatatgacacccactgttcagtatgctgtggatagagcaatgagcaaaatagatgatgtccctgctcttactgagcttatactctagtgggagacttactttgtcacagaaacaaacacacagattaaattgtgatctgtgctgtgataaaaataaaatgagatgaggtcatagagagtgcctggattgtgggagttaccttaatccacatggtaagggaacgctttcctgagatgtgtaggatattggagcccaccatgggcataatcagacagaaggaaaaggaatgcaaaggccttgaggtgagagagatcttaatatattgcaatgaaaaggaggtcagcatagctacagcagtgtgaacaaggtgtttacaaatcaagtcaaagagacaggcaggggacaggtggatcttgagggccttgttgataatataagacaatctggatgctaactgcaatgggaaatgactgaaaggttttaaacagaggtgcgacctggtcagatttgccttttagaaagactatttgtttgctggctgttgaacagattttagcagggcagatgtggaagaagggtcaccagtgaggacactcttctagccatccatttgggagatggtgatggtcaggatcagggtcagggtagtagtagtggaaagggtgagaaatggtcagatgctgaacacacttttaggacaaagctaacgggatttcctcaataattggatgagacttgtgagagaagaatcagggatggctccaagatttttggcctaagcaaccaggtattgtcattaactgaagggggggatggcattaaacatgatttctcatgggtcattctggagttccagttatacctgtgggatggaacctcagggcccttctctgactttgagctgcctagttatgaggtggggcggtagtaagggactgctgtttgggtgaattagaggcataaggcacatttctgggaatcaccaccctctctcccttccccttccccattctagtcaaaaaacatgcagactcacacagatgagagacagagaagactgagcatcccaggataggcagaaggaagagtccccagaaactctagagctgttgtagccacttcagtccaaagactgcatgggcgtgggcggcgccaagggggcgtcgcagaaactttcttagggatctggcagcctagggaaccagttttaccggaaacaaagtaatgaaaagagatgcggtggggtgtggcggggcctgccccctgccggaagaagtttgggtgcagcccagtattcaagctccaggacaaagggggcggggaggccgccactagcaaacaacctcagcttcataaatccagcagaaaggtccggggtattgttgaaaaggtcggaaggacca

SEQ ID NO: 43936 - DNA, 2300 bp, Homo sapien
aaaacagtgctgtagtggtaagaatcctatattggataatactccccaaattttatacattgagaaacaaagcctccaaggaataaagtaaattttttaaatgaaggcatagagagttgtacacttctctgtatgattccatctcaatatatcttaccttgtaagcttggcaggggtgcaggtcgtggtgaagagatatagtgagatagagagttatttatgaaacccctactacagggacattcttttatgaaacaaatacatatgcatgtgtatttatttaacctgtcactaagtttccacatctgtaaaatggggatagcaatgtctacccataggattgtcagaaggattcaatgagttaatatacataagaggcttacaacagagtttagtacatagttaatgctcaataactattattattgttaataataatataacttggcatccaagttacagaaatgagatcgcctggtgcttcagctcaaggactttatagtttagtagggggaggcaattataccaacaaatatgtgccccgaggtagagaagggcacagaggaagcaatggtcagttttgcctgaagaaattaagtaaggaggggagatgaccttgagttagtcctttcaagaaagtggacagattcattggaaggacatgcaagaaaaaaaaaggtggacagagagcttagtctatttcagtcagagaaagtaaagcaacccaaggcatagagattggaaacagcttggaattcccagggatttgtaatccaggtaaagcccaggagaacagcaaaatctctgctgcttgagaggcagacaaaggccagatcacagcaggttaaaggatgagttccagggtgctgccttggatgtatggtggtgccattcaggtagttggtgaactacaggaggaagaacagagtgttttggggaaaggaaggtagatgagatgcacagaagacattcaggcagaaatatcaactaagtaagtagacctatgtgttcgaaagtactgggctgaggccttccgtttccttatttttttaaataaagggcacagagaatataacagtacctagttcccagggttgttattgggactaaatggggaaatgttgaatgtaaaagcacctggctcagggacttgcccatattaggtgctgaatacatggcagatattattatttctcctgtctctttgctcttcctccctctgctttgtttcttgtctctcttctttttcctcctctttaaaagaattgtggtagggaagaggcactgaaaatgggctgtggttgcttgtgacttcctggcctcccattaaaatgagctagagagagactttcaggcaagcgtaaagaaatcctggaaacatggctcctatcctgtggattcagctttacggggatcttcgccaatgcctggctgagaggcggtctcagggggttgagaactctattcttagaggtctggtatctgggagactgagaaagcctttcttaagtctccctgctgggccacgctgtattcacagatcatcttcaactccttcttcttccccacctactccttcgccctcacctccttggcttatctcttgctagaaaatgcaccaagctccaatctccgttccttttagcttcctccctgagaagacactgtgacctcgctgtccttgttcgtgttaccatggagaggtaggaggataaatatcgcttccagttgtcagcttttttgttttctcctttccctcttagacagcccccagccccaatcccagtacccgtttcaccaccctcccctggagaattagcataaccggagtaaataggtaatcaagcagtgtgcttgcaagccttaattttgggacagataaggaagtgaaattgattggaattatacctgccgctgctggaggctgagggaggcggccgccggaggcgaggccagctctgtcggcccagggccccgccccaccccctccttcctccctcctccttctcagccccacccttctccacctcctcccactttgcactctcctctagcggccgcctgtcctttttaaggaactccaccctaggtggagtcctcacgatagtcacacctctcctttgggcctagcagggccagagaaagacggaatcactctacccactcaggttgcccagagagcactttaggttctgactcgcgtggggcgcgaggtaccccgtggggcagctaggtgcctccaagaaaccccgccccagaggacccgcacgagttgctgccatttttcgctgaagcccctg

SEQ ID NO: 43937 - DNA, 2300 bp, Homo sapien
gtaatccaggtaaagcccaggagaacagcaaaatctctgctgcttgagaggcagacaaaggccagatcacagcaggttaaaggatgagttccagggtgctgccttggatgtatggtggtgccattcaggtagttggtgaactacaggaggaagaacagagtgttttggggaaaggaaggtagatgagatgcacagaagacattcaggcagaaatatcaactaagtaagtagacctatgtgttcgaaagtactgggctgaggccttccgtttccttatttttttaaataaagggcacagagaatataacagtacctagttcccagggttgttattgggactaaatggggaaatgttgaatgtaaaagcacctggctcagggacttgcccatattaggtgctgaatacatggcagatattattatttctcctgtctctttgctcttcctccctctgctttgtttcttgtctctcttctttttcctcctctttaaaagaattgtggtagggaagaggcactgaaaatgggctgtggttgcttgtgacttcctggcctcccattaaaatgagctagagagagactttcaggcaagcgtaaagaaatcctggaaacatggctcctatcctgtggattcagctttacggggatcttcgccaatgcctggctgagaggcggtctcagggggttgagaactctattcttagaggtctggtatctgggagactgagaaagcctttcttaagtctccctgctgggccacgctgtattcacagatcatcttcaactccttcttcttccccacctactccttcgccctcacctccttggcttatctcttgctagaaaatgcaccaagctccaatctccgttccttttagcttcctccctgagaagacactgtgacctcgctgtccttgttcgtgttaccatggagaggtaggaggataaatatcgcttccagttgtcagcttttttgttttctcctttccctcttagacagcccccagccccaatcccagtacccgtttcaccaccctcccctggagaattagcataaccggagtaaataggtaatcaagcagtgtgcttgcaagccttaattttgggacagataaggaagtgaaattgattggaattatacctgccgctgctggaggctgagggaggcggccgccggaggcgaggccagctctgtcggcccagggccccgccccaccccctccttcctccctcctccttctcagccccacccttctccacctcctcccactttgcactctcctctagcggccgcctgtcctttttaaggaactccaccctaggtggagtcctcacgatagtcacacctctcctttgggcctagcagggccagagaaagacggaatcactctacccactcaggttgcccagagagcactttaggttctgactcgcgtggggcgcgaggtaccccgtggggcagctaggtgcctccaagaaaccccgccccagaggacccgcacgagttgctgccatttttcgctgaagcccctgccctggggctggtgttcttctctatgattctaccaatcgtcggcatttttttcctcccttctttctttttaggaaggcgctggggtgtgcggcggcaacggcggcggtgaagggatcctcttgtggtatctcctcgtgggttcctgtcttgaaggatttcttctccgcctcaactttatgttcaagtagcgctttgggggttgggttggttttcatagcccccacccccggccctctccttttaaagggtgtgtggagttcagaggatgggtggagagcgggcttggccggaactgaattggtagaggtaaaaggggaacggaggaccttaagctctggccacttcggcccagcgaacccactttatttttgtccaaggaaaagctgcaggggggaggattctttttaggaagtctactctgccggcccctgatttttgggttggatgcttgagagctttgtttcccttgttccgagagtggcccagctgggtctgaatcgactccctcccctttcgaccccctcctcattttccagcccggagaaataggggagtgggggcccaagaacgagaagacgagaacgcgtcgccctgcgctatgtcagaatggggcgggtgtgaggggaacagctctcttgcgatcagctcaggagtatgagcctcccggaggacggcatgagttctggacacttcaggagtcctcagctagtgacatggtcggtaagtgactctgggactaatacccacccactcccacctctttcgtc

SEQ ID NO: 43938 - DNA, 2300 bp, Homo sapien
acctgaataaagtatggacttcagttaataatattaacatatcaatgtgttttattaattgtaacaaatataccacatattaatgtgagatgctaataacaggagaaactgggtgtggggtaaatgagacctctctgtactagcttcacattttttctgtaaaactgaaactgtttgaaaataaaaagtttattttaaaagaagttaatatcgaaaacctttgtcttgcccataatgcactctgcctaatctacccaatcagttcatactcttcacactcatagtttttcctaaattttactataattatgaagtttatgttcaactgctgatcatcagatagaggaattctgctgcaacaaatcccagaatattatccaaccctatcgatgccataagcaactgtccaggctaacggtgctttgctgttgtaaacacaacaaattcaattgaaccccaaatgctattcaagagagatacattttagttcctttccacctcactgtctatctagcaaagttttatgtgtttttggtaaactctgtactgtgctatatttgaattactgtactctataaaattctgttaatgaatcctgagacacttgttagagcatatgtaagtaattggaaagcttttatcattttttgtaggggagagggaaatgagaataggcttaaaattgcttctttactataggcaattaacaaacataaaggctgtcattatgttacagaaacatttttagataaaggctcagatgtcagggaccccaatatttgggatcctaatttgatcaacctaattagttcaacaagatatttgataacctttatttataaatagatcatatgtctcaatgcaaaagattctgaggtcttaggggagcagttcagttctgaactctgaaaaaggagtatcaggatccaaattttgaaaaaaatgagtaagctcgggctctactgtgaaatactgcatcaactactgaattattagcttaaacttatgttagttcatctttaccaacctgtcttatagctacattagaggtcccctttaacagactggccctagatatcgcctagtgcgttagcaattattatgcaagtttggaacttgtatacccaaaatcaggaaaaagccctatcgaaataacaatgataacagtaaaaacccacatgtcattttgaaaactacaggcagttcttggatttatggagagttcatgagatagacagacattgcaagttaaaatgaggtaaataaaatctagatattatagaagtgttagaagcgtgtgcctaatgttatacggcaatgaccacaagtacattttacttgctatttaatcagctgtaaatgatttttgagttctaaagttttcctgaagaaaacatataaaattagacaaatattgcaaccaatcacataaactttaatttggtttaataatgtgatcctggccaggtgtggtgactcacacctgtgatcccagcactttgggaggccgaggtggggggatcacttgaggtcaggagtttgagaccagcctggccaacatggcgaaaccccatctctactaataatacaaaacttagctaggtgtggtggcacgcacctgtaatccaagctatttgggaggctgaggcaggagaatcacttgaacccaggaggcggaggttgcagtgagccaagattacgccactgcactccagcctgggtgatggagtgaaaccgtctctcaaaaaataaataaataaaattatgtgatccccaggagaataagcgtgcaggtgtataagggctcaaagaaacatctggagaaaaaaatctgacccgtatttgtctcatctgtaaaatatgagggatggataggactagatggttaacgggatcccttcttggtgctagaattctacaatatagtgagaatggacagcctcaggaaatagtaacctaaagtattcaagcagggttgaaaagaaaaaggtgttcaatataaagacaatcttttaaagagaggctgagtctaaattcaagtgatgcaaagccccctcccctacccctgaccccagaaaggaaatatgccatgtggaggtagatctgtggtccagggccaggaacagaggattttgtaccccaggtaatattataaaacaatctgattgggcagctaaatgagtatattatgcaatctgctatcagctaaaataaatggcttaggttttcatagcagttgcagaacatcaaattgctttttgtaggtcagttttcatgaaaagcatctatgtttcatttga

SEQ ID NO: 43939 - DNA, 2300 bp, Homo sapien
gttcatactttgattattaatatctagctttattctatggaaattaaagattacctataatattttcatattctcaccacccataattaactattgctgatattttatcatatttgctttcattttaaagataaaaagcatttttacatatttaagttccctttactcactatcctgtatcctattccatttcctcttcctcatgggtgcaagtttggtatatttctaaaagaatatttcaaatatacataagaatgtattagagtgctgtttggcatgtattaggttggtgcaaaagtaattgcggtttttgctattactttcaatggcaaaaaccattgtataatagtaacaattcgttactttcaatggcaaaaaccgcaattacttttgcatcaacctaatactaattaatttggctttttagatctatacatattaacatatttaaagctagtcatctttttacctctgtattttattaattatattaataaaatagagaggtaaaataatattaattcttccatttctccatcgatggatataacatacctgtatatatatatttttcttatcttcagatttattaaagtatttgtgacctaatgactttgaaatgctgttaaatgttgaaagcagtggtgctttggtggatgcttggtagagggtgggggttggggaagaattttctgtgtggtttaacctagagttagaaatatatagataaatttgaaattatttcttctatttttcaagttctctttctcagcattgctacatctttattgctcttacttaatctgtaattaaattaggtaaatatgtcaatgtttgccactactattatgtgcctgtcaatttctacccatactcttccccaaaatacctttctgtagtgcatacttacaaaaatcatcagaaaattcaaaatcttatgaaaatagaaaataagaattattcataatttcagcaaacagtactaacagccattaacttatttgtgcatagccttccagatttttttacacatacggtttacatatacaacaaactgttcaaaaattgcttttaaaataaaaatatatttattgtatttttgatattggaacatatattcttatatagtttgtaactgtacagaaatatacaaaggcataattgaaaatactctgtgatttccctataactacagtttatttcatgtatacctttaaagacactctatattttcttgtatggtaatatgataatgtgctcaactaatctcatgtaaacagatagttaatatatttaaataacattttaaaatgctacaatgtatatacattttatacataaatatttttgcatcctcatccgattattaggcgaagtgtctaggttaggcatttctaaataaaggtggaaacattcaaaatgctgatatatattttcaaattgccctatggttgtaacaattcacacttcagctagcctgagagggcattttttagggtccctgtcaacaagaaggtttaccattatttttttccctgccaatatgataagccaaaagtagaattttattgttttaacttgatttctttttattagtagtgaaattaatcatccttttttaatgtctattggccatttgcactccttttgtaaaatgcacgctcctgctctgtcttcttcccttcccctactggaggtgttcctcttttctttttgctttgtcagagttctttattattcatttttcgtcttatacgtgggatctgttcgattcaggctttcacccttttactgccttacagattgctaatatacattctccattggtcttttaatgtcgtttacagaagctgactctctaccgcctccttctctccgtctcaccctctctgcctcgcctgctctgtactgttctgttctcttctctctctccctttgtttctctctctcccttttttcttttcagtgcagaagtttttaattttgaccgagccaaatctatcaatctaggcctggcgccgcgtcagcagagggggcggggaggcgagcgcggaactgggggaggggaaggggcggggatcagcaggcggagcggctgccagagttgctgggagtgcgcgcggtcggatcacaaggcggcggcggaggaggcccagagaccggagcgcggagacctcagccagcggcctacgcccaggcctttctccaccggaggaccagggaaccgcagtcttcatcacagaggtaccgtgctccgcgctccccgcctgacccggcccagcccgctgcggcggtgcctc

SEQ ID NO: 43940 - DNA, 2300 bp, Homo sapien
cctttaaagacactctatattttcttgtatggtaatatgataatgtgctcaactaatctcatgtaaacagatagttaatatatttaaataacattttaaaatgctacaatgtatatacattttatacataaatatttttgcatcctcatccgattattaggcgaagtgtctaggttaggcatttctaaataaaggtggaaacattcaaaatgctgatatatattttcaaattgccctatggttgtaacaattcacacttcagctagcctgagagggcattttttagggtccctgtcaacaagaaggtttaccattatttttttccctgccaatatgataagccaaaagtagaattttattgttttaacttgatttctttttattagtagtgaaattaatcatccttttttaatgtctattggccatttgcactccttttgtaaaatgcacgctcctgctctgtcttcttcccttcccctactggaggtgttcctcttttctttttgctttgtcagagttctttattattcatttttcgtcttatacgtgggatctgttcgattcaggctttcacccttttactgccttacagattgctaatatacattctccattggtcttttaatgtcgtttacagaagctgactctctaccgcctccttctctccgtctcaccctctctgcctcgcctgctctgtactgttctgttctcttctctctctccctttgtttctctctctcccttttttcttttcagtgcagaagtttttaattttgaccgagccaaatctatcaatctaggcctggcgccgcgtcagcagagggggcggggaggcgagcgcggaactgggggaggggaaggggcggggatcagcaggcggagcggctgccagagttgctgggagtgcgcgcggtcggatcacaaggcggcggcggaggaggcccagagaccggagcgcggagacctcagccagcggcctacgcccaggcctttctccaccggaggaccagggaaccgcagtcttcatcacagaggtaccgtgctccgcgctccccgcctgacccggcccagcccgctgcggcggtgcctccttccttcctccttccctcgcgctctctctttcgcccgcccgcgccttccctgcccgcctgcgtcaccgcggccgccatggctgagaatggcgagagcagcggccccccgcgcccctcccgcggccctgctgcggcccaaggctcggctgctgccccggctgagcctaaaatcatcaaagtcacggtgaagactcccaaagagaaagaggagttcgcggtgcccgagaacagctcggttcagcagtttaaggaagcgatttcgaaacgcttcaaatcccaaaccgatcagctagtgctgatttttgccggaaaaatcttaaaagatcaagataccttgatccagcatggcatccatgatgggctgactgttcaccttgtcatcaaaagccagaaccgacctcagggccagtccacgcagcctagcaatgccgcgggaactaacactacctcggcgtcgactcccaggagtaactccacacctatttccacaaatagcaacccgtttgggttggggagcctgggaggacttgcaggccttagcagcctgggcttgagctcgaccaacttctctgagctccagagccagatgcagcagcagcttatggccagccctgagatgatgatccaaataatggaaaatccctttgttcagagcatgctttcgaatcccgatctgatgaggcagctcattatggctaatccacagatgcagcaattgattcagagaaacccagaaatcagtcacctgctcaacaacccagacataatgaggcagacactcgaaattgccaggaatccagccatgatgcaagagatgatgagaaatcaagacctggctcttagcaatctagaaagcatcccaggtggctataatgctttacggcgcatgtacactgacattcaagagccgatgctgaatgccgcacaagagcagtttgggggtaatccatttgcctccgtggggagtagttcctcctctggggaaggtacgcagccttcccgcacagaaaatcgcgatccactacccaatccatgggcaccaccgccagctacccagagttctgcaactaccagcacgaccacaagcactggtagtgggtctggcaatagttccagcaatgctactgggaacaccgttgctgccgctaattatgtcgccagcatctttagtaccccaggcatgcagagcctgctgcaacagataactga

SEQ ID NO: 43941 - DNA, 2300 bp, Homo sapien
atgtggaccaggcacagtggttcacgcctgaaatcccagcactttgggaggctaaggtgagcggatcacttgaggtcaggaattcaagacgagcctaatcgacatggtgaaacgctgtctctactaaagttacaaaaattagccagacgtgatgcttgatgcttgtaatcccagctactcggggggctgaagcaggagaatcgcttgaacctaggaggaagagtttgcagtgagccgagatcgtgccacggcactccagcctgggtgatggaaagagaccctgtctcaaaacttaaaactaaatacataaataaatactctcctgcttaagatattttaattcctctctataacaaatgagataaataatatgatacagaaggttctgcatgtcatggtgactgcttttatttctaccctgacttatatttgatattctagaaatacttcatttgttgtaattacctgtactcaacatgctgtttcatactagaatgtcttacacctagaatgcctgttctcttgtttttacatagctaacttctacctattttttttaattaatctctcatattaccttctccagtaagccttccctggttacctctggttgaactaaatgtccttcttctacattctgaaagcttgctggacatatctctattactgcttctgccatattatggtgaaatttattgtatacatatttgtcttacataccaaggttaaagcttctttatttacacttgatcttagccaaaaagccaaaaggtaataaagcttctttatttaaagacagtggctatccatatttcaattttctgttcccagattgtagcatagttctcaataaatatttgttaaactaaacagcatgtacaaaaacatgcatgtgtagaatatgagacacatttggataactgcaaagagttcagtgtagctacattagtgtcttaatccatttgggttgctataaagggatatctgagactgggtaatttattttaaaagggaattatttggctcactgttctacaggctgtataagaagcgtggtgccagcatctgcatctggtgagggcctcagtctgcttccactcatgatggaaggtgaaggggagctggcatgtgcagagatcacgtggtgaaagaggaagaaaatagagaggaaataaagaggcctggatctttttaacaaccagctctcatggggtccagcagagcaagaacttgcttattaccatgaggacagcaccaagccattcatgagggattttaccttatgacccaaacacctcctgttagcccctaccctcaacattggggatcaaatttcaacatgagatttggagggtcaaacttccaaactataaatagagaatatgcttagaaaagaacagaaaatttaagttacagagataaacaggaattatttcataaatagctttgtataccatgctaaaaagtttggattttattctgaataaaatccattgtaaattgttggaagaattttaatcagggtatgagggtagcattacttgttaaaaaattacaagatttgtgttgtagtggtagaggttgaatttggtagcacaatattgattgcaggtaataaaatgcaggagactatcaaatatatctgtataaaaaaatgccttaacaaagacagtgataatggagagagaggtaaagaaataaccataaaagaatcagtacaactttgtgacagatttaatgtttggaggggttgttgagaaatatggatgagaaaagagtgatttttcagtttctaaacatgggatattggtgtcaccaactgaaatagaaaacataagatgagattccagtgaagtttttctaaggggttagaatgaatttacatatttattctctcaacaaatacttattgaacatcttccatgagacaggcattgttccaggcattaatgatacattagtgaataaattaatttcaatgttagagggtaagttctacatttaaaaagcaataaaatggtaaagtggtgggagggaaaaacattgggagaagtttgcagtattaaacagggtaatcaggggaggaggagccaagatggccgaataggaacagctccggtctacagctcccagcgtgagcgacgcagaagacgggtgatttctgcatttccatctgaggtaccgggttcatctcactagggagtgccagacagtgggcgcaggccagtgtgtgtgcgcaccgtgcgtgagccgaagcagggcgaggcattgcctcacctgggaagcgcaaggggtcaggg

SEQ ID NO: 43942 - DNA, 2300 bp, Homo sapien
attgtggtataaatagtcaatgttgatagaagcaactctaagttgggactgttttcacctcaagtcaaatgtttaccgtaaattaaacctagctggagttgataaaatttttaattcctgttactttactaacgaggcacatatttctcttaatttgctaaaactatagctatagaacgacttaactgcaactcttaatgtctttagtcgtgaagatttagagacctatgtaaaaagactgtgaaattgttacttcatttacttgaataaataataaaatattcttcagtttctaaaaataaagactccaaagtttgacttgtatatctgagtggaaggcataacatttcactgagatgaaagaaaaaaaaaactaggaaaggagcaaatttggtggattaaggatagaccaatggttctcaactggggacaattgtgtacccgaggggacatctggcaatgtttggaaatctttttggttatcacaacttgaggagtagggagtagtactggcatatagttggtagaggcttagcttaggacattgctaaacggtaaactctggcaaccactacaaagattgatttggcctcaaatgtcaatagcaccaagattgagaaactctgggttagaatcttcttcgctgactttgaccactctttctcagcctttgcagcagacttcttttcttctatctgtctctaattactcaatattctgtttttagctcaattatttttcctttagattttctcttggggatataatccattcccttgtctttaactatcacctctatgttgctgtctcccacatcagtatgtctagttccaactactcttctagctctaaaatattgcctctctcaatgcctccctcacatcttttcattaagctacagctacatctgacttttctgtctttattagtagcatttggcacaaaaccacggggtcatttatttcccaaatatttactgagtacctaatttgtgtaaagggctgtgctggttacttggaggaaggtagaagggtggagataagagatagttatagtagtaaatgctttacatgtattatccctggttatggaaacacctttgcaaggaaaaaattatggcctagaaaccaaagttccaagaatttaaataattactcaaagagctcagagcttgtaaacagcagagtttaacaggcacttctactctggcattaaggactaagctctctccatttaaaaaaacaaaaaacaaacaaaaagcactgagaacaaagctgaagaagtgtgatctagtttgtccatagctaaagggagatggatgtgtaggctattttaataatgaaggtctaagaagttccagaagccttttcttctgagacacgtggtactttcttctggttaccataaatcatagaatataacatatcatcactagtaagatgggtcattattttccatacctacaagaaagaaaaaaaaaagctgccaactaaagtatagtgtaccatcaattgttaggtcgcagagatttcctagatattcaaatttggggaaaaacataataagccttcaaaaattacaaatttgcttaaaaaataaagaaaaaatgatcttagattctatgacatacggtgaattcattttccacattcaatttccatggtttgtgctagtgtgctattctgcactctagtcaacttacatgtttgcatattgctttttaaatgtttgtagctagtttcacagctctgtgatgtgcatctgcagctggcttgtaaagctcttcaataatttatttggttaccgcccacccccgcgtccctcccacacatataagccattcagagtttaccacttaaaggtaaacttgaatttcttctcatcttaaaattgcataaattatattaaattctcaataaatttatttacatttagtgggggtggggcgcgatggaaaaacactatattaaataacgacatcggtttttaacacccatcctaatagaaacattaaaatagaatggggtagggaggaggggtggaggcggagaagggatgtacgtctcaggatacaggaaatacggtaagagcgaaacaggaggaagccagctctgtgcctggaggggactcgccgccatctcaggtctcttggctttgccagggcccaccggagaaaactgacgacccgtttctgtaatccttatgggagaccaaccttgtgcctccgggagatccactctcccacctggaaacgcacgggaagccaagcctccaaaaaagcgctgcctcctcgctccgcg

SEQ ID NO: 43943 - DNA, 2300 bp, Homo sapien
ataaaacattgctgaaataatttaaagaagatctaaataaattgcaagatacccagtgttcataggaaactctgtttgtgggaaattatgccctctggaaactctgtgttcatggattgtaagacaatattgttgagataacaatacttcccaagtttatctgcagagtcagtgcaacccttatcaaaatcccaacagtccttttgttcagaaaaggaaaagacaatcctaaaattcatatgaaattgaaaggaactatgaaattagctgagcatggtggtacatgcctgtaaccccagatactcaggatggtgagacaggagaatcgcttgaacccgggaggtggaggttgcagtgagccgagattgtgccactgcactctagcctgggcgacagagcaagactctgtctcaaaaaaaaaaaaaaaaaaaaaaaaaaaaaaggagcatgagtagccaatacaatcttaataatattttcagagaaatcacacttactgatttcaaacatactgcacagttacagtaatcaaaaaataaatgtggttcttgcataaagataaattaaaaacgtggtttttgcataaaattctatgaaatagaattaagagtccagatataagcctatacatctgtactaaattgattttcaacaagtatgccaagacaattaaaaaggctaagaattgtctcttcaacagaaggtgctgagacaactggatatccatgtgcaaaacaatgaatttggtccccttcatcacaccatacataataattaactcaaaatgggtcaaagacataaatataagagctaaaaacaaacaaaattttacaagaaaatataggggtacattttcatgaacttggatttggcagtgtttatttaggtgtgactccaaacgcacaaccaagttttaagcttttgtgcatcaaaaatactatcaagaaagtgaagacaccccacaaaacgggataaaatattttcatatcatatatctgataaggttctctcatccagaatttaaaaagaacaattaacagccctgctacaaacaattcatttaaaaaatgaacaaagcacttgaaatagacatttctccaaagatacacaaatgtccaacaagcacacaaaaagatgctcatcctcattagtcattagagaaatgcaaattaaaaccacaattaggtaccacttcatacccactaggatggctgtaacgataaaactgattgaatcacttctaaaatgtctttctccacagatttatgatctcacaaattcctgttttaattatagcaattgttctaagtttagtgtctaggttattctgttcaagtgaacagaataattcatgcgcaagcacaatttataggtatttaacaattaaacgtctgaagataggaggcaacggcaaaattatgaaaaatcctaatgcttaattttatgaagctactacaaaacatgttctcagaaaatatctaaaaaattgagcaaatgtttattctacatggaaatgagcaggacatgaaagtgcatattcaaaattatccaagctttgtaagagcttagaaaaaaggaaaaggaaatagtgttaatatttcactgtgagccctggaaaatgggaggccggcttagttaattattttctcttcatgtcaattttctgaattttacagtgtcaatattgtgcatgcaattcttttgcaatcaggggaaaagaaaagaaatcctcaagaagttaagtctgggaatgacaagtcagtaaaaattacgtagattgggtcaagatggcagcctgaacactgagcagtagcgcatttctcttgtcctaccacaaatccccttcaatggagggtggggggacgcggggagggaggggaaaggaaagggctaattcctgaaaggtggaaagcagaaggggcaggggcgcagagggttgaggttaggtgaggggaggggcgcgtgctaaaccagaagaggtaaaccaatgcagtgagagagaggtggttgtgggctccacagcttctgatttggaggaagctgcgagaccgagagcctaggagcaccttccacgcccagggctgtggtacaggttggtgggggaggggcgccacgcggtgtttggcaggaaggggaggcctctctactgaccggaagctgcgctagaaaaagaaggaggagactgcggcgcagcagcgactagtgggagtccgatgtgggagaggggctgcggccaccgccaccgccgccgccaccaggaaggcggaggacgcaggagccaagagcaagggacgccgcca

SEQ ID NO: 43944 - DNA, 2300 bp, Homo sapien
tagagaaataggaacacttttacactgttggtgggactgtaaactagttgaaccattgtggaagtcagcgtggcgattcctcagggttctagaattagaaataccatttgaccgagccatcccattactgggtatatacccaaaggattataagtcatgctgctataaagacacatgcacacatacgtttattgcggcactattcaaaatagcaaagacttggaaccaacccaaatgtccaacaatgatagactggattaagaaaatgtggcacatatacaccatggaatactatgcagccataaaaaatgatgagtccgtgtcctttgtagggacatggatgaagctggaaaccatcattctcagcaaactatcgcaaggacaaaaaaccaaacaccgcatgttctcactcataggtgggaattgaacaatgagaacacatggacacaggaaggggaacatcacacaatggggcctcttgtgaggtgggggtaggggagagggatagcattaggagatatacctaatgtaaatgaggagttaatgggtgcagcacaccaacatggcacacgtatacacatgtaactaacctgcacattgtgcacatgtaccctagaacttaaaatataatttaaaaaaataaaaatgaaaataaaataaaaagccctcactgaaactatgacatatctgcaaattgctttccataaaaattgtataaactttcacttgcatcagcactagatatgaagctttttcatgatcaatgacattaagtaatattttaatgttctttcatactttgactgttgaatcgagattattattacttctatttttccttgtagatgttattttattaagtgtagttgttctgttaacatccgactcatcccctcattcaaataccataagtatctgaataagaaagataccattaagcattgttttgtttacagagtttttggttggttcatttgctttctgttcaattttattttgctgctttttaccttttaataaatcaaatattgatactggtacaacattagtatacaacctttctcaaaatatttaaataattatttcaacattccttaaagaatacccaacgtttctccactgatttataaaactataactttaattatttcttataaagttatttttttgcaaagctttctattccgatacatagatctgattactggttattgtggaaatattatgtcaaatgcccagtactgggagaaaagccaaattataaatcactttaaaattgagttttacggaccaagtgcaagatatgtaacaggtgctcaataaatatttgttgaatgaaaaaatcgattagaaaacatctaatttcctggaaaaattaatagacatgaattgcagataaaaaacaaatcccagttttgcaaaagtttaggaaaaaggaaaaaaaactatgagcattaatattttgctgtgaggccctcaaaaatgggagatgggactgcagttgatgattttcctcttaatattaatttcctaaaatgtagatagtgttcacgttgtacatgcaattatcttgcaataaagaaaaggaaaaaaaaatccctcgaaaacaaaaacaaaaatgccaggaaatatcagtcagcaaaaattaggtagagactgggtcaaaatggcagacttaccatagtgaatttctctgttccaactccaaatcctttcaaaaagaggaaagacatatttacgtgtaaagaataaatccataagggcatgggacggtgcaggggcaggggtgggcgcgggggtgggcgcggggcggcagcaaggcgaattccaagaagatggaaagcagggcaggcagactaagaaggtggaggtgggaaccaagtggccctgaaacgggtgaggaaggggccacagggttccgaggacgactgtggcacgaactactccggatttggaaagaggcggagtcagagcccatagctccgccggggctacaggctgtgtggtgggcgtgggagcctggtggagaggagagccgggtgtttgacaggaagaggaggcctctctctgggcaggaagctgcgctacggaaagagggaggagactgccgcggcgacagcagggactggtggaatcccgatgtggctgaggggccgccaccgccagcagggaggcggagggctagcgagccaagcggtggggacgccgctgccttcctctttgcctgtctcgccgccctcctagacacgctcctcatctacggatcctaccctccccgctcttgcaagcattcactcggc

SEQ ID NO: 43945 - DNA, 2300 bp, Homo sapien
tcccagcactttgggaggccaaggcgggcggatcacgaggtcaggagatcgagaccatcctggctaacatgctgaaaccccgtctctactaaaaatacaaaaaaattagcccagtgtggtggcgggcacctgtggttccagctactcgggaggctgaggcaggagaatggcgtgaacccaggagaaggagctcgcagtgagccaagattgcaccactgcactccagctgagcaagactccgtctcaaaaaacaaacaaacaaacaagcaaacaaaaaacctgtggtaaccaaaacagcatggtactggcatatgaatagacaccacaaaatagagaactcataaataaatctatgcatttatagtcaacttattttcaaaaaaggagccaagaacacacactatagaaaggacactctctgtaataaatgttgttgggaaaactgggtatccatacacagaagaatgaaactagacatatctatctctcaccatatacaacactcaaatcaaaatggattaaagacataaatctaagacctgaaattgtgaagctactagaagaaaactttgggaaaaagcttcaggacattggtctgagcaacgatttcttgagtaagacctcaaagcacaggcaaaggaaaaatgggcaagtgaaatcacatcagctaaaaagcttctgcacagcaaaggaaacaatcataaaatgaagagacaacctaggtaacaagagaaaatatttacaaagtattcaactgacgggattaataataaaaatatgtaagaaattccaacaactcaatagtaaaaaatcaaataatctgatttaaaaatgggcaaaagagctgagtagacatttctcaaactaagacgcacaaatggacaacagatatataaaaagtattctaaatcgctaatcatcaggtaattgtatatcaaaatagcaatgagatatcatcttaccccagttaaaatggctattatcaaaaagacagaaaataaaaactgctggtaaggaagtgaagaaagaggtatccttgtaaattgctcgtggggatataaattagcatagccattatgaaaaacagcgtggtagttcctccaaaaactaaaactacaaattccctaagatccagcaatctcactattgggtatatatccaaaagaaaggaaatcagcatatcaacgagctatctgcactcacatatttatttgcagcactgatcacaatagacaagatatggaatcaacttaactgtccatcaataaataaatggataaaaaatgtgatatatatatatatataataaaatattattccaccatagattaagattaacctaacacttatttaacttttcagatgttagccaacatattgtttttattgtacacccatttggtttgttgtcctacaacatgtaactgaaaacatcttacttgatatagcaatctaatattgttgattattttcagaattataggatactgtgaaaaactgtaactcacaaaaaaacacacaaaaattaaaaatgacttcactttatgcgaaatagataaggtttgttaagtattgtaatcacattcaaaaataactctttaagcttaaaataagccaatacttcttcaaagcaaggtctccaaatctaaaatatgcctacataatgctttggagaaacacttaatgtatgtattcgtgagtgtgtatgcatatacagagaattatatctgtgagttatgtgattggatagaggtgtgtatttggaattaagaatctatggataggaatttctggaactgtacacagaattcatagttttatacatgtgcatgtgcttggagatatatatatatatacatacatacacatttgcatatggtcgtaaaggattcatgtctccataaatgtatacacatggtatttctatgttaatttgtatgtttccaaagaatgtgagaaatgtctgaaagatggaaaacagatggagcaagagagctgaggggaggggctagagagcttgaaggatccagccagcagagacaggaagagagaaaaggccacctacaggttccactgttgtgaattgtggaaagggaaggaggagcccaggaggggccccaagaaaagaaaggcagatctgctctgtgattagaatggaagacatcactactaagaggaaactaacactgtagtcttgtgcagaaaaagggcagagactacagccactgcatcagggactggtggcagcccaacgtggctgaggggtggccgccaccaacagggaggtagacggccagcga

SEQ ID NO: 43946 - DNA, 2300 bp, Homo sapien
aatgcccatcaatggtagactgcttaaagaaaatgtggtacatatgcaccatggaatactatgcagccataaaaatgaatgagattatatcctttgcaggggcatggataaagctggaagccatcattctcagcaaactaacacgggaacaggacaccaaacaccacatgttctcattcgtaagtgggagtagaacaataagaacacatggacacagagaggggcacaacacactctgaaacctgtcaggtggtgggggcaaggggaaggagagcatcaggacaaatagctaaaaacctagatgacaggttgttgggtacagcaaaccaccatggcactcatatatatatatatatatatatatatatacctgcacgttctgctcatgtatcccaaaacataaagtaacaacaacaacaataacaaaatgctttatgtaggggagaagtgtgtacgcgtatgtgtgtgtgtagtgtcactgttcaaatgaaaatcagaaacgaaaatccattggtgggattttctgagccattttaaaataaatttacattttttttaaattttgtttttctgtaagttattggggtacaggtggtttttggttacatgagtaagtcatttagtggtgatttgtgaaatcctggtgcacccatcacccgagcagtatatactgcaccatatatgttgtcttttctctcttttgcccctctcccatgcttctccacaagtccccaaagcccactgtatcattcttatgcctttgtgtcctcatagcttagctcccacatatcagtgagaacatacaatgtttggttttccattcctgagttatttcacttagaattatagtctccaatctcatccaggtcattgcaaatgctattaatcattcctttttatggcttagtagtattctattatatatatacgtatatgtatatatatatatatacgtatatgtatatatatatatatacgtatatgtatatatatatatacgtatatgtatatatatgtatatgtatatatatgtatatatatacgtatatatatatacgtatatatatatacgtatatatatataccaaagtttatccatttgttgattgatgggcatttgggttggttgcacgattttgcaattgttaattgtgccgctataaacatgcgtgtgcaagtatctttttcgaataataacttctttttttctgggtagatacccagttgtgggattgctggatcaaatggtagttctacttttaggtctttaaggaatctccacactgttttccatagcagctgcactagtttacatttccactagcaatgtagaagaagtgttccctgatcacctcatttacaccaacatctactgttttttgatttttttattatggccattctttcaggaataaggtggtatcgcattgtggttttgatttgcatttccctgatcattagtgatgttgaacattttttcatgtgtttgttggccatttgtatatcttcttttaagaattgtctattcatgtccttagcccactttttgatgggattgattgtttttttccttactgatttgtttgagttcgttgtagagtctggatattagtcctttgtcagatgtatagattgtgaagattttctcccactctgtgttgtctgtttactttgacgactgtttttttttttttgtcattcaaaagctattttgttgaattaggtcccagctatttatctttctttttattgcatttgcttttgggtttttggtcataaaattattgcctaagccaatgtctagaaaggtttttccagtgttatcttctagagtttttatagttttaggtcttaggtttaagtctttaatccatcctgagttgatttttgaataaggtgagagatgaggatccagtttcattctgccacatgtggctagccaattttcccagaactatttgttgaaaagggtgtcttttccccactttatgcttttatttgctttgtcgaacatcagttggctgtaagcattttggtttatttctgggttcttattctgttccattggtctatgtgcctatttttataccagtaccatgctgttttggtgactatggccttatagcatagtttgaaatcaggtagtgtgatgcctgcagatttgttctttttgcttagtcttgctttgtctatatgggctcttttttgtttccatatgaattttagaattgttttttctaatgctgtgaagaatgatggtggtattttgatggagattgcattgaatttgtagattgctt

SEQ ID NO: 43947 - DNA, 2300 bp, Homo sapien
cttcaaaccctcagaaggaatcagtattttaaaccttcagttcatctcctaatccacccccaatgtttggctcaagctccagaagcttgacgacggccgtcaaaccccacaacaagtccttcttaatttagccttcaaagtcttcaacaattgtaatgaggaaagtaaaaggcaaaaacaggcagagtttcaaatgcttgcctccaccatcaggggccctgcaggcccacggggccgcagctccacacagaagcctcctaaaaatccacctccacctggcgcctatttcaagtgtggcaatgaaggccactggtccagacaatgcccaaacccaggtaaagccagcagtccatgcccctctctgcggagaaccccactggaagtcggactgtaagcagctcccacaaggactgcccccatcccttcctgagctagccaaaacctcctacttatatctcatcggccttgccactgaagaatgatggtgccctggaacagacaccctggcaactacctttgcctcatccaagccaagggtaaccctgatggtggcaggtaggccagtatatttttaaattaataccaggcaacctactctgctttacctaatttttcaggaaccacccagtcctcccaggtgtctgttgtaggaattaatggacaagtctccaaacctcgagtcccccctccacttttctgctcccttcacaccttttccttcactcactctttcttagtcctgccctcatgcccaactactctcctaggcagaaatatctttccaaaactccacactactttccacttccacattccccatagtacccaacacatcaacccagacccctctggggcttctaactttcttctactcctccaaccacccaccttaaaacgtgcaactttttcttgtcccccatctgtagttaaccccgctgtttaggatacttccacaccctcagtcgcaggacaccacacccctgtccacaatacccttaaatagcccacccagttcctatcacagaagtagtatgccatcccccaagtagctctcataagcctaaagcctatcatttctcgtctcctctccagtcacctactctgcccaacaaactccccttttaacacaccagttctacctgtgaaaaagctagatggagcttatcacttagtctaggacctcaggctcattaaccaagctgtactcccagtatgtccagtagttccttacccatatactttactttccacaattccctccgataccactcatttttctgttctaaacctaaaggatgcttttttttcataattcctttacactctgattcccaaaacctcttttcctttatgtggaatacccccgacacccacctttcatgtgagctcacctggtgcatactacctcaaggtttcagagacagcccccacttttctgtgtccaaaaggcccttgctcatgacctctgtagcttatccctaaagctgtccactctctttcaatgtattaatgatctgctcctgtgtagcccctctcaaaaaaactgcaactaccatactatctctcttttaaacttcttcccaaaatgcgagtattaggtctcccctaaagaaacaaaaatatgcacccccctcagtcacctatctatgcctaactcttaccccatgaacctgagagctcacaaccgaccacatatccctcctccagtccctcctgcctccgcaaactaagcaaaaaaatctctcttttctaggactagtgggatattgtaggctctgggttccctccttcgctctatctgccaaaccattataccaggctgctaaaggccctctctatgtgccattaaactctgcacagcctattacccaacctttccatctactccagaaggctctcacctcagcctcatcctcactctcccagacctcaccaaacctttctccctctatatcgacagatgatgtaaagttgcattatgtattctaacccagtctaagggacctaccgcccaggttgttgcctacctctctaaacagcttaaagccaccattctccgatggcctgcctgccttcaagcattggtggcagctgctgtcctcacccttgaaagcctaaaactatctctccatgccaacctaacagtttattcaacccataacatcaaaaacatgttagctcactgcagtgtactaagtctcatctctgccccatggctcctccaactgtatgctctattcatagaaaaccccctcctaccaatcaccatactaaccagctcccgtctaaacacagccatg

SEQ ID NO: 43948 - DNA, 2300 bp, Homo sapien
gccagtcaatggggaaaacaggtagtcgattcatgtatagtatgtattcattttgcaagataaaaatgttctggtgatatgttgccaacaatggcaatatacttaacatggtctaactattaatataaaattaaaatatttaagattgtaaaaaaaaaacagaagctttacatccatatgtgatttaatcttcataacaccatatggcagctgttattctactttacagatgagaaaacacacctagggacattaagtgatttgttcaaggtcaaaaacataatgagtgctggatctaggatttggattcaggtctgtctggtcagagcccaatcagtgagcattctttgtacctcaggctcacatatttgtcatttacaacttaaataaagtaacaaaagttgggcaaagtaaatattttcattttgacaaaacctttctctggtaaggaagtttcactcagctaacaggttttgctcagaactgtaatggagcctagattatgacaacctgctttatcagctttctttactggatctgctagatgtgcctgtcatgattaacctgctttctaccaggtgcttgaattaggctagaagtgctgtgatgacactttcagtatcaacctaagttctgcaggtgaaaagacagtgacctggatgacgttgtcatttcacctacccaagaccttaaatgccaagctcgaatccctatcttcaacgctcattatctcataatcacataccttcagcctacaaacctgtattgacttctcatcaagccctatgtcaggctctggcaatacaaagaggaattagaatgaccctgttcttcgaggagtttatatctagatggggcatagacacaaaaacctaacacataacagagggttgtaagtgctatgattttgttaatctgtggagtgcagggttacaaaagagtggcatcacacccagttgtaagttcagggaagacttactggaggaggtggtacttgtcctgaactagatgaagaggttgggaaagcagatgcaaagataaggagggaagagagaactttcggatagttgtttgtcaggagcttagcatgtgagggatagaaggggttagggatgaagcatagagtttttcagacaccagtcatgagagtcgaatgctggacaaagtagatgggtcttgaatctgtggaaaatggagaattattgcggagttattggcaggggtgtaatattgtcagatttacatattagaaagaacactctataaataaaggcagagtgatcagctagattatttgtagaagttcatgtaaacctcagtgagatctgagccagactgagttgagaaggaagggctggattctgtcatgagaataagagaaatggaagaatctgaagtgattctagatttttggcatggctgactgggtggatgaaaattccatttgtagacctgtaggggcagcagtctgggggacaaaaggatgagttttggacttgttgagtttgaacgatctggaagacattcacatggatatgtcaaaaaaggcatttcaagtgtccagtttaggagacagatgggctggagatttgatgttcatcagtactacctgttagtgatcttataaggattaaataatatgcatatggaaaatatatatatacttgccatttagttgtttgttgagcatactgaatatttgcatacaaaggtatacttacaacacttttttcacaagcacagctgaaataaactataacaactaccacttatactatttaccataaattgtgctaaatgtttttacttattatctagtgtttatggtaaccctttgatataggagtagttattcccattttttttcttatgagtaaactgactaggagatatagtgtaggttggccagggctacacagtagcagaactggggaattccaaggccagtgttctttcttatgacgcattttctgtcttgggttacaacagcactaacgacaggtagcattgcacacaggcagctgctgggaagtctccgcccccatctctggctaggagccctgcaggtgatgataaacaagctcctgtggaattgtgggtagacactggacttgtaaacgaaaagcttcataagtccctctttgcttagtacttttctcgtcctttccccagggtgcacgtaaccctcaagcactaggaccgtgcggaatccaggctgcgatggcaccttcatttaccgcccgcattcagttgttcctcttgcgggcgctaggctttctcataggcttagtaggccgagc

SEQ ID NO: 43949 - DNA, 2300 bp, Homo sapien
agtatttaaaatatttaacaggctcattaagtcagtaagtactagatgaacaatagaatagaaacatgggttaaaagaggtaaatttgaataggccttcttcggagtagacactccaaaaggctcataaacacgaaaatgtgctaaagcttactagtaatttgggtattgcccaccagtagactggcaaaatttaaattctggcaatacttggtgtgggtgaagatgtggagcagtaggggctctctgtgctgctggtgggattgacagcttgcccaatcactacagagaacaatttggcatcatctagtaaagctcaggatatccataccctatggccctgtgattctattcttggatatataccctagagagatttttacacatgtgtcccatgagaaatgtgcaagaatgttcataataatcgctgaaaaatagaagcaatcctaatgttcatctgctgtagaatggagtggtataatcataccataatcactttgctataagcatatgctggaacgacagtcgatggagacaaaggatctacttacttataactattatgaacaacatggatgagtctcaagtataatacagagtgaaagaaacaagttataaaaggaaacttgccgtatgattccatttatacaacttcgtatcaactctattgtttacggatgcgtacaaaagtgataaagctataaaggaaagcagtgaaatgattattacaaagtcagggcaatgactatattcatataggagagtgtgggttgtgattgggaggagtacagcggctgtattctggaaggctggcagtggtctattgcttgaccttggtcctggttacacaggtgtctgcttttgtaaaataatctaaacgatacaaatatgttttatgcactcttctatacctcagatttgaaaaatgcttccaccagaaaaagtaatagaaagaaaagtatgtggagtagacattttgatgaggttcaaatagttatggatgaatagcttgattttcaagagaccaagtgtccactgtcattaaaagagggcgagagagctgggagtatttaaacaacaggttacaccccgctcccccaccaccaccaatctagtcattactctaagctttcttatctcagatatttcaccctatatttgtgtcaattcccaactcagtcgtaacggacaaaatgaaggattgtcatcatcattaataagatcattaggcaccacaggcccagcaagcctgggccaccacacttaaatgtgaacaggtacaccaggttgattggacaagatcgtctgtgccttttacttggcagaatccattgcagtgactcaggatttaacctaaacacatttaactgaaactcctgcccagagacctccacgtgctggagaaggcagagtaaactgaggaatgaatgccctcattgtgctgtgagagcagacatgaaatttatcacagtacaaccgatggtggaagggcaaaagttggtttaggttgtgcactgtatagggagaagccaggagaaggttgggttttttccagatttcagtgtaaattgtttcatcctccagactttgaatttctaggctgaagagtgctaacctgttttggccgcatctctcactcattctaatgtctgtatcagcaagacaaaatttgaactatgcggcaaattgtaccgaagactttgctcaagataattgtgaatatggaagttgtcccgcggggaggtgggaaggggaaggacattttcagcagaactgccagcgctatggtggtttaatgctgacacagagacagttttttctctcaggaattgtctttcatccatcagtccagccagccagccagccagcaaattttaacacacagaaagtacgaagcaacatatctaacactgggaggggctggggtgtgtttatttgggtatatacaatgagtcatggattaaaattgcttccagcggatagatacctaggtgttccacagcattactgaacaagctgtcgtcatttccccattacctcagaagacccccttaattacttacttatattaactgtagaacgtatttatgcataccaggctctacctctgggctttctattctgttccagagacccagtaccagaatatttaaatcactgtggcgttaaatacgttttaatatctgatagggccagtttctgcgcattgcacatttttttttcccctttcaggaacgtgttcaggcccgcggcagggggcgggatcgcgcctcctcctcggctctggttccagccgagcct

SEQ ID NO: 43950 - DNA, 2300 bp, Homo sapien
caggtgtggaagagtatttaaaatatttaacagactcattaagtcagtatcagatgaacaataaaatagaaacgtgggttaaaagaggtaaatttgaataggccttcctcaaaatagaaactccaaaaggctcattaacacaaaaatgtgctaaagcttaatagtaatttggatattgcccaccagtagaccggcaaaatttaaattcgggcaatacttggtgtaggtgaacatgtggatcagtaaggactctctatgctgctggtgggattgacaactctcccaatcactacagagaacaatttggcatcatctagtaaagctgaggatatccattccctatggccctgtgattctattcttggatatataccctagagagatttttacacgtgtcccattagaaatgtgcaagaatgttcacaataatcattgaaaagtagaagcaatcctaatctccatctgctgtagaatggagtggaataatcatacaataatcactttgctataagcatatgctggaaagacagtcgatggagacaaaggatctacttacttatagctattatgaacaacatggacgagtctctcaagtataatacagagtgaaaaaagcaagctataaaaggaagcatgccgtatgattccacttatacaacttcatatcaactctattgtttagggatgcgtacaaaagtgataaagctataaaggaaagcagtgaaatgattattacaaagtcggagcaattactatatctatataggagagtgtggtttgtgactggaaggagtacagcagctgtattctgggaggttggcagtggtctattgcttgaccttggtcctggttaagtaggtgtctgcttttgtaaaataatctaaactatacagatacgttatatgcactcttctaatttcagatttgaaaagtgcttcctccagaaaaagtaatagaaagaaaagtatgtggagtagaaattttgatgaggttcgaatagttatggttgaaaaacttgattttcaagagaccaagtgtccactgttattaaaagagggcgagagagctgggagtatttaaacaacaggttacacccccccacccccaccaccaccaatctgttcatcactctaagccttctcatctcagatatttcaccctatatttgtgtcaattccaaactcattcgtgacagacaaattggaggattgtcgtcatcattaataaggacattaggcaccaaaggcccagcaagactgggccaccacacttaaatgtgagcaggtacaccggggcgagtggacaagatcgtctgtgcacattacttggcagagtccattgagtgactgagggtttaaccttaacacatttaactggaactcctgcccagagaatgtgctggagaatgcagaataaactgagcaatgccctcattgtgctatgagagtggacatgaagtttatcatggtacaaccgatcgtcgaagggcaaagagttggtttaggttgtgcactgtatagggagaagccaggggcgggttgggtttttttccagatttcagtataaattgtttcatcctccagactttgcatttgtaggctgaagagtgctaatctgttttggccgcatctctcactcattctaatctctgttatcagcagacaaaaattgaactatgtggcaaattgtaccgagcactttgctcaagacaattgtgagtatggaagttgtcccgcgcagaggtgggaaggggaagggcaatttccgcagaaatgccagcactatggtggtttaatgctgacacagagacagttttttctctcaggaattgtctttcatccatcaatccagccaggtagccagccaataaacaaattttaacacacaaaaagtatgaagcaacatgtctaacactgggaggggctggcgtgtgtttatttgggtatatacaatgagtcacggattaaaattgcttttaccagatagatacctaggtgttccacagcattattgaacaagatgtcgtcatttccccattacttcagaagacctccttaattacttatattaattgtagaatatatttatgcataccaggctctacctctgggctttctattccgttccagagacccagtaccagaatatttaaatcactgtggcgttgaatacattttaatatctgatagggccagtttctgcgcattgcacatttttttttcccctttcaggaacgtgttcaggcccgcggcagggggcgggatcgcgcctcctcctcggctctggttccagccgagcct

SEQ ID NO: 43951 - DNA, 2300 bp, Homo sapien
agcatttggaaacccagtttttgtccattctgtgagcgggcttttgtgagctcattgaggccaatggcaaaaaactgaatatcccaggataaaaactagaaggaagatatctgagaaaacgttttgtgatgtatgcattcatctcacagtgttaaaactttcttttctttcagctgtttggaaacatttcttgtgtagaatctgtgaagggatatttggcagtgctttgaggcctacggggaaaaaggaaatatcttccaataaaaactagaaagaagtttttggagaaactgctttgtgatgtgttcattcatctcacagaattacagaattaaacttttctttggattcagtagtttggaaaccttgtttttgtccattttgtgaacggacatttgggagctctttgtggccaatggcaaaattgttaatattacaggattaaaactagaaggaagttatctgagaaaccgacttgtgatgtgtgcattcatctcacagatttaaacctttcttttccttcaggagtttggaacactgttttcttagaatctgagaagagatatttggtaacccaatgaggcctatggtgaaaaagtaaatatcttcagataaaaactaggaagaacctttctgagagactactttttgatgtgttgacagagttaaactttctttgggttcagcagtttgcaagcacattttttgtccattctgcaagtggacatttgggatctcatttaggccaatggtgcaaaagtgagtatcccacgataaaagatataaggatgatatctgagaaaatgctttgtgacgtctgcatcaatctggcagtgttaaaccattctattcattcagcagtttggaaaaacttttttttgtagaatctgtgaagtgatatttggcagcgcgttgaggcctatggtgaaaaacaaaatatcttccgataaaacctagaaagaagctttatgagaaactgctttgtgatatgtgcatttgtctcatagtgttaaaactttatttggattcaacagtttggaaacactttttttgtccattcacagaatggacatttgggagatcactgaggccaaaagtgaaaaagtgagtatccccggataaaaactaggaggaaaatatctgagaaaactcttcatgatgtgtgcatttgtctcgtagagttaaatttttcttttcattcagcagtttgtaaacactggttttgtagaatctgtgaggggatattttggagcacattgaggcctatggtgaaaaaggaaatctcttcataaaaaaaaattagaaacattctttctgtaaaactgttttgtgatgtgtgcattcatctcacagagctaaacctttctttggattcagctgtttggaaacactgtttttgtgcatgctgcaaatggacatttttgtgctcattatggccaatggcaataaaagccaatatcccaggatacaaactagaaggaggctatctgagaaaccactttgtgatgtgtgcattcacctcacagagttaaaactttgttttcattcagcagtttggaaatgctttttttgtagaatgtgcgaagggatatttgggagtgtttgaggcctatggtgaaaaagagaatagcttcaggtaagaactacaaagaagctttctgagaaactgctttgtgatgtgtgcatttaatctcaaagaggtaaaacttcctttggattcagcagtttgaaaacactgtttttgtccatgctgcaaatggacatatgggagctctttgagaacaatggggaaaaagataatataccaggaaaaaagtagaaggaaggatctaggaaaccgctatgtggtgtgtgtatttagctcacagagttaaactgttcttttcattcagcagtttggaaacactgtttttttgaatctgcaaagggatatttgggagcgcactgaggcctatggtgtaaaagaatatatcttcagataaaaaataggaagaagatttctgagaaactgctttagaatgtgtgcattcatctcacaagattaaacctttctttgaaatcagcagtttggaaacactgtttttgtagaatctgtgaaaagatatttggaagcgcattgaggcctatggcaagaaattgaatgtcccatgataaaaattagaaagtgatatctgagaaactgctttcagatgtgtgcattcacctcacagagttaaacctttcttttcattcagctgttttgaaaaactgtttttgtagaatctgcaaagagatatttgggagtgcattgaggcttttgg

SEQ ID NO: 43952 - DNA, 2300 bp, Homo sapien
atgtctttgcattggggcagggcagctgaaagcaattatttattcatttaacaaatgtttattgagtctctattctgtgtagggtatttgggatgcaagataaaaatcccttcttgaataagtttattgtccagtgggagtcatacaaagtgaacattatatcagcatgataaggccttttaaatctatatgttagtgaatggtctgaatattagaatcataattttggagaagaaagggtattcgaatttttttttgtctcttcaggccactttgtggggttgtaagcaagaattcccttgaaggatgtaaccaaaggcctgaggaaactgttttccctgcatttgtgtgccctgtgggtcatcttcttctttcatgtgtcaactgctcttctgagcaaaaagtgcttggtgtatcttggtctggggaattatttggaagacattatttgtggaacataatggcataacatttacatacgttcaccttctgactttgagtatgaatgtgtaggttgtgtatatgtgtgaatatatatacaccacgatgtcattctaagtgtttggaaataactgttcatacatgtagtttaccttcttccttggaattactatcttgtaatatggcattaaagaattatcccatctctgaagtcctttgcctgggaaacatggtgaactggaggatccttacacattctgtgtgaccagctattaaacagaatgaggactaggtctctctgtcactgacttggaaggtaatgaaatgttcaggcaaccagtattgacaccttgcagcttttgccccggttttgtttccaggtgaattaattgccttttttactcatgattatatgacgctttctcttttcaccagtgaagagtagaggaatgaaaatgagaaccctagactcttctggattttaatgtcatcttgtaagtgggatatagtgttaaaagctttacagacattctcatttaatcctcatagcagctctgtgacttaaggtaagtgaaattatggacactttcttttcttgcaggttttcgatataagcatgcagcacttttataatcagaaaaacagcaaatatatacacaaaaaatcccttctttctctctctacaaaattaagaccacaatattgtttcaatattttgctttttcattgtactcatctcatgtgcagctctccatgtcattaaatcttcttttaaaaaatggtttagacaataaatccatttatgaaggtaaaatgtttttatttatacttatgttatagatcatgtaggataaatagtggactatcaaaaggaatattacaaatatttaatattactattaaaaatcatgttttcagagtatttaacaatcttggaaaatgttcatgatatacatgaaaaacacaagttataaaagtatgaaatatgctcccaattttataaaatataagtacaggtttattaataggagagaaaacagtattgttaacattttggtgcagtctggatggtaaaattaatggtagtttcgtcttttatttcactgaattttagaagatctccacaatgtcagtacatgacctttacattctgacaaaaaaaaaaaaaataaaaataattactagaaatgatcaggtagaaaatataaaacagattttggattaagatggtggtctgtaaattgtacacagggtttttattctcatcttaaatatcttaaactgaaagaaaataatttgtatgcacaaactctttctgggtgtgcgtgtgttttacattttttttttttttaagtgaggaattcctggaagacagaaagcagatggagccactgtgtaggaggctggcgggcagcagaccgccagaaaggaggaggaggggagtcggcctgtctggctggcgtttgagggaaacggtcgaggggcggaggaggaaatgaaagagagggcgcgtgtgtcaatacaaactgaacacgggcacgcgcgctgaccagcccggctgccgcccgcagagcggaaggcgggatggctgggggcggggccaaggctcaggcgggctcagagggggcgggttccctgcgccgcaaagacccggtcgccagagtgaagccaagccagctagcgctgcgaagcccaggccgcgcggactccccagagacttgccgccgcctgcgcctttgccgctgcagccatccctcttactccttgcctttcgtccccgtcgtctcctctgccgccgtgccgcagccgcaccagcatcgacaacagctaagtggccgattcggggacttggggtcggg

SEQ ID NO: 43953 - DNA, 2300 bp, Homo sapien
tgtagttgatgaatttgggctgaattgctttgagcagaatcttgcaaagctttaaataaatatcatctaaacccattcatctagaaagccaaatcaattgtataaacttgcctgtactctgtacaggtcagaatacagattaattcaactgctataaaaatactcaaaataatatgtgacagtctgaggataatttatccatggtcggtgtgatgactccacggtaacagagacctaaaatccttttatgttgttgctctaatgtctaatttaagtactgaacactgtcattatagtgtaaatgtagacatagacaatatataaatgaatgtgtttgtgttccaataaaactttatttttgaacatttaaatttaaattttatataatttgtacatgtcatgaaatatttgtttcttaattttttaaccacttatatatgtaaaaataattatttgtcctctgatcaaacaaaaacagatagtagacaagctttggcccttgagctgtagttcactggccccagctccaactctagtagctcaggttatcatttccccatcttagtcaggttggattacactttatgttgtaagcatacttgttctagatttctgaggggcttacctttgttttccaaggacattacaatcttatcagcttcacgataacatcattggacaagattttcttatctgaaataccttgacaaggtctctggcagtggtcatgtatttgatttactttaggctgagacagtagttccttgtgggtttacttcttaattttccaatattttttgtctcttattactacttttaatcaatatttatatagtacttatgtggcagtcgttgtaagtttatttaatatgttactgtctcacaacaaacctatgaaattagtactgttatccttattttacctatggggaaactgaggcacagaaggcttaaataacttgagctaataacgcagataatagcagagctaggatccaaatctaggctgcatggattcagagtccactctgcctttctaaacaaccttggtgtgttgttttcttaaataaaaaatgtaggaatgtttctctccaaaccctgaaatatttatgtcacccacacaggacacctccttcttgtacagctaaattagtatcaccagtgttcttggagacctaggattcctgattgagggattcctatgctgcaatgtctgtgtccatattttatttatttatcaaataggtcttctcactgccagacattgttttaaatgccttatacacattgacttgtttaatttaatatttacaacaagcaattaacagatgaaaaaggtcgcataactttgtaaagggcagagccagattgcaaccaagttaacgtcttcgatcgctattcttaatctttctgcagggtctgagtctcttcatttcttaccagcatgggtttctctgtttcttgcttcagggacttcacgactggtcacaagaaattcttgaccttggttggttctgacatggctgcaacatgctctttctgacaggaatgcatagccgaatatcaggttctaagccctgtgacaatcatagggcacatacagcatagattttgtttaaagaaatctcttttggtgtgtatattcttcttgtttaaggtctgaattgatatttgcacactgctataacttctctcatgaagcattacctattttcaaagctacataaggtgctgttgtaatcatacggttttgttgtatacataatcccgctttaattattcatcattatttattttccttttgttagtttaattataaaaacaacacatactcattttaagaatcctaataatacagatctgtatgttgttgttggtgaaaagtctccagtttttttcatcccttttctttataatttccagcataatgccatagaaatagacgaaactctcagcgggcttattctgcattcactggccatggtggtttgagggttaactttaagaagcactctctccatttcagctgactgctacatccgggagaaaagcgctattgcctgggaaactaagtcacgtgagaacctggggacgctaggttccggaacctgacctgagctggggcctgtgcttccagcgggtggtggggggcctggtgtgctggcatcaagtaagccgactacctcggcaaaggcttagggacaagagaccagcagcctgaactggctggggcatccggaaggcttagatcttgtggccaagagttcagaccgtggcgaagtggagagtgacatgcagtt

SEQ ID NO: 43954 - DNA, 2300 bp, Homo sapien
gccttggaagtagatgagcccattcagtgcaaatgcagaatgagaagaaaaggggactgcaatcagaagaactcagaaatcatggcattaatgactggatgaagaagaacccatgcaggaagtgaagacagcataaacatacaggtcatgtggatggtgttcccaaggaaaaggagcatttcaggattgaggaaggcatcagtggagtcaaatgggagaaaagttacgaaaggtaaagattgaaagttggccatgagatttagtaacaagttggttgttttttttcctattcacaagaggtttcagttttctataggacaatgagggtaaagccaggatgcagtgggttgaggggtcaaaagataatgaggaaatagagacaggataagactgaactttcaaagactaggagaaagactgtagttgtttatattatggtactgtcctgatcaccagtatctgtctcaacataatctagaagagtagttttcaaaccgttttgactattacttgctataagaaacacatttcacattacaggccagtacatttatatttatatataactgaaacaaaagcatcatgaaacagtatttacgctaactatatgaacattttctataaatggaatcttacaaaagcctttttctcacgtctttcacttagcatgttttcaaagctcatctatgttgtagcatgtatcagtagttcattcctttttatggttaaataatacttcattgtatgtatataccacattttgtttacccattcatcagttgttggacatttgaattgtttccatcttctggctattgtgaataatgctgttataagcattcatgtataagtttttgtgttggcatgttttcatttttcttaggtatatacctatctgttcagtcatataatcctataatataagagcaaaaaggctctgagagatctcctgtataagggaatccttggtttgaaggcccagggaaccactgaaattgtttttttctgaggtgagtgttctgaggtttaactgaattctcagataagtctaagtcctcattgacaggagggagacagaagacagacccctgagaggaaaagggaattgcccaaaagtcatacagcaagtttgaggtagggctgagagtaaatttgaaaccttctggtctccactccatggcttttccctccttagctctagataccaggtcacagagcagggcaatgattagaagcagattgcaagttctgtagaggattttccatggcgaatgtttaaccctatgctggcttcccttcatagtacccagaatgctggaaaattgcaagctaactgtcctagtctgaagaatctataatcaagaaaggaaatctgaccaggtaagggcagtggtatcagggaaagccaaatagaattggattttggaaattctgtcgtgtgtccctgtgattctgtccacaacactggtttgttggctttttatagctaattgtgggttgcctgtaaattcttaggcagtggccaaaagcacctttgcttcctccttggcccaggctccaaacaaagtggctgctaggcacatgcattctccacagctacctatccgtttttcccccattccttctttctcctcaccatccttttttctgcctttccccacaattctctttcttcattatcttccctctcttctccttcctcctcgtcttttcttctttttctccctcttcacgtgatctcctccccttgcatcctattgggtcccttccctccctctttcccagtccttttcctccccatctccttatataccccctctatccgcccccaagaagctccccacccccaaaccagaactggtggctggtgactctcgccggtctggggagagcgagcttgcttgggagccttgaggctctgattggcggtcgcggctagcacgccagcgcaagtcccgcccctgggcagcgaacgtgctactgcggcatctgttattggtcggcgggtatgtcagtggctctggccgcgcctcacgcaagcgcccgcagtcgctcggtgaataaaaaggcagcctatgggctgagcgggggatggggagagaagagggatagggccagcaaggcagggatcgaacgagtgtctggcagccgggagcccagcgaagagagcgagcaagcttaggaaaacgagcgaagtaaagggagtaggggagactgagactgaccggtagccaggcaggcggacggacgcacgcccggacagactgagcaggcgccggagaaccactcacaggttcccc

SEQ ID NO: 43955 - DNA, 2300 bp, Homo sapien
cgcagtttaaaagacctagggtggtttttattttcctgattggaccatgaccggcacagatactttccacaattccagggctactcacatcacataaattggtttatatccttcagagcacatattacaatctctaaatatttttgtttgtttacttatttattgtctatctctcttctgtaagtagattgtaaggtccatgaggaactttgtcttgtatcctgagcatctgtcacaatgcctggcacacaggggctaaatgataatgttgaatgaatgcatccatcaaaaaattccaagtttttattgggtatttactatgtgccagtcactgttgtagaagatgcagaaattagtaattcattgccactgcttcaaaaacacataatgccatttaagtgaaaggggacagtaaaatgttcatatgaccattgtgttagttcgctagggctgtgccataacaaaataccacagactctgtggcttaaacaacagaaattgagtttcttataatcctggaggccagaagtctgagaacaaggtatcagtggggttgggtcttctgaggcctctctccttggcttgctgtttagatgactgtcttctccgagtcatcagattctgaggtactggaaggacttcaacatataaattttgggggaaaacaattcagcccgtaacatccaggaaataaaaagatcatttttaatcgagacagtgaaatcgtagtgctataggaatcaaatgaaagatgacaaaatcagggcctggaggtattcctggaaagctttctaaaggtggtgtgcctggtgccagatcttgaacagtcatgacagtttgaatgggctggttggcaggggaggtgcatccaagatactgagcatgaaagaaggcccagagatgggaaagtgagagaacattgtggaatcactgatgcctgggttaccagacttgggagggaagttgaaaggtcatccagggcaacctcccatttgattcaggaatcccttgccaaagggtcattcagcttctgcttgtacacctcccatgatggggtgctcattaaggtactgcttctatctttgcccagctctgcatggacaaaacaacaggttggatgaagtgcagaagttgtgctaaaaagaagaggacaaataaagtacgtgtaacaggccagtgatgtcttcatgtcaattatctccaggaacttctttctaatatcatactgtaactccttttactttggttgcaacctctgtttttgcaattctgtctttgcctgacctgctcttctagtcaggagccttggattcttgtcttgtttggctgtgctactttaagcagaagtctttcaatctctgggcttcagtgttcaagtctgtaatggtgggcaattaagaatccttgttgtgtccatctcatagagttactgtgaggattataagggataataacagatgttagtgtgactgacaaagtcaatttttagcctaagcaaaggtaccagcctgtgttgtgttccccagagttgggggaatcataaagaggtgggtggtttctccgtttgcctgtttcgctgatgtgcattcaactcattctcagcaaaataagcaaatggaaaattcgtccatcaacaagctacctttcatgttcctaagggcatgaaggagaagcctggagtggtgtgtgtgagatagaaagggagagatagccgaaagaggcttggaaagccgcagagggtaaagtcgaggatttatcttttttttttctttaatgtgaccttatgccccttccctcttccaaacctccatttatttatctataacttggagatactaatggctgcctctacagggttgttctgagaagtgaaagtaatgcagatgaaagctctcagatagtacacaaagagagaagaccctaggggagtatgcagagggagggtgggggagggaggcatgagagtgctggcttggctccactggggcaggatcttattattctggagattggcacaacacctctggtaactttggaaaggactttccgctgactcgacacaattgggaagccccacaataaacagcatctaactccagcgcagcgggaggcaggcagaggtagcagctgccttctcctgggcgggcggaggctattcgcccccatcctctccctgcaccccacccccacagttctcaagccttggtgggggacaaaagcagcccattaggacccccccacactcgcacctctccctgccaagacctctaggagcagcagggcggagagacagagcctgc

SEQ ID NO: 43956 - DNA, 2300 bp, Homo sapien
gtgacagaatgtttggtggctgggcagaaggcatagaagactagcccctgtgacaggagcagcacaatagtgcctgggactatttcaagcctgccacctgactactttgcacacctcctctctccctgcttccacaactgagactgctctggccctttgtttccctggaccccaggtttgcaaactgccttctcataatcttagtctaattcaaagaatcaaggttctgagtgaaatgtgagcaagtggcagtgaccagaggcacgaggtagggaggaagtctataatggagattctggaaaagaaaataaacttccaaatcaggcccacaaatgagaatcaggactttgcaaagcaggaaagcatagccccagggaaacttttatagtccagccatccagatgggaaaaaagttgcataatgagccagcagcagctccctactcctcatcgtttatttagactcagtactaggatgggagtctgatgttcaatattgatttttgttggcaatgtatagaatgccatggaaggtcatggaacatctatattttctataatattccgtggaagatcatggaatattatagaaaaaaatgagttgaactgtcagatctcaaagatatcaagggagcctgatgatgcttaccctctccttgtggaggtggggtgatgccctggcccagagaaaaaaatgaattggccaaggtgtccagcaagtctgaggtagagctagagtcagatccctagcagccatgtcagttcctgtgctctacacatgcagaggcagcagtccacctcttaccagttcagcagctggatcttttcaagactgtcaggacccagaagcagcagagaacactcctgcaatgcaaaaatagcacgcattgttctctaatccttctctctatcctcagctttaatccacccacctccctttttagacacacacagagttttagggctgggccttctggatattcttgaactagtggtggaactagattctttgctgcctcagctcacctggccctggcagccactgatgccacttaatgtccttaggctagagacccaagttcgccgggctccctgccacatcccacacacagtagcagacaaggctggtacaggcctcctcactttgtcctcagcctgacctccggtttgggcccagacaagattttcctctcaatatttagacttttcaaggaaaaaggcctgccgaaagccaggctcacaaaggatgggggaagggggactctggagaccttggggattccctccacattccatagaaggtgcgaaatttgggtgagggtcaaactatggaaacaggtatcatctcagagaagaaaagtgaaagcaatcctggaaagggagcccggggctctggattccaaattggcccttgtcgccggcaggctgggtaactgtggggagggactttccccactctgggcagcagagggcccgtcggtaacgggtggaagttggcctctatggtctctaagggcactggtgtgccagagaggcggacgaagttagggcgcaggcgctgcagctagctttcctggcaggtgagtccctcctctgggtggcctggcggcgcgatccgcagggccttgtctctacgactaaggataggccggcccttaggtttctgcagtcttcccagattcctcaacctctctgcctcgttactccccgccggcctctagctcaggaataaacgtcctggtggcggccagggcacagtaccgcgaatgcacagcggccacagaaatgggagtgcgtgaaaaccgaaaccgatccggcgagccccatccgggcaggactggctccttgaggccacggtgtagccacgccactaccagcccggcgtgggggcgggagtggggagccccagccagtggttccgcaccctctccgccccctgccaacaccacgcctgcacttatttgcatttaaagagaaacgcaccaaggaaaacagtgggcgggccggggcacgccttcccaccatagcgattgggccatatgcctgccaatcaggacgcagatgccccacccggtggccttggagtactgggggagggggtatgggggagctacccaaagcctggggaaggggagtcagtgctggaggtgactggagccgcggcgacggcggcagcagctgcggtggcggcgctctcagccgtggcagccgaggctgcagcccggcccagggcggctcagcggacaataaccgggctaggaacctgaccgggctgggtaagcgttgcgtacagccaggagc

SEQ ID NO: 43957 - DNA, 2300 bp, Homo sapien
atatatggatcaagtttagtcatggtggtagtggtggtgatgtgatactgctgtctttgaagtgcttgaagaaactcagtggatacatgcctggagctaaagagagagctgggggctcggatagagacgcttaaaataatcagaataaaggtgagagcgactggagagaagaggttggagaagagaacacaaatatttcaggggagaatgggaagggagaaaaatcaggagagtgtgctggcaaagaagctgatggaggagtttgtagggaggagtggtctgtagggatagatattccagaaaagtcagggaagaaaagatcttcaagatatccactggatttaaccacaaagatgaccttttgaagagctttcttggtgtatgtttgagtgtgggtgaagccagactgcagagaatggacaagtgaatggaaggtggtgaagtacatagtagaaaactatttggatatgtttggtgtaaagaagggagagacgaagagaaagatagctagagtgggacaaaggaccatagaagtttattctcctaagttttgtctcctaagatggaggctaaaggtgcagagtatgtagtagctctcttactcctaataacctcatgagaaagtgacttccatttctgtcttatagatgaggaaactgagtcccaaagaagggaagagacttacccaaggttactcagcaaagaactgagagtgctgagctgcaaacctgggtctgctggatttccaaaatcctgtccttcccattgcaccccaagaatgaataaataataacaccatatatggagctgatgctggtgggtggggaggggcctaaagtttagggtgaccctacccacccacctcataattttctttctatgaggtaggtacctgaggtcccagactaacaaagaggggtgggggtagacagtgaataaaagaagatatgaggtcctgagacctcagctgcagggtatgggagagtaggggaacttaagctctgagaaacctgccagctcgccctgatgacattacaaactgaggtgggcgaccttgacactgaagcactggtaaggtcagaggttgggttgagtcagacattgagccatgagtggttttgtagggtgaggattatggaaagagaagagttgaaggttgagtcaaaggctctagcctgggtcagacaggatggaaaaaggcttaagccagaggaatggggagccagtgttggcaatcaaagggactcctggattaaattggtcctgggggagaatctagttgtaatcagagaggaaacttgccctgggagcctcgactgtttcctgccatctgtcttcattttacttgaaatatgttctttgtaatgccacctcttcatttaatcagtaaatatcattcaataccagtttcctgaatacttcttttcctgaaatgtgggacttcatctgagggaaggttacagaaggctcagatgagggagctttagtcatatatgaggggctgtgaagagttaaactatctgaaaatggagttaagggcttgccccaaaagattgatgtcagcaagctcagggatggcaacttgacaccacaaagtatggttctattggcttagccagcgccaggccagagccaccttactaatccacacattctgaactgaggaaaatgcatctaccagatttccagccatgatatagccctactagggatagaggaatacaagatgaatacagggtccttgccctggagtttatacactaatggaacatagataagcggaaatgtggtgtgaaagttcatagctgaagtttagttgtgatccttcagaatccctgagcaggaagaggagattagagaaggcttcctagacgtaggagtttgaggggtaggcagaagagtgtatgcaaaggcatcaaactgtaaaatgccctgacctgttttggcagtgtctttggggcctgaaataagacagtgggattgggagtgagaagtaggagacccatgaatgagtagcctgatggtgaaatggagggagatttcaaggagcgtgcatggtcaggcttttgatgggtaccctcattctctcccacttgtttgtcacccacagatctggcatttccttgtgctcataatgagaatagttctccaattagccaagatgaacctcatggacatcaccaagatcttctccctcctgcagcccgacaaggaggaggaggacactgacacagaggagaagcaggctctcaatcaagcagtgtatgacaacgactcctatactttggaccagcttttgc

SEQ ID NO: 43958 - DNA, 2300 bp, Homo sapien
ttatatcatgtatggtttcattcatataattttgaaattatagatatgaagaacagattagaggtttccaggggttaggtaccaaggtgggaagaatggaaaggaagtaggaaggaagtagatatggctataaaaggcaatgtgaaatatcctaattgggatagaactattctgtatattgtctaaggtggtatacacaagctacatgtaataaaattgtatagaattaaatgtacgcacacagacacaaaaaagtacaagtaaacctggggagatttaaataagataagtggattgtatcaatgccaatgtcatacttgagatattgtactatagtattgcaggatgttagcattgggagaaactcagtaaagtgtacttggaatctgtattaattccacaaccacatgtgaattacaattatctcaacaaaaacttacattaaaaaatcctgcaaatctttttttcaagaataacaccttactctgtcatctttagcatcataatagcttatttgttgactgctaattgggcttgcatgaggcctcagacaaagtcccctggctcaagctaagctgaaactggtatgctttttgatgtttctgatcttcagagtcactgatcacactaggacattcccacattttccagaggagttatctggtcttctgtgagctccctggcactatcaatgtgcaagcagattgcttgaccacttcatgagtgaggtagacaagactggggagggaactaaatagataacagattgaaagaaatagttgaaggagctggggctgttttccctgaaacaaggtgacatggaggatataatatctgggttcagatccctagagggctgttttggggcagaaaaagtgagagctgagtttttgacaaagtttccagtgctggacacattaaagtaatggtgatgctttagggtgaggatagtgggaggttgtgggcattttcttcaggctgagcctggtgggtcagtggactgggaaggtctttataaatgaccaaggccttcttaagctttagaaaagctgagtgagaacacattctgttatggaggcttctccttcctaccttcctcctcactctgagcagtgaaggaaggggaggggcaacgagttggaggatatgcagagaggctcagttcagaagagaaaaaagaagagattcctcagggatatagaactagaaataccatttgacccagcaatcccattactgggtatatacccaaaggattataaatcatgcagctgtaaagacacatgcacacgtatgtttactgcagcactgttcacaatagcaaagacttggaaccaagccaaatgtccaacaatgatagactggattaagaaaatgtggcacatatacaccatggaatactacgcagccataaaaaatgatgagttcatgtcctttgtagggacatggatgaagctggaaaccatcattctcagcaaactatcgcaaggacaaaaaaccaaacactgcatgttctcactcataggtgggaattgaacaatgagaacacatggacacaggaaggggaacatcacacaccggggcctgttgtggggtggggggaggtgggagggatagcatttggagatatacctaatgttaaatgacgagttactgggtgcagcataccaacatggcacatgtatacatatgtaactaacctgcacgttgtgcacatgtaccctaaaacttaaagtataattagaaaaaaaaaaaagagaaaaaaaaagtgtgctaggctgaggctggaccttctcagtgccccctggtggaggtgtgggaacaaccgcagctcaggggcctcaccctgtctcccatttgagtggcagggagggatataggaggataggctgggagcaggaaccctagcctcaccaggcacctgtctatctgtcagtcagtccttccaggacttccccatgggagagcccctcctcttactgaaatcgctcccagaatggcactggtaagataacacggcctgggaagagggggtggagggtagcctaaaattagccccttggaccaagactagggactgactcctagtctttcaacggcattgttaacagtgggaaacgagagccccagctgctccaggttggggccgtgggggctccctaaggaggggacaccagggccccaatgtttcacagaggggcggggggcagcgaccctgggcagcatggcctcaggctgaagcccggtgagtacctggagcctaggaccggtttgagaagagtgaccactgcgggcccaca

SEQ ID NO: 43959 - DNA, 2300 bp, Homo sapien
cacagttccacaggctgtccaggaagcatggtgctggcatctgcttggcttctgaggaggcctcgggaaaacttacaatcagggcataaggcaaagtgggagcgaggcatctcacatggctggagcaggagcaggagagtgaagagggaggtgctacacacttttaaacaaccagatctcacaagaactcactatcagaacaacaccaagtggatgatgctaaaccattaatgaaggagccccacctccaacaccggggattacaattgaacatgagatttgggtgagaacgcagatccaaaccatatcaaaccctaagggtaatttgagctctaaattttcatggtactttgtacagaacataagcctgatcttggaatttattcactctgcagtcccaaggtaatgcactgtgttagctgtggctgagggtgtggcaagctgggcactctgaaatcaactatgttcacagcctcctgtcattcagtaaaggcctagtttcacaggagagagggtgtcaaaggaagcccctaaatgagaaagcacttctggattagtcagccccctgacttactgtgcttccttatttgcaaaacaggaataatctctaccctgccagtctcatgctgtgattgtgacaaccaagggaaattgcaattttggaaatttggaagtacttttcaaatataaattggtattattagtttcaatcttcaaatcctgtccaactgaactagaactacatatagaagtaaggaacaaaatcaagaattaatggagtatgcttttggcctttgggaggaaaatgctacttgggtatatacgcaaggcacagcacaattgaaaggctaccttgtttctctaggcctctgttaccttatatttaagacaggtggtttgaactaggtgatttctaggaaaagactgaatacctattgagtggttcatctgtgccaggtcttgggctgggagctttaaatatatgttgtgtggatgaaataactgaagtcctgttcaaagtcaccaagctagtatgtaggctactgaaacacaagactgactaaaatattgtctatcttgagaatttcatactctaaaaccctattgattgattggacttccagtccagacaagacagcgtagattcatttctcactattccttcccactaagtacaaccataaggcctgaaaataacacaagtggcaaccaaaggagaactctgaaaggtggtatgaaggagaactgttttgggatcccagggctggagtaacaacacagcagcaagatgttttatgtcctgtcacccaacaaggtggcagtccaggctgggtatttcttgaccccccaacctaacaaaagaaggcagcccaggtaggcttattcctcccctagatcaagcaggattacctccaacaagaggtgagcctgacagcatcatcaagggggattaatcaagacatcaagaactcccgcattccccactaacaataagcagccaggcgaagggctctccatctctaccctttcctactcagagacatgggcaaccaggagacatcagcaaaagaggccctgccacaagtgcttatcccaggacgaccacttcatctccacagccagatgcggaccctgtcaaaacaagggactaggcagggaagcctctttgtcactgcaagcctgaaagttctatgcccacctgagagacattgggcaacaggcctagggaaaccatttctgctccccttaggcagcacaagcagaaaacaggaggaaccccagtggcaacagacaaaccaatcagaccaaaacagcaccaaaagctttcaaaaacaacttccctggaatgatagctgacaaaagtaggagaggatctgcatgctacggctaaacaagatgactgcctgctaaaatagaaagtttaaatagagactcctaacagaatagacaaaatgtccaggatataatagaaaactcacaatttaagaaaagacaatcgagtaacgttaacactgagataaatcagatgttggaattactaggattttaaaactgccatcataaaaagattcaaaaaggagggggaggagccaagatggccgaataggaacagctccggtctacagctcccagcgtgagcgacgcagaagacgggtgatttctgcatttccatctgaggtaccgggttcatctcactagggagtgccagacagtgggcgcaggccagtgtgtgtgcgcaccgtgcgcgagccgaagcagggcgaggcattgcctcacctgggaagcgcaaggggtcaggg

SEQ ID NO: 43960 - DNA, 2300 bp, Homo sapien
ggcattcagatgaagaagatttgtcccagaaattagaaactcttttagtgctaagcctcttactttgatattgtctagctaagtttaatgagtactttgggacatgccaagccagagatacaaaccaaagtgaagcaattggccttttctctgggatatattatcaggcagctttaaaagtaagattcaagtatatgaccagtgttatctgtaatatgttaatgtcagccacatacctgcatgaagatcatgcaactgatgtataattcagaattgaaccatataggttctttgagaacctgactttttattagctccaggtttacagactgacactgtcacagcagctcaagtctgaacttgccaaggtacaacagtgtgaatgattgactttaattccctgtcatgtgttttcttgagcctgttacaccactgcggtatggatgtgtgacccagtgacaatgttcactgccagttgttttgtccagtgccacagagatcattggccctctactgcagttgtgttacaatttgcaaatgtttggatgataccatgttttttatccaaaattaaaaaccttcagtcttttgcatgtgtgaggttactgtgtattagctacaaataaaagaaaagatggcatacctccaaaaatggtacgctgacctagcctcaacagatgaaccaccttacaaagacaggatctgcaggtaggttaaaatactctctgttgatgttaaaataagacaagaaaggtatcagggcacctggttctgaagagcactgtcagtgaccagctgtgagggcaagactgacaccaacttaactcacaaaagagcgctgacagtataccagtttgttcattcacattggggacagacctgtttacagaccaagctcttcatcctctttcagggccttctctcctgcccccactgccccctctcccagcaagaattctcactcatgaacttgggggttatttcctccaggcctcaaaagagcttccctctctggggactatgtgatctgggcctctagtgggtagaacacagagagacctgcgttctagtcctggctctgccattcactggcccagtggttttgggcaagtcattttctctctctcagccttagacgtcttatctataaaatgggaatgataattgtacctaccacacagggtcgttgtgcaagttaacagagctaacatgtaaagtactacctggtaaagtccctggcacataaaaacagtcaaaatgcattagtcagcctcctcctactttcagccctgatgctgctgattacactgacaagtgctcactcttatgcttcttttttcaactctattcagccccttcctactcttgacatattgtctttagacagtcagattataatataatatattatgctaaattaaccaataaatctttgttcattatagaatgtttttaaaatatcgagaaccaaaaaagaagacatcataatttttctatgcagggagaaatctacatgcagagaacaaaataggactgtactgttcactcttatttaatagtctcacttaattttgaacatctttccatttctataaatataggtttattttgctattttaatggccacatagtatctcactatatgagctatagtttattcaaccaccctcctattgttaaacacgctacagccttcttctatatcaaatttcaatcttgcctttctgagctataccctatcttcattggttagaattcagcaacctgctttctaatttgaggtaaccgccttccctgaggtgacctatacagatgggcaatttcatctattctggtaggattttttttaaccaacaaactctgtattagtcctttctcccattgctataaggaaatacctgagagtgagtaatttatcaagaaaagaggtttaattggctcacagttccacaggctgtccaggaagcatggtgctggcatctgcttggcttctgaggaggcctcgggaaaacttacaatcagggcataaggcaaagtgggagcgaggcatctcacatggctggagcaggagcaggagagtgaagagggaggtgctacacacttttaaacaaccagatctcacaagaactcactatcagaacaacaccaagtggatgatgctaaaccattaatgaaggagccccacctccaacaccggggattacaattgaacatgagatttgggtgagaacgcagatccaaaccatatcaaaccctaagggtaatttgagctctaaattttcatggtactttgtacagaa

SEQ ID NO: 43961 - DNA, 2300 bp, Homo sapien
gagattgtattttgctccttttgctgtgataagaatgtcaaaagaggaatgagaactgggctagactaagctctgatgctaactggctatgtaaccttaggcaagtgattcttactccttgggcttgtttcttcatctgtaaaatgaggtggttagattatataattagtaaggattcttgtaattctaacagtttaggaaccagttctttagtactgtgccgtaagcctatctcctatctacctgcatttatagacagtacagatgtctccagatttgttccttttgggtattatttcaaacccagtggactgtatctggaagggagcacttacacttatttctgcatgtcaaaggaggcttatttacccaattagggaagttcttcccagccttagtctgcctaccttccctggacccttcccagtttcaccacaattgtttgcctgggccctgatctcaattatcagtatcgtactaccaaaacacacatctctcatgttgactggaagatctttgattttcttgaggttgaatatattaattcatattacattttgtgatgcctccagaactgccattgcaggacttgagtgtgacaaaacagttaagatagaacttaattatacctgtgatcccagcagtttgggaggctaaggaagaaggatcgcttgaagccaggagtttgagaccagcttgggcaacaaagcaatacctagtctctacaaaagttaaaaaaattagccaggcatggtagcacacaactgtattcctagcttactcaggaggctgaggcaagatgatctcctttgaacccaggaggttgaggctgcagtgagtcatgattaagccactgcactctagcctaggcaacagagcgagaccctgccttaaaaaaaatagaaaatttatcctaggaatatctgaatcatttccacacttgctccattcttagatggtggatatgattgaaagacttcattgaagagatgacttttccaaagaaattagggactggggcattgaggtgatgggagagcagaaaaggcactattgattggaagaccattccaggcacaggacagggagtctagagaatggaaagagcacatccaggctccatagttgcagaaacataagacagggataggaggagaacatcaaagatcaaaatgcaaaaccatgattatatggctttttgaatcaattaagagagaattatattatttggacacattttgtttcatcagttccctttccatgcatttctttttttgctggcatcagcatgaacagaagtaatcatcctacattctttgctttactgtcactagagtttaaaatgtagaggaatagttcctccctaacatttctagttaaatccttattccagaacttaatcctggacttaagtttagactgctatggttcaaattctgtttgtgccacttcttggctatatgatatctgatgaggaattcacttctcagagctttgtttttttttcattcctgaaataggatgattacacgtcaaatggctcttcttaaatagctaatggtcatggactactttgtttatgataaggcacaatacctgctattaataattatcttaattagtaatttgatataagaaaaaaaattcctgttttcctctgtaacaattattctgattgtgaactctatcacagcatgctaaaagtcatctattctgagctgatctaccaaaattgtcccacaaacttggtaatctcgtatccttaaggagagagaagttttctaacactgcagtctgcttcttgttgctttaccactattatgctttagttctatttgagagaaccccagttgtgtcttacaaagaatggttgtaggctgtagatgtagcctacagatctggtcatgctgttaccattacggagagtcaggaatactgatagtgatagagatattgcacatctgtatgtttacgctggttcttttatgtttttcagattgcactccatcacattgccactgtggagaagttacccatcactagcctgggttgtcccctgaccctccgctgcaagaatttccgggtggcccactttgttttagattctgaccttgtgtgccatgaggtttatatttcactgctcaagctttctcagccaggtagttatgatagtatttttatctaaaaccattttaatatttttccaaaatggcataatggaaagatcagggctatggagtcagaggagggtttggatctgggctgtaccacttattagctccattatatttgggcaagtt

SEQ ID NO: 43962 - DNA, 2300 bp, Homo sapien
aaccttgtctgactagagtccacacactctttccactatcctaaacagcatggaaacaaggttttgagtctgagtaactgggtatatggtggtgcaattagtagggataggaaaaacttgagaaagagcaagtgatagaggtgggaaaatgcaagggggttgtgagacagtgtgaaagatgagtttgttttgggccatgatgcctttaatgtgctagcaggaacatgcaagtagaactgtcagagggcaattggaagttctaaatttgaactcaggaaaaaggtcatggtacttgagatatgaagttgggtgtcccctactgagggttcattagccccttttcacactgctataaataaataaccgagactgggtaatttataaagaaaagaagtttaattggctcaccgttctgcaggctgtacaggaagcatagtggcttctggttctggggaggcctcaggaaacttccagtcatggtggaaggcaaatggggagtgaggcacttcacatggccagagcaggaggaaaatgggcagggaaaggtgccacacacttctaagccatcagatctcgtgagaactcactcactatggcaacgacaataccaaggaggctagtgttaaaccattcagaagaaaccacccccatgatccaatcacctcctaccaggccccacttccaacgtaagggattacaattaaacatgagatttggtggggacacagatccaagccatatccaggagtaagggtttaacttgtggaagagatcaagataaccaaaagaaagaaaatagaagaggaatgaggatagaagccaggaaaatggcttaaaaaaaagagaaagttgctgggaaggagtcagagaaggaacagttggggatgcaggcagtgagtttgtttataataaaggtcaagggaagaaagaatgtcaaaaaggaatatgaatcaatagttttaaatgctgtaaaacaaatagaaaacgagcactgagaagagctgttggaatcagcagctggaatttaggatgatgtgaaagagccaattgagtggagtggtagggaggagtgagtttgttatggagaagtgaaggtgatgataagtagactattcttttgagatatttggcagtgaaagggctgaacatgatggaacgatggtacaagggagaatagggtcatggatcgagggaagggccttcaggctagggaagaaggcagaatatgataaacgagtaattttgctagcaaatgttataagaactcaaagaagaacaaaattattttgtaggggcagtgagattgcaaaccataacactgcaatagtagagctagaaattaccctgagatagtggccaataccctcattgtaaccttggtcaacttaagacccagagaggtggcatgatttccccaaggtcacatagcaagttagtggcagacctgagaggagtagaatccagatttcccaactctcagattgttcttttttccaccacaaatctgacttggagcacaccactgagggtctgcacctatttacccctcatctgatagctggtccagtgggccctttcttggtcctcttcccatatctacgatggcaaaagtgatgaggatactgtagtattccagattttaactaggttgatggcagcagacacataaaggagagatagagaggaggatatacctttccatatttcaaaaaatattctctggtgacttgcccaaggtctcacagctaggaagctcttcagaaacccaattgccagcatggggcagcctgtgttactgctgcaggatgctatcattgtaatattagagtaaaggagtgatatctgtgttcagagcccttatagcatcaagaagggtgagaagggtggcagtactcgaatctgggacttaaagactcggccaaacgttgaacctgaaccagaataatcaatttcccgaagaaaagggcacttgccaggaagcaagatggcgggaacggctacggtcaaagtgtcgcgataggagctttcgccgaggatcaggtgacgagagtttgagccaggaccgggagggcgggggtagaaacccgggttgaggcaggaggcggctagaccggtggcggcggcatctggagtagcactgagatcttccggtggcgggaactgcagtcatggatcatattacggtacccaaggtaaggagaagagttaagcgaggctgacagccgcgagcttcctcttggtgctcacctgggagcccagacacacctcctcagccttctcagccttctttgacgcgtctt

SEQ ID NO: 43963 - DNA, 2300 bp, Homo sapien
cttgtatgagctactgtactgatgattccttcacaaggaaggaggttggcagtgctgaccagtaaggtcttttcaaacccttatcacccataaccatgaagaatatatttttaaaatttactttcaaaggaactaagtttatatttctggaaaactcatttctgtggcaatactcattttctgatgttgtcagacctaggatcataaaggaaatatgaatgaggtttggacagtaagcaattgggattttctgtgttagagatcgcagaattctagatctcataaagtgttgacagtttggctgccagctaaccaatgatacagggccagttaaatgaggaagatatttgccagaagggctaagaatataagccagtggatctcaaacttgagcatgcatcaaagccactttgagagcctaagacacatattgctagactccacccctgattttctgattttgtatgtctgaggtgaacctaagaatatgcatttctgagttcccaggtgatgctgatgctgctgatcccttggccacattttgagaatcactgatctaggagaaaagactgctggcctgggaggcggaagccctaagtctttatgcaggatttgatactaagaagtatttccccaggaaagtccctttttctctttgagcctcagttttctataaaatgggagtaaggtggactaaatgagctctgaaggacattccagctctaagatactatatttgaacaataccatttatttagcagtaaatattaatttagcccatttactgagtgctttatatgaatcctatcattacatcttcaccaagattgcatgagttaagcactagaatatcaccattataccgatgaagaaactgagacttgaccagagttacatggagagggcatgggagatcaaggacttgaatatagactgaacaagttctggagcttgtgctattattcactcagctatagatcctctctgagaaccttaggatcttttctctgtgcctatcccactctatgttccagatggaaaacactatcaaacaatctgagaatgacctaaacaagctgctagagtctacaaggaggctgcatgatgagtataagccactgaaagaacatgtggatgccctgcgcatgactctgggcctgcagaggctccctgacttgtgtgaagaagaggagaagctttccttggagtaagctacctgcccccagtccctacaacataccctccctccgacccacatacatacttacatacctacacacacacgggcaggtatacatacacaaagcctagcctgaaagtcagagtgcctagttttagtcccaggcctttcagtggcttactcactgtgtgatcttgggcaagtctctgtgccagcttgttaaaacagaaggaggattattaaactggatgaattactagatgaattagaacaactactaggtggctttttaaattctttgtgtgatattgacaatacaagactatgtctataactcttaagagatcatttcccaagtcagggtctagaaggcgatatctagaaacctctaaaaacaaaaaagactgagctttcctggtcttcaggaagtggcctgggacttacttcatctcctggctcagagttaagaactaggcttgccttgcagagagacagaatttgacctggtagaggaaatcatttcctaaaggtagagcaaggtgtctgtggagtttgtgagcttcctactcttagagatatgtcaccagaggccttaggacacttaataggaatactcaaaagagcatgagatagcagataggactgaataccctttaaggatcttgctagccctaagatttcttggtcttcttggcctatcagagctaaggacaaagaggattacccttctcatcagacattgggcctagtacccagggacaatagccttgtgcttgggaaggtgtggggaccttctagaatgagccacagctcaacccttggttgtatggcatggagtctttaagaggagcaaggttctcattgctttcagaatgatctagccagtgtctctcatctccaaagttactttgagaagcagaaagcagaatggcagacagaacctcaggagccccccatccctgagtccctggccgctgcagccgctgccgcccaacagctccaagtggctaggaagcaggatactcggcagacggccaccttcaggcagcagcccccacctatgaaggtaagtgagctgggtaatggttgtggaggaagcaaagtatcctcccatggaagg

SEQ ID NO: 43964 - DNA, 2300 bp, Homo sapien
atctgagtcagttttcttccttctaaaaggggatgaatctacttgcccccttcatagtggttgtgaggatgaaatgatagattgtacatatcagactcagcacagtagccagtacatgtcaggcacttaacgcaggcttgttgcttacctcctccccttacgggacagagctggggccagttcttggctctggatccacaggctttgtgactaaccaactcaatgttctttaaataccaactagtggctgtacaagatagcaaccttcaagacaataggaaaatgtagacaccagggagaattttatggttaagaaagttattacatcttggatccaaagaagagaagggctttaatttcttccctggagaatgcttaaaatcactgtggacatccagaatgacatgagattcatgttccacaaacttctcaagctcctacaaaataccaagccctgtattcagcatgatcatgggaatgatctcatagaggcctcccaacaagcctctgaggtgggctcactaggtacatttttcagatgaggaaactgaagctcaataaaagaaagcacaaactcagagagagttctgactcacttttagttgggagtgagtcaccatcttccttttgcccaacgtccagctctctaggcctgtttgtgcacgctgagtaactgcctcttacctggtctcatgtcctctaatcattctccactttgcttccagagtccctctctaaaatattcctccatccttatcactaccgtgctttgaaacataaaataattaaacattacttggtgcagaataagcacttaaaaaatgtttattagggccaggcgcagtggctcatgcctgtaatcccagcacttttgggaggctgaggcgggtggattgcttgagctcaggagttcaagaccagtctggccaacatgatgaaactccatctctactaagaaatacaaaaattagccgggcatggtgggtgggcgcctgtaatcccagttactcgggaggctgaggcagtagaattgcttgaacccaggagaaggaggttgcagtgggccgagatctgtgccattacacgccagcttgggcgacagagtgagactgtctcataaataaataaattaattaatttaaaagtttattagataaatgtctgcctacaggattaagtccaaaccctttagtctgacatttaacgtatttcatagtctggttcctacctgccttttctaaatactacatctcccatttcttttttccacctctacacctcatataagaaacctatatttcaggcactctgaaccactcatcctttcctttctctctctattgtatcctcacctggagagcccattctcctctatggtctgacaaattcttagtcactcttgagacctatttacatcttctctgcacaggttacaccttatctattcctgtattttgacaccacactgtactgtaattaataggtaaattttcagcctcttctgttcctcaaaggcaaggatttgcttttatttatctgccttgcccggtgactcctacagtacttcttccattgactggcaaagtccgagcttaagtaattgtttgttgaatgggtaagtagctggaagtacttacccactctcctttcccccagcttttgcagcatctccctcctcccatcctcctcttccccacccccgccccaccctaaattgaatgccaaagttactggtccccaggcagcagctagcacattcaacgtctccaaagctactttccctgcagggtttctttccatccccaaggcgtaattagcgactaccgctaatcttttgcgggtgggtaggtgcgagggcccccgaagggagcgaatgggtatgtctctcatctctccaattgccttcaggaatatttttttctccattttcccacacacgggccagacgaatatccccattcctttgcactcttcacaacctttgacataattatctataacaaattgatttaaagtgcggctgcaggaagggaaacaggcatgtctcgcttggccttctgggagttgtagtcctacaggcccccgggcttcctggctggccctgaagctccggactacagctcccaggcctctccaagcccctaccgcacaggctcatagccccaagcccggaggaggtggctacattgtgtctattgtatcccttggctggtgtatttgtacatctctcgggacgtgaaattgacagtgaaaagtatggcagatgagcaagaaatcatgtgcaaattggaaagcattaa

SEQ ID NO: 43965 - DNA, 2300 bp, Homo sapien
gttctctaagtatgtgaaggtgaagagcaagtattcatatgatacactattatttcaaataattcagacttaaattcatcaaaagcttttccaaaacaaaaaaaaaattacctttggaatctagcaactagaagcatgtcagcttgctaatgcacaaaacaaacaatactctctgaggttattttgcagtggtactagaattatattgtgctttaatttaaactatacccccaaagaacctcaaacaacatgaaagctcccaaagcaaagcattttaccccaaactaacaaagtttgcggtcttgacagattcacccaataaatttaatcataaatggcatctatatatcctttttaaaaatctttagctcaaaagcatttacaaaaaaaagaaaatttagcttttccattattacgcttctctctcgccacgtcttatcagataaacgaaacctgaaatggcttaaaaaccaatagggagggaaaagaacccatcttttgtctgctcacagaactatcttacaatcaaaattactaatctaaattcagtatgcttttgataggtgtcatctgtggactgtaagttttttcaaccacttacttttaagaaaacaacctcattcatcaaagataatgttgctaattttcaaaaaagcacctcacaactttagaacctcatctaatcaccttgtccagaatatcacttccggtgcctcatgccaatgttttctggaaccgactatcttcaactgcaggctacctcaggaagaacagatatatcacaacccatcctcgcttttattggggatattttaggtttcatcatcgtatttataataaaaaagaagtatgccattctggatgaaaagtagtttgtaaaaccagtttcccctattatgaatcagccattctgcctacttctcaagtttgatagcactttagaagtcaaatggagtgtgtgtttgttttattatttttattatttaatataagtactatcttcctaacgtacatgtcaggagtcagaagccaggcacaaggctttcgggaggtcttagcacacgagtagcaacaacactgaaaagtaaggggccactccagctatgtgttcaaaccttgaggcatggagcgacagcagcccggggaatgggctcctgagaagcccgcggtcaggctgagcctcctgagagagcgagagccagagccagagcgaggggaaaggggcgagcacggcactgggagagtctgtccacgaatcaggaatcaggctgcgtgactgtacgtagaattatcagcatctatggcatctaagaagcaaagccaggccttaagcacccaccccgcattcctggacgccagggttgagaccaaaaagtggtggctatgagaaggaaaactacctcgaagggaatagagagccgcgagcagatgtgggagaggcgtcagaagcttctgcaggagaaagcagcgattcgctcgcctcctggggccacggaggccggaaaggcgcactagaaccgagcgagtgcggtgccactactcacccctactctcctatggtccccgtcgtcgccctgctcgacgcagcccctgcaggggggagcccctcccccgcccgccgcagggggtgggctcggcgggcgagagaaggcggcggcgcaggtgtccaacagccggggccagagaggagctgggtgcaagggagacagcttggtgccttgcgctccgtggcgccgccaacttcaccaccatcgacgtggagggacgaggggaggcgatggggggaaggcgctcgcccagcggcccggaccctcctggggtactaggcctgagcctctggagggaccgccgttaccagtcccctcagcgatgcgacccccaggcctgattccagtccctgggcccccctggccacagagcagcggcggctccctcttggggccgcggtcgcagctgcatcctcctgctcctcctcctctggcgcctctgcctacacacacagccccggcgcggttatcgccgcggcgcccggccgccgttgcctagcaactgtgcgcatgcgccccacccctgtcggcgactgctgccaccgctggcgccgctgtcggagctcagaccagcaggcctacgacctagaaagtgctcaaaaccccacttcctaaggcctagaaggagcgacgtgaaggtaagcgtgggtgaggagaggtccaggatgctctgcaattcgataggcccgaggacttgggatacgaccgtctcccagcccctcgacaggcacctctgcggttaagagtgacagt

SEQ ID NO: 43966 - DNA, 2300 bp, Homo sapien
tttgctgttgcatgtctacataagcatggtgaaattattcacaccaatgacaatttggacagaactaaatatttgatagtatgaaataaacattctatggtccactagctaagagtagtcgagcttatcttttacaggtacctcccatttgccaagaaaatatacatttaatcttataaacagttggttttaagtgactttgaagctttgaataaatccaggggaaatatttcaatgtcctgtgtacactagaaattatttcgaagaaaataaattgtaagtcagatagtaaatgtggaacttataaggaaattggtgtctatgtgttgactaattcactaagggaaatttttaaagtcgcaagtggtaatgtaatcattccaggagtcattatatgctgcctgaatgtcgtttctgagatgttgattacgtttggctctgtttccaaatgtgattcctaaagtaagcatgcagttatgcatagcattcttcaaaccattagaggtttttcttgtttgtagaaacagaattgaggcagggtgtggtggctcacgcctgtaatcccagcactttgggaagccgaggagggtggatcacctgaggtaaggagttcgagaccagcctggccaacatggtgaaacctcatctctactaaaaatacagaattagccgggcatggtgaaacatgcctgtaatcccagctacttgggaggctgaggcaggagaattgcttgaacccaggaggtggaggttgcagcgagctgagctcatgccactgcactccagcctgggcaacagagcaagactctgtcttaaaaaaacaaaccaaaaaaaaacaaaaaaaattgtccctaattctcttctgtaattaatattctttttattatgttctggtttctcttgcaagttgagttgattttatccttttctccttttgtttatcaattacaatttaaaaagtggcttcagacacattcaggaaagtgcacacacaccctttcttatctgaaacacacctctctgttaacccttacagcctgcttcagttgtctgaagcaattttaatggttttctagtctccctagtagatggggttcctgatattttgtaaagagtaagagtaacgctggagagcatgtgcttttctttctttctttcttttttgagacggagtctcactctgtcacccaggctggagtgcagtggcgcgatcttggctcactgcaagctccacctcccaggttcacgccattctcctgcctcagcctcccgagtagctgggactataggcgtccgtcaccatgcccagctaaatttttgtatttttagtagagacggggtttcaccatgttagccaggatggtctcgatctcctgaccttgtgatccgcccgcctcggcctcccaaagtgctgggattacaggcatgagccactgtgcccggcccgcatgtgcttttcaggagtggattttagccttagcaagaaggatatggtgtgggatctggaaacacttcctggcagaaaggaagaaagagagtctttccatggaaatatatgtatgtatatatacatattcttgcaccttgttgaaatgtgatgtttcttgttctccaaattgttgtgataagcagataactttagctgttattttgtgtccatgtcgcagggtggggtacgggggcgacaggagcgggtggggggcgggaattacagcattattaccaccactgaaatttttatgtctagaattattatagaattagggactctttatctttaatgtaagttgagtgtaatcattgtaagaagaaaaaccaaatgccaaaaatcctgtagtttcttaagaagaaacctctgtattctaaaatgcttttcctaaagtttactaaatatgatgtggtatgtgtgtttatttgtagggactgataacatctgaacataccaaaccacacagtcaaactcttgcaccatcgctaccacgacattttactacaaaagaatgccactgcatgtggattccaagcaggctaaaaagaaaaagaactgattagacctcagacgacccactaaacgggatgacggccacagctgaggtagagacaccaaaaatggagaagagtgcctccaaggaagagaagcagcagcctaagcaggacagcacagagcagggcaatgctgattctgaagagtggatgagctctgagagtgaccctgaacagataagccttaagagtagcgacaacagcaagagctgccaacctagggatggtcagttgaagaaaaaggagatgcactccaa

SEQ ID NO: 43967 - DNA, 2300 bp, Homo sapien
ctcagtccccatctcaactctaaagtgatcttcctcctctgttccctatctcacttggtggcggcaccatctaccctgtcctgttgactctcgaatacttcccaaatctgaggttttgtgttgccgtgtctacttcccttagtgtctccttccctctatcagactaagcttttcaagggcaaggactctacatcagctgtccgtgccctagcacaccacacaagtctaggcaccaaacaggcctcagtaaatgtcgttgaattgaaccgtgctctgctctctcattcccagcagtgctgtccttggtgggagctgacccagtgcctggggaatgaatgaagtgggagtctggatgccaagaccctcttagtccctgatccccctattgagtccaaaagtctttctttaaccctgatggcatttgggacacagaggtatttgtaaggttttaaaagtggctttgtagacaaagtcagtcaaggcaagacttccaggagttggaactgaacagccacattgccagatgtgtgctccagactagaagtgatgtggatgggtgggcaattgggaggagaaccaaaagggcctggatgagtcagagtttcaagaggaggcatttgaacaattcaagcaggagaaagaataaagcaagtttcaaagtccagaaggaacatggcatgtgtatataatgggagggagggagtgacaagagcagcatggagaggtttggataggtggccttcaaggtactttccaatcctaagtgcctgcagagtggaagctgctggtctcggagaagtctggaccacagagatcttctcccaacccaagcataccagagggatgcgacacatgccggcagtaacagcggctcacttgggtacgatttcttgtgcacagatcctgcctttcccagataagcagtgaatctagtcctaatcaccccgttacacagagtggagaacagagggggtttgcccaggtattatgctgcaagtcagagctggggccagaatccagatagcctgtccttagtcccatgctcttctgtaatactccactagattgtattattgcagaaagcatctgttaaacacagaacttggcttttgttttccccagagaaaaaataaaagatactattggaaattaagtgtcaggcatggtgctgtgtttttttgtagaggttaacttcatttactttgacacagcagtcttgggaggtggaagtattatatattataccctatttgacagataagacattgaggctctaaggagtgatgggacttatctaatagctacacatttgttgatggtgggacagggatcttggcccaggtggtgtgagcccaaagtctaccttcatcccatcagcctgaatctgtgaccttctcagtcctgagctatgaccagacatactcgaggaagggggtgtattttaagattcgcatcacccccgcaccttagtggtcagactaatggttcgagatagcaggtgggtaatcataaacagggctgataaggcattttgccagtatcaagtgtctgggaatatttattattaatcacactaatggaccaccatgagaggacaaagtttctctctggcttttcatctgattagagctggaagcttttcaagcactttctccagccagccaatatcaatttaatttgagccactatcgtcttggaatatgaaattgcctccatagacaggatctccagtgaagtcatcagccccccagccctgcccccactgaccagtcaccctgcatatgtgaccagtctgcatgtgcccagagagaaaacagcctgctgagctcatggcccgtctgtgaaccatccgcatccatctgtgactgggtgcctgttaggtgccaggctctatgagaggctctgtgaggggtgctcaccctcctctcccctcgagctccccttcccagcagctctgtatctgttggtggttttgctgttggcgccgtcttttgtgtgcacagtgtcatcatctttaactctgcctgacccctgccatcagtcaccaagccctgctctctgtctgtctgtgtgtccttcacagcttcactccctcccatctccactgccagtgccccaggtcagccctccccgactctggcctcaactgtcggaacaggctcctccctggtctccctgcctccaggctgcctgtccaggccagcctccacatggtcacttggtgatcttcagaaacatagccttcatgtgtactcagaattggcaggtgaaccctcacacacacaccaatgcacacactt

SEQ ID NO: 43968 - DNA, 2300 bp, Homo sapien
tcccgtgttaaaggtttaggtttgcccaagagggccccacggcagcagtggacaaatctcccttttccttttcttctcagagccaactaaactgggctggggcaaagtgccctgaattctttgagcagttgggaggtataggtggggagtctggggggatggggagggacagagccaaactttctgaggtgaaatgttgggtggggggctcactgcttccttctccttagatcctctcttctctctcaggacggaatgctcgccgattttctgcaggccagtgggaagcaagaaggggctggaggctgttcaactgctccgcctcccttgactggccccggatggttgagtcctgcttgggctcaccttgctgggccagcccccaactccttcggatgtaagtctcttgaattccatccggtaagagggtgaggcccttcaagcctcagggccacactgccctagaatgactgagttagaagggccctttggggacagtctagcccagtctcactcccactgacagatgggacaactgagtccagagaggggaggggtagggttttcttacctaagatcatacagcttaagacctgactgaactgagtccagtgtgggaatggataagacaatccccctagagtgcttagcacagtggcctgcacagagtaagtgcacaataaatggtagctgctgtttattattgaacccaggtcttctgactccaagcccagtgctgtttcctctattatctttccaaagtatacctctgatagttgcttagcaaccttcagttgctccctattgccttcctgttaagtctaggcttcttagcctgacattcaaagatctttctgattctggcccaacttaccatggtagccatacctcctgtgagtctcctttaccctatccaccctgggttctatggtcaaactgaatattgcactggtaaatacctgtggttgtctccctttccttttctctgtcatttcctgaccctgagccacttccctcataatcatggaagcctttagcgcctgattcccttcttgctttcttgagcaatatctgtttcatttggatgactcatctgacactctacagctcctcaactccagtgactttcattctccactacactcagcaacccatttccatcattcggagctattccacctctgaaagctcacatcccagcatcccactcggtgaccaccacttctcgtccttctagttctcacccttgcatcccatgacatctgctctttgcctgcatccagatctccatccctccatttcctgcatcccttgaccttgcttcctctctatcctgtctgtggttgctcagttcggccactcatcatcagcaccttcagctttgcccatcctttggccatatctgacttgcaaacccctgagctggaattgatcctccccattctgcttcccctgctcctcagcccgggtagctgagctctgctggagaaaaccacatagccctgcggattgctgccactgcagaggtatgatttttaatctcgggcgaggcctcagttctgcttgtctgaacttttacttgttttctgaccactttctctcccatttcctcactattctaaacccttaccgctcacctcaagcccctccccctctcccatttcaccctagcttcctcgagcacatggaggcatccggcagggccccctcgacctgaggtccagccctcgtgaactgatctgcggctgcactcaaccttctcgccagtctcaggatgaggtggccttgccccacctcaaagcctgctcctccacctgtgctctggagccacctctgccagcatcgctggggcctcaccccagcctctaccttgctctgctggctcttgctcttcaacctaggaacgtgcctgagcttttctcatcttaaacaaaacaacaataacagcaacacaagcaaaatctcctttgaccctgcatccctctgttgggttatcatcagcttatcattcccacccttcccatcaaaacatctcaaaagagtagtctacactcaacactctccatttcctcactaccctcttactcctcaacctgctgcaatttgacattcacccccagagttgctttgacctcctaattaccaaatcagtgggcccttgtcagtctctgtgtctgctgcattgatgctgtttaccaccccctcctcaaaaaatgcctgtgcttattactagttcctataaagtgctgaaacccaaatctgtctagccctggcccctcccccaagattcagcctcctgt

SEQ ID NO: 43969 - DNA, 2300 bp, Homo sapien
ctcccaggttcaagcaattctcgtgcctcagccacccaagtagctgggattacatttgtatttttggtagagatggggtttcaccatcttggccaggctggtctccaactcctggcctcaagtgatccacctgccctgggctcccaaagtgctgggattacaggcatgagccactgtgcctgacccacttttctgattttcaatacctcctccatagagcagtaaaaaaagaataagaagagctgtttttttttcttggctctgtcactgtgattggaatcttctttcaggacctcagtttctctagttgtaaaatggggcaggaggtggtcaggataattaatctctggctcccttccagctttaataattattttccaatttctgtactcacaccctcccctgtaatcaggtaaatattccggattggattgttgaccttcgccatgagttgacccacaagaaaatgccccatataaatgactgccgcagaggtgagtcctcagaggttatacctatcacagttaagcccaggggcctgggcttggtggcgctgagggtagagggataggcaggagggtctccacctggagtcaaggctgggactagggtgaaagaagtgaggcctcgccttgggcacaacatttaaagtggggagaagtcaaaagttccataatcaagataaataacatattaatgtggaaaaattcatgataaacataatatcaaaactttaagtaaaacgggattagtattactgatttctccttttgtttcagcttccaacatggcttggcatattttgataccttgactacagaggtttttttgcctgcccttaagttgttttttgtttgtttgtttgttttgagacgagtctcaccctgttgcccaggctggagtgcagtggcacgaccttggctcactgcaacctccacctctcgagttcaagtgattttcctgcctcagcctcttgagtagctgggtctataggcacatgctactatgtctgattaactttttttttttttttttttgagacagagtctcactctgtcacccaggctggagtgcagtggcgcaatctcagttcactgcaacctccacctcctgggttcaagtgattctcctgtctccacctcctgagtagctgggattacaggcacgcgcctccatgcctggctaattttttttttttgtatttttagtagcgatggggtttcatcatgttggtcaggctagtctcgaactcctgacctcatgatctgcccgcctcagcctcccaaagtgctaggattacaggcatgagccactgcacctggctgtatttttttagtagagctggggcttcatcatgttgcacaggctggtctcaaactcctgacctcaagtgacccgctcaccttggcctcccaaagtgctgggattataggcgtgaaccacagtgcccggccactccccttaaatgttgtttctcaggtagtgcctcattagtctcacatacctctccatagttgaggtggggaggttgccaggcatgagccatcagcagtgtcatgaacccaagggttccttggacatccaccccatcccgattaagaatcctggatttagcctcactctttgtgatgggaaaacagatctagaaaaggggagacttggccaaggccatgtaactagctaatggggctgattcctacttctgccacttactagccccttaactgtttttggcatctcgtctctaagtccaataataggtttttttttctagaaaaagtgctggtaagcaggataaagcaaagaacagggggataacccagagtgaaagaggctgcttctggatatttgagatttgaaccttggagccaagccttttcctggggccttcctataatacccacaagatgaggctggaggcctgctagctgcctgcctgatcctgtggcactgcctgccttcccccctctaggctgctactttgtcctggattggctccagaagacctattggtgccgccaactggagaacagcctgagagagacctgggagttggaggagttcagggaagggatagaggaagaggatcaagaggaagataagaacattgttgttgatgacatcacagaacagaaaccagagcctcaggatgatgggaaaagtacggagtcagatgtaaaggccgatggagacagcaaaggcagcgaagaggtggattctcattgcaaaaaggccctgagtcataaagagctatatggtaggtgttttggagggcagaaagcggcccatgagcccagaag

SEQ ID NO: 43970 - DNA, 2300 bp, Homo sapien
caggaaactaacgcagtgcttcttcaaaattaccactatttgacacacttcgtccactaattcctaattctcaataggtctcaggccccatttgccacatattagacataatgctcttgttacatgctttggtcatgttttcttagaacacacggaatagagagaacttcagctttatgtggatggaatggggataaataggggtctttgcctgaaaaggactatgcaaaatttttagcctataaaccccaaaatgtgtgtgaatgattgccgcagatctggcagctcctctgactggcctgtatcttgaggagtcatagaaaccactccccagacttctttgccagcacactgtcatgatcctgaaggaaaaagggtatctggtttcaggcagacacctggccaactggttggcatggctacttgggacagagtaactgtcagtcaagaaccataggcaggccgggcacggtggctcatgcctgtaatcctagcactttgggaggcctgggctggtggatcacttgaggtcaggagttccagaccagcctggccaacatggtgaaaccctgtctctactaacaatacaaaaattagccaagcatagtggcaggcgcctgtaatcccagctacttggaaggctgaggcaagagaatcacttgaaccctggaggtagaggttgcagtgagccgagaattgtgccactgcactccagcctgggcgactgggccagacgccatgtcaaaaaaaaaaagaaaaagaaaaaaagaaaaataaaataactataggcagactatatcttaggaaaagttggctggagaaagaagcacatatagaggatgaattgggatttgttgctgtgaagcgtaaaagtgccactcacagcaatgctgttaagatcgttagcaacagttctctctctctctctctcaagtgttacattggaaaataacttctgcaagaaggattgggacatagtcctaaacatatttcagtcaactcgtaaaatcggaggaacttcataataccgcttttctcccagaactccaaaataccaaggaattttgcagaaaaactaagtataccttggtggatgttgaaaccaacatagcagtggaatgttggcagagtaaaattctacaattttctgctatgacagagaacctagagaccagtctacaactctcactgtacagatgggaaaactgagactagtctaagtccacatagttagtggcaaaatttagagtaaaactcaggtctctaggctggtatttatttatttatttatgtatgtatttatttaatttacttttgagacagagtctcgatctgtcacccagggtggagtgcactggtgcgatcttggcttgttgcagcctccgcctcccggattcaagcgattcttgtgcctcagcctcctgagtaactgggattacaggcatgtgcaaccatgcttagctaatttttgtatttttactagagaccgggtttcaccattttggccaggctggtctggaactcctgacctcaagtgatccgcccgcctgggcctcccaatgtgctgggattacaggcgtgagccaccacgcctggccaggctggtactaatttaaaaggcagggcccctggttacctgccacaaaagcagattttttcaacccaactgtaactgtttcgatatgagatatttcctctgtagccctgcttcagtgtccagtgttttactaggttaggtcctgattcacggcaataaaaatatacttaaaatcgcattttcagttcactggatgactacaatcaagctgccacccgccgaggggagcaaaataaaattcctcttgcagtgaagacataccgcttccggtctggtacagaagccggttagcaaccaggaaattggcggaacctagaggctgaactcttgcccctggagggtttgctttgtgaaaagaacacttccggccggtgagtttttaaccccgcatgtcattaggtcggcgcccaattctgacgttccgattggccatgctgacgctggaaggcgggcttgcgtatggggtcacgctctcctattggctgctggtgcggtggcggttcggagtgagggtagcacgctgagctgaaggctgtgcggagcggcgcggcacagagcctgttgttgagctcagtatgtcgtgggaatccggggccgggccaggtctaggttcccaggggatggatctcgtgtggagtgcgtggtacggaaagtgcgttaaagggaaagggtcgttgccactctcggcccacggcatcgtggt

SEQ ID NO: 43971 - DNA, 2300 bp, Homo sapien
attttatcttttgagacacagattcgttctgtcacccgggcaggagtgcagtggcacaatcttggctcactacaactctgcctcccaagttcaagcgattctcttgcctcagcctccctagtagctggggttacaggcgcccaccatcatgcccagctaatttttgtatttttagtagagatggggtttcaccatgttggccaggctggtctcgaactcctgagctcaagcgatccacctgccttggcctcccacagttctcggattacaggcaattttaatttttatttttgcaattgcttttggcatcttggtagaagctttaaagatctgacctatgaggaacaagaagaggtcctgcttcaaggatggaagagtcattccaggaaacctggcaaactgcctctgctgtggctgcatttgcaggactagtcaccagtttgtttccagttagacctcaccagcccgcggcaaataggaaaaggctgaggcattatgggagctggcatcaatctagttaggataataaagcaggtgggatttaggtcagtcttaaggaaagcagaagactgtattctgaagagtgagagatctggtaaccgtaagaggttataacttgtgtttgttcaatagccgatgagtgcccactcaatgccaggagcatggccggagggaggagtatgaaaagtactctaggaaaaaaaaaaaacaaagcaggttatgagaatgcagaggacaggaccctgtcttggaggaaaggcatcaaggaaggctcccacaaagtggtgagacattagagatggatatggaagaagtagttgatatacagttggaggggatagagcagtgtcccgaagaaaagcaccatgcatgaaagagactggcaggtttagggaagcaagaagcaaatgagctggagtggttgaggagaagcacaggtaaggggaagggaaagggggcgggcagagaaagggagctgatgcttctaccctccccactctgaaaatctccaagtgcccaagttcttatttgccattttttgttaagaatccagctccgtagagctgaactcaggggtccctgtatacctttgtgtttgtcaccactcccctccgctctcattctagccatgaagtccactgaggaaaccacccgctgcaccagccttacagcaagtcagtaatgaagagggaagaggagccaggagcctgctcgcatgtcttgaaactctcaattcagctcagccctggctctgagggaggaacgggctgaaaaggaagagttagggaggttgttggattgtggtaggaatttttattcctcatagaaatttctggtctggtgaagggagagaggcatggagactgggccaaggggtgggggctaccttggaatttagattcatctgggtgatccattagcaaactctcattagcaaaataggagactggcccaatcctcagggatgggtcctggaggcaggagtcggggaagggtggaaggaggggctatggcttgtctcaaaggggctggggtatctgccagttctggcacaggccacaggcaagcaggattctctcttgttcctctgcccctccccttctccaatctctatcccctgccttggcatgagggcctctagagaaaagaaaataaaaatgagtgggcagaaacagctggatacagtcaggaacacatctggcctcccggactgtctcctggtccttgttttgcttctccccccatgccccttcctcctctgcaggcttctgataggaggactgtagcatagctgggggaagggtggggaattagagtggggctgggtgatgggggagaaagttgttctaaatattaactggtcttgtgagatgtcttcttggctggagcctgaccacctaacttactgtttttcctccaactgctgcctcctcctttccctctgctgcaggctggaactaagggcggcgggtggcggcgggaggaggaaggaggagaagcaaagttggccagggtcctgctggctgggggccaggactgcctccctaaacaagcaggcgggggcacatatagccctgggttgagttgttgcccttactcatctggccacagcaggaagaagaggcgcccggaaaaccttagctcttggctatctcttccctgagcacaccctggccctggggcctgagatctctccatgcaggggcagccatgagctccgggggcagcagcaaggctggccacaccacccatcagccacctccagccccgccgctcaaccagccatcagtcccttaact

SEQ ID NO: 43972 - DNA, 2300 bp, Homo sapien
aatcgtggacactgttggtctgggaaggcaaaggaagaggatggaatcagactactggttcctgagtgcaaatgcaagaccagcccatatgcaatcctgttaggctcatctattgtcctagggagtatacttcctttctcatccctttataatgtcagagtgggaaaggaccttggaagccccggagtccagtcctttcttgctacagaaatggaaactcaagcccagagagggggagggaattacccaaggccacatagtggtcataggatgagttaatggcagagctatacgtagaagccaggtgtcctgacctctcaagtatcctttccattgtctcaaactggcttaccatctgtggtgccttacctcacaaaggatactcagaccatgccttcacatggttgccagtggagaggaggaaaaaaggactatggccagccactttcaaactaaaactcggacttattttattttactttttttggagacggagtcttgtgctattgcccaggctggagtgcagtggcccaatctgggctcagtgcagcctccgcctcccggaagcgattctcctgcctcatcctcccgagtgcctggaactacgtgccatcacacccggctaatttttttgtttttttttttcgcatttttaatagagatgaggtttcgccatgttgagcaggctggtctcaaactcttgacctcaagtgatctgcaggtcttggcctcccaaagtggtaggattacaggtgtaagccactgcacatggtctcacttactattattattattatttttgagacagagtttcactctgttgccctggctggagtgcactggctcagtcttgactcactgtaacctccgcctcccgggttcaagcgattctccctcctcagcctcccgagtagctcggattacaggcacgtgcccggctaatttttgtaattttagtagagacggggtttcaccatgttggccaggctggtcttgaactcctgacctcaggtgatcagcccgcctcagcctcccaaagtgctgggattacaggagtgagccactatgcccggctctcacttattttttttgtatagatatgggagggggtcttgatatgctccccaggctggtctcgaattcctgggctcaagcaatcctcctgcatcagcctctcaaagtgttaagattacagtcatgagccaccgcactcagcctaaaactcagacttgaccagacgacttcaacagtctagaacactgccatcctgggattctgtgaccttgacaagaaggagaaagggagctggcagacaaaccccaagggtgtggactagggaggtcacatctaacctgagggaattatagccagccccatcaggacatcagaaagtgaatgtactgggagaggggctaaaggatcaggtcactgatttgaggaaggtgaagactgggatttagatgaaggaaagataaatgaggactgagcaaggatgggtaggaaatatgatggggagagtcctacggaagagaatggatgaagtgttttaagaggtgaggcagtttagccaaaagaagagaagtttcctgtggacctgagatcttcaggcctttgaggagctgttagggacaacaggggatctgtgtggcctcagggagcagaactgagatccatggatggaagccatagagaaaaggagttcagacacggcaagaactttctaagagccagagctgtctagagaaggaaaagataggtagtgagctccccatcagtggaaagttgcagtcaggggctgagtaagcatctgtcagggcccagggtctgggccctgagtgggggtggggctggaaggccaggacgtggaaggctaggggctgtgaccagggtgggagaggagccgggtgggtctgggtggggagtggtagctaccctaggtccgcccgggcccagccgggccccccacgtggccgctgtggcctggctgcgccgggcctggccaggcggggctgggcggggcaaggccagcggtcggcggggaggcgggcgcgagggcggggagcggcgcggaagccgggccacataaaggagcgggcggcgcgacaggggcggctctttcctgggtggggtttgtgaagtcgtggcccgttagcaggaagcctaacagtcgccccgacgctagtgagggacccaatctgagtccccggccagccgaatccaagccgtgtgtactgcgtgctcagcactgcccgacagtcctagctaaacttcgccaactccgctgcctttgccgccaccat

SEQ ID NO: 43973 - DNA, 2300 bp, Homo sapien
tgaatcttgtctaggcaccctctataaaagtaagtgatttcaccattctgggttttagacacatttgtaaaatggggatatattgaattcattcattcaacaaatatgtgggctctacaatgaaaaagaaaagtagtgtaagggagtatagagtggtagggagagatacaagagtatgtgcaataatacccacctgaggggttgtaagaaccaagggaaataacccatgcaaggtgcttaattcagtgactggaagagtaaaagattttaaatagcaactatcattatatagttgttattgtatgtatagtatagtttgatttttataaatctgaaaagatacaagcatcaagtataattatgttcatgttacaattagggaagctgaggttcagagagatttgacttgttcaagatctcagaatgaagtagacacagagccaggcttatctccaggtttctgacttctcatccaattcttttactaatcaagagggctactgagcctactgcaagactggaagtctttcccagccttgaagtaatgttgtgcatactccccaggacatttatttatcttcagatccaggaggtcctaataaaatgcaagaggtagcacaaaacacacaatcacctggccaggcagaaatttacatctgtccagtgggctttttagcggggaaggggaggggtgtgtgtgtgtgtatgtgtgtgcgtgtgtgtgtgtgtgtgtgtgtgtgtgtctgtgcggtggtggtggtgtagtggtgatagggtgttggttgaaaaatatcaaaggagggttctgtgaagttcagggtttcctgagtgaggacccggtgggaaaaaatggctgaaatttccagtgagatggaatgagtgcagtactcaaaaaacaaggaacaaccagccaagggggattgggccctagaggcagaggtgattgatagaattccatgtaataatgtgtcctgaaatgctggaatgtctccttagcccgtgcacagctccaaatcatctgcatgcagccaccccttggcaagtatgtttctttatattcccactccccatctctgcacaaactcctccctcccctgaccaagtcctttcctatccctccaatcaaagagtaaactaagcttagctgttacttacagtgcagtatgaatttttgggatgtatttgtgcttttgaaagtgcttattgtttcaaagcttagtagacaaagcgcagtgccaaacctagttagactgctgatgaaattacagtcactctggggcctgtgaagaggagcaatttctggagcagttgagctttgctaggaggcataatattactctcttgtaggtcaagggcctgtaccaattggaagtcaatgaaaaattcaacctaatacagcataccactaatgggctgctgcactggaggctaggcttaaatttcccttaaaagaagtaaaaaataaattccttatgaaaaagcatggagaacattaatgaaaatgaattctcccttaccatcagagaggtggagccattgtagaaagtgattcaaagagcttccccaatatgagatatgaggcatattcacccataacagccttatccattggcttgtcaattattcaagctttgatgtgtagaaagccctttaatacactaaactcttgtactcttaagcccaaaagcaccccgggcccaacaccctgtccagttgcataggctgcacaggcaagggttaacagtacaactaatgaaaattgggtaggtcagcaaagttgatctcttctccctgggctcaccacaaaggaaaacaccgccatactggagtgggaagactcatcccaaaggtcgcccccacaacctctgaatcttgtggaggagactcaaaataaatacagcctaggagatcaaagaccagaaagccccattggctccaaggaaagtcaagtcaataccctagcagggggaagaattgcttcactcatcctggaacctccaaccccaaggaggtgggggaaggggggcaccccacatgacctgtactgaaatagggaaggaaggggaatgtgtgatgggactaggagtttgagtgagagatatagggaaggaagggaagtaagcagtcacagacgctggcggccaccagaagtttgagcctctttggtagcaggaggctggaagaaaggacagaagtagctctggctgtgatggggatcttactgggcctgctactcctggggcacctaacagtggacacttatggtaaggcagaaaggggggcctggctgccattgctgg

SEQ ID NO: 43974 - DNA, 2300 bp, Homo sapien
tttttaagaaactgctaagggcaagctcatcagaggatcctgaggtaaaggggttagactgtctgtgccaaggcactgcccatggcttttaattttctcctggtacctgatactgtcacaaaatttaactgtggaaaatataggaaggaaaacaacatttactgggggtctgaacatgctgagcactgtgctaagggttcacacaaatgccagctgatttaatcctcacaatatttcagtcatggaagtgttattattcctgttctgcagatgagggaccagaggctcgaaaaagttaagtgatttgcccgaggtcacatagctcagaaaaaggcagccaagatacaatccttagtctttctgactccaaatgccatgcttctcaccctagaccatgttgactctaatgtgaaggtccctggggtcctctcctctttgtagccaccccagggccatgtgttattgatggcccatagatgagtaacctggaaatattggttgaatgaataaacgaaaagatgttctagtgacagagtttaacacatgaaggacccttaaggatattctggtcttacggttttccaatctgtttttagtgtcctagacatttcttactggtgctccagacacaatcacattgtctaggaaaccagtcatacccagtggacaggttcctctgtctcttcacccttgcccatttctatctccttccctgccttacctagaacaaatcactttcatcttccataagtagtgggtgtttactaagattctgtttggggaaagggttctgctgccaaaattaattttgagaaacccaaatctagaccacctttttcatgttataggtgaagaaactgagtgatagaaaggcaaaaagacttgtccagggtcactgtgtgctctttagtagcataactagaatgtgaagccaggattcttgaaacattcttcttttttgacacaagttaatacagtttgtgtcctaacgaggaaataattatttagatttcaacaattatttagaattgaaaaattaaaaattataactctaatttttgcctttactatgttccagttattgtgctaaatagttaatacgtatagccttatttaagttcttataacagtcttataaaataggtaatattattatctccatttgaaaactgaggtttagggggattaaattactttaatcatagaatcaggaaatggcagagttgggatttcagttcagaatatctgatttcagttttcatgctcttaacagtgatgccatattgcaaatgtctatattgaaaaaaaagtctatttagcctgctgcttgttttgtaaattaatttttattggcacaatgatataccttgagagctacaaagacaaatttgtgtagttatggcaaacagaaactgtatgctctggaaataaatgatttagtagctagccctttatagaaaaaatctgccaacctctggtctgtagacaccaactttaaaatgtttttcaagtgacctccaggagaaggaaccagaaatgtaccccggatttgcagaaaaggtgggtgctgtttgtactctcagtgaaattggtgaatgaataatacaaacctggaaacctggcctacctggcctcctgcagtcttcactgtgttgattcaagtctattatgacctgttcttgttgtctttcatgagtcagagcagaggccttatcccttcccctccctgtcataaatgccttagagcttggacttggatctcagcttaatcagttttgtctccacttcccctttcttgcttcaaggttcacatgtgtgcgaggcagataattctaggggctgccatggcttggctaagcttcccttgaccactgagcatttctaagggagttgaggctggtggctcctccttccttcctactggtgcttccacctgccttggtctgagttgcagtccatggggcagcgcctaagtgtctgagcacacttaagaatctctagtggtttatgacccagactttgccctaccacctcagtcttctgaatgttctcttccctggaccctgctccagacactttaaattcagaagaggaaaatgtgcccagcctgcctggagaaaagtgtctgctcctagccaagatctcctcatcacaaagtaagaatatcaggtggtggaacccccatcatacctgtccccttcctatacctgggtctgttgggtagatgcagtcctttttagagaggcatagtattctcagacctgtcgccacaaattgctccccactcattctttccctat

SEQ ID NO: 43975 - DNA, 2300 bp, Homo sapien
gccctttatagaaaaaatctgccaacctctggtctgtagacaccaactttaaaatgtttttcaagtgacctccaggagaaggaaccagaaatgtaccccggatttgcagaaaaggtgggtgctgtttgtactctcagtgaaattggtgaatgaataatacaaacctggaaacctggcctacctggcctcctgcagtcttcactgtgttgattcaagtctattatgacctgttcttgttgtctttcatgagtcagagcagaggccttatcccttcccctccctgtcataaatgccttagagcttggacttggatctcagcttaatcagttttgtctccacttcccctttcttgcttcaaggttcacatgtgtgcgaggcagataattctaggggctgccatggcttggctaagcttcccttgaccactgagcatttctaagggagttgaggctggtggctcctccttccttcctactggtgcttccacctgccttggtctgagttgcagtccatggggcagcgcctaagtgtctgagcacacttaagaatctctagtggtttatgacccagactttgccctaccacctcagtcttctgaatgttctcttccctggaccctgctccagacactttaaattcagaagaggaaaatgtgcccagcctgcctggagaaaagtgtctgctcctagccaagatctcctcatcacaaagtaagaatatcaggtggtggaacccccatcatacctgtccccttcctatacctgggtctgttgggtagatgcagtcctttttagagaggcatagtattctcagacctgtcgccacaaattgctccccactcattctttccctatactttgtgtctttgaaacctctttatcttctatgtttaatatctagactatactttcttcatggaattctagatgtgtaaatttacagggctgggagggtccatatctagtttaagaccctcattgtagaaatagaaagaggcccagagaagagaagggagtgggccaaatccacaaaatccacatagctgattactcctagagcaagtggggcgagaaccttggtcacttgactcaggacagtgacttttcactcttctctctttccaccaggaatgggaatgacctttgactttaaacaaatccagactccagttttaccctgaattgttgggggaacattttgttttttttttctttttagtattttcaattcttccatgtcttagtttttagggtgttgacctgtgttaatccaggctatcttctagctatatctggtttcctcaggtggaaaatgttaaatatagttaatataaaatttcactctagaatctgctagaaatgacggaggcaaagttaatgtatatataaaaaaatccaccagtgactggtggccagtaggctttcaataattgtgaagtcccttctacccccttgaaagtactgtgtttctcccctaagcagcacattgtgtgtggtggtttcatggttaaaagtttagacagacccagcaaatctctcttctcttttacttcctaagtgtgtgaccttggacaagttaccttccctctcagagctgaattttcctcagttgtaaaatagagagaattagagtattcatctcacaggataattgtgagacttaaataagagaatgcatgtaaaatggttaacatagggcttagaatgtagaaaaaaagtcctttgttttattgccaattttatttttacttatgactaagcagccatgacctcagaataatagtcagggctgacaattgtgcttcagagcaagaaggggaagaggtggtgagatggaggctctttcaatttctacctcatttcttaaatggagctgttgaaatctacccatgagctttggctggccacactgacagtgttctcctctcagcaaagaccaattagcaagtcctgataacagaagtacaacccacccccttgtaattcctcctgagatcctaaccaggatttgtaaaacacccggatatgggtaaagaaccatcccgggttttgtatcaaaccaggccccagaggaacaggacattccagtagttttgtttctggaaaagagggcacccagcccttccccctccctcatcctcccatcccagtaaaccctgccaaattggaatcctggacttaatttaggagaaaggccctgtaaccaagatactgactgaacatggctggcggactcaggctggggtctgcagtgcagcattaatgggccgctgacatgaatatggagtagttttctctagc

SEQ ID NO: 43976 - DNA, 2300 bp, Homo sapien
gcattaatgttattaattccatgaatgtggcaggtatttttttaacatttattgtaggctcagctgtctactgggtgttctgagaaaatacaaggaagctatagtaatgcagtgtatacatacattctttcctgcatattaggaacctatagtctaattggggatgtaagctttcacgcatgaaaagacaggtaaatgtagaagacaatttcttatgagtttcagtgagtcatgcagacagtactggaggagttcacaggtggaaggggatgcagggaatgagagttatggagaggaactaggagatcaggaaagtctttctgggggagtgaagatttgactggactttaaaaaatgggtaaaagaaggcaggatttctagtagggaatcttagaaacacaaggacacaaagaacatgcatggaccatttgagggatggtgaagaaatcaccccaactggaataaatgtgttgggtagtgggagatgagtctaggaaggtggtttggagttatattttgaaggatcttgttgggtgaagtaaggatccatggacttgctctttggagcaggagagagtaattaaaatattttaagcagcagaatgatgtcatcagattcagtcacttagagagataattttgataatatcaatgtaagaagataccttgaagagggacagatggaaaaaagatgagacaaattagaagcccattgctatcttcggtaaaaaagattaggcctaggatagtggaaatgggaagtccaaaggagagatgtaagaagctttttcttttcttttcttttcttttctttttttttgacagcaatcaatgggaaactctatgccaaccttaggggtcttaccatgtaccaaggagaacgagtggcctggtacatgctggccatgggccaagatgtggatctacacaccatccactttcatgcagagagcttcctctatcgggtgagctggaaaatgggctgagtccctcaaggatgattagaacagtggtttaacagcaattgagaaaaaaggtaacagtgtggaacaggtaacaattagttaaagagcagaggtctagtacatggagcactgagctggaaattctagtctggctgtatatcctagactcaataacttcccgctaggccctagctttcccttctgatgtggaagacaaaaaaggcccatttatcagtaaggagactgaaggaatcaatatcaagtctcagtcaaggacttgagactcaatgagcagtgatttttaagaacaaggaatttcagagtggcatctcagaattgctgaaagtccttaatctattataagaagagcttcaacttagggggtacatggaacaatatgtagattttgaaaacagtttagtcttaggtaaaggaggaagagttgggggcattgatacagacttcgagatttagaagtgctgaaaaagacaatggcaaagataactttatttgaatcaatttctaaaggaaatatatgcctcattcataggggtcaaagcttaagccaaattccccatattttagcctgctgaaaattataaagatacttgttttgaaccttctaaagtaacctagaaattctttttctttgggacattttaagaggagaaagtcacctctgttgatttagcttcggtgggtgggttcattggagatatgaataaagtggactttttttttttttttgagatggagtctcactctgtcatccaggctggagtgcagtggtgtgatctcagttcactgcaagctacggcttctgggttcacaccattcttctgcctcagcctcccgagtagctgggactacaagcgcctgctaccatgcccggcaattttttttattttttttattttttattttttttagtagagacggggtttcatcatgttagccaggatggtcttggtaaagtggacttttaaaaccactcactggtctaggaaccttgaagtctcagctccctaatgtggacatcacaattttttggttcctgaaagctctaagatgatttttatacccttcacttcctctccctcattcccaatctctcttgcagaatggcgagaactaccgggcagatgtggtggatctgttcccagggacttttgaggttgtggagatggtggccagcaaccctgggacatggctgatgcactgccatgtgactgaccatgtccatgctggcatggagaccctcttcactgttttttctcgaacaggtaagtcctaacttccccaaaatgatcatcttctaacactttatctagccta

SEQ ID NO: 43977 - DNA, 2300 bp, Homo sapien
gtggatcacctgaggtcaggagttcgagaccagcctgaccaatatgatgaaaccctgtctatactaaaaatacaaaaatttgctgggcatggtggcatgctcctgtaatcccagctactcgggaggctgaggcaggaaaatcacttgaacccaggaggcagaggttgcagtgagccaagactgtaccattgcactgcaacaagagcaaaactccatcaaggaaggaaggaaggagagagagagagaaagaaaggaggaaaggaaggaaggaaagaaggaaggaaggaagggagggagggagggaaaaaagaggggagagaaagtccctctgctcaatttggcaccaagcctgccttgcctagacagaggtttcaaagccatggttagagagacatgttggggtttaggacacatgatgtttattaggggggtggagctctagaaaccaaatgaaataggatgtctcagaccctcaaatgccagcagcagttgtcatggagattttaaacgcctatgttgggaacttagctcaaaaagagggctacttcttggttcctgccaatgtttttctgttttgtgggcaaaaagggatatgagaaagttgtccagagcagtttcctggccctgttactgtggtgcttaacttcctggtcatgaaggctatgagaatactgaagttttctgttctcaaggagaagagtgcatggcaaggggagggaagcatgcctactgaggccaacaccatgggccagcaatcaaatcagcacagaagacagtatgtttatcttatgcaagcatggatcttgtagcccactttcctttgaatgaaggaatgggaaagaatggcccagttgatgatgaaaaaaaggtgcacttatggaatgccatttagaatgacttaacctgtcgcttttggggaactttgagtggaggagtggtggcctctcaaggtacacatgtacactctcgtctcttctgactaagagtacacatttaggactttggcacttttagaaaccacttgaaattcaccctagtatgaagtcatgagtaagtaaagaacctcatgctacctttctctttgagtaggataagccccatttatgaattactttagccccttcattaaaattcctctttgtagaagacaacctttctgcatacttaactctgtcttattttgtatagctctttagaatggtttgatggaccttagctcctttaaccctcccaagagctatatacaataggtgaagaacattctatccctttttcttagattaagtaaccgaggccagaaaagataaagtgatccatcccagattgtagattgaaagggtaagagccaggcttggtgaacagccatcccacttcaatgctagctctactgctatatgcatctgtattccaagaactattatctgagtaatgtttccctatctgtgcacctttgtgcaccaaaatatgtctacattctgggttattctcccctcccattctgcctaagacagaagctatggcaggtattggtcctcagaggtactgaggccactgttggcaaagagaaacaatgtttcagctttttcagttataaaataaagatgacaatctctataatgcttacctcacatggatgttgtgtagatcaaataataatagatgtgaaagtactttctaaattgttatgatctgttcacacatgagggattgtgattattctttaccccctgggcagaagccaactccttgtcttattactctctttacaaattcagctcctggtatagccactgactgtgaatttgagcaaattgcttggtctctttgcctcagtttcttcatctgtaaaatgttgctaacaataattcttaatatgattgtcttgagaatggaatgagttactacatgcaaagcatttacaagaactcatggcacatggtcagagctacataagcattaactcttttgtgttggcttcctcgtccctactatctcagatctagagaatagattaaggggacccagaagccaagtggcatggaagccactacttatagtcccttcccactagcttgctagttcttgtgttctctacccacagccttcccaccatggattgccaagaaaatgagtactgggaccaatggggacggtgtgtcacctgccaacggtgtggtcctggacaggagctatccaaggtaagttatcctattcagtacacttatttctgttgcatcttaggaaccagcccggcaactgaaagaggccaagattaggggagtcagccctacttatgactg

SEQ ID NO: 43978 - DNA, 2300 bp, Homo sapien
accttctaaacctttgctactaaaactatggtctgtggcccagcaccatcaatatcacctggaagcagttagaaaatcagagtcttagtcccacaccacagctgctaactcagaatctgtgttttaacaagatccttaggtgatttgtgtgcacattaatatgagagaagcacggctctagcgtttcaaggtcatccagtccaacagtctcttcaggatacagatgcagaaaggaaaactaagagagaggaagagatttacatgatgttacacttagttttgtcaagacatctaaattccaagctagggttctttacactaaagtttcaaaactgtctgtaattcagcttctctgggtaggaaaggatggagaaaaagaagaggtcctgttttctaggaaaggacagaacagaattaggaggtacccagggtagctattttcatttgaatctcacagatgatttcagaggtccctaaattgcattcatgtatttatttatatttaataaacacttctataccactacgtcccagaaatcattctaagctccttacgcatatgaacactattttgtatattaactcatataatacctaaaacaatcctatgagtaagggattgttattttccccactttacagaagagaatcctgagccacagagtggttaagtaacttgccttaggtcacaaagctagtaaggggcagacctaggattccaattctggcagttttcccttctactaggcctgagcccacagtagcctattctggtcttaactctagctaggggacagatatgaagttcatttaggactttttctacttcagcttagggcctattcagccctttcccaccaaaggcttttcagctgctttactgagactccaccctgagctggcatatagcctctgcccagtacaggaggggtccctcagagactgataatggctcatttcttggtcctctcccccataccttggctcaagcttttcttttcctctacccattaggctatttcctctttgacctcttttaaaagctcctaatctattgaaaagcatttgctttccttgtcagactcttttttactccttcttcctactggcccccaaacccttccagtctgcacctcatagtttggcccttaattctctgtctctgtccggtctactttatcttcccagctctgcaaactcttcaaggtcagggactagtaacgtttcgggatttatccaccgctgcctctgagatcatggattaataaactcccaaagtgtcattgtttgaagtgcccttagagactacgtagctcaaccccctccttgtacagacactcaggggcccagagaagatggatgatcaaagctgagtgccgaatccaattttcctttatttttagtggtcttttccctgcttcatgtctgctctcttcctcctgtcacaatcctatctacccttctgaatggaggagtatttttttgaggcagatgcagagctggaaagcggcttctccatgtgtctgaaaattttggcttttccaacaataattttccctgtcaaactccaagcctgctaagtcatgaataaactttgatgagctgagctgcattcagctgtgaaagagacaacttgatgctttctctggaccccactccctggccctctactctctggcccccgcttcagtcccaggagatttgcagctcctgccataccagtggctgggtcactgttcttcagcctcacattgttcctctcaaaggcagtttcttttcgtagccacgcctaggcactcaaacagtccaatagctgctctaggaacttcacgggggcggaagaggtaagcttaccgtgaaaggagggtttgggctgttgttgctacacgtggatgtgaaatgagtcaagcggaactttgattacaaggaatttcatatactgtgagtgtgtatgcaggctgggggctgaggggcgggggctgaggggcggggctgatgggcgggtctgaggggcgggggctgaggggcgcggggtgaagggcggggggtgacgggagggggctgggtgagatgtgtgctctgcgctgaggtggatttgtaccggagtcccatttgggagcaagagccatctactcgtccgttaccgggtgagtgtgggaacaccccctggtgtggcaaggcggctgggacctgcggcatctaggtgcagaagtacagaatcaggtcaggatgatcctgctagggtaccgcaaaatcagaacaattgggaaggcgccctgtggctggctgtcagtccatcc

SEQ ID NO: 43979 - DNA, 2300 bp, Homo sapien
ggctctgaggaaataaaaacctggaacctgatggttttacagctgattatttttttagatggagtctcactctgtcaccagtctggagtgcagtggcatgatctccgctcactgcaacttctgcatcccgggttcaaatgattcccctgagtgagcctctcgagtagctgagactacaggtgcatgccaccatgcccagctaatttttgtatttttagtacagatggggtttcatcatgttggccagcatggttttgatctctttacctcatgatcctcccgcctcagccccgcaaagtgctaggattacagatgtgagccaccgtgcctggcctgctgaattttgaaaaacatttaaactaataccaattctactcaaattattctgaaacatagaaaataaaggaacacttccaagctcactctatacagccagtattactgtgataccaaaccagacaaagacacattaaaaaaaaacaaaactataagccaatataactgataggtatagatgcaaaaatcctttagaaaatacaagaaaatctgttttaaaaacatcttaaaaagattattcatcattaccaagtgggatttatccctgggaagcaaggatagttcaacatacacaaataaattaaggtgatacatcttattggaagaataaagggaaaaaatatacgattatttcaactgatgctgaaaagttatttgataaaattcaacattcatttataataaaatccctcaaaaagcagggtatagagggaacttacctcaacataataaaagccatttacgacaggcccagagctagtatcatactgaatggcaaaacaactgaacgccttttttctaagattgagaaaatagcaaggatgcccactttcactactgttattcaatatagtaatggtagacttcacttgtgaattaaacaagataaagaaataaaggacaaataaactgaaaaggaagaagtcaaattattcatgcctgtggatgatataatcttatattgggagaaatttaatgactccaccaaaaaacttttagaacaaataaacaaatttagtaaattttcagaatataaaatcaacatacaataatcagtagcatttttatatgccaacagtgaaaaatctgaaaaagaaaccaaaaataatctcatttacaataggtacatatataaaatatctatgtattaacttaatgaaataaacataagatctctataatgaaaactatgaaatagtgatgcaaaaaattgaagaaagcacggaaaaatggaaagaaattccatgtttatgaatttgaagaactaatattgttaaaatatgcatactactcaaagaagtctaaagattccagcaaactccaacagacctgcagctgagggtcctgactattagaaggaaaactaacaaacagaaaggacatccacaacaaaaacccatctgtatgtcaccattatcaaagaccaaaggtagataaaaccgcaaagatggggaaaaggagcagaaaaaacggaaactctaaaaatcagagcgcctctcctcctctaaagcaacgcagctcctcgccagcaacggaacaaagctggacggagaatgactgacgagttgagagaagaaggcttcagaagatcaaactactgcgagctaaagcaggaagcttgaaccaatagcaaagaagttaaaaacttcgaaaaaaaaatagacgaatggataactagaataaccaatgcagagaagtccttaaaggacttgatagagctgaaaaccatggcactagaactacgtgacgaatgcacaagcctccgtagccaacacgatcaactggaagaaggggtatcagcaatggaagacgaaatgaatgaaagaagtgagaagagaagtttagagaaaaaagaataaaaagaaacgaacaaagcctccaagaaatatgggactatgggaaaagaccaaatctacatctgattggtatacctgaaagtgactgggagaatggaaccaagttggaaaacactctgcaggacattatccaggagaaatatctggattacccaatctaacaagggaggccaacattcaaattcaggaaatacagagaatgccacaaagatactcctcgagaagagcaactccaagacacataattgtcagattcaccaaagttgaaatgaaggaaaacatgttaagggcagccagagagaaaggtcaggttacccataaagggaagcccatcagactaacagctcatctctcagcagaaaccctacaagccagaagagagtgggg

SEQ ID NO: 43980 - DNA, 2300 bp, Homo sapien
tatatatatgatatataatatatatgatatatatgatatataatatatatgatacatgatatatatgatatatgatatatatgatatatatgatatatgatatatatgatatatatgatatatgatatatatgatatataatatatatgagatatgagatatatgagatatatatgatatatatatgatatatatgagttatatatcatatatctctcatatatatgagatatatatgagatatatatcagatatatgagatatatatgagatatatatatgatatatatatggaggcatcagattacctgacttcaaactatactataaggctatagtcaccaaaacagcatggtacttgtataaaaatagacacagagacaaatagaacagaagagacaacccaaaaatgcacccaaacactgacagccaacttgtctttgacaaaggaaacaaaaacataaagtgagtaaatgataccctattcaacgaacagtgcttacataattgggaagccacatgtagaatgaaactggattctcatctctcatcttataccaaaatcaactaaagatagatcagagacttaaatctaagacgtgaaattataagaactctagaagataacattggaaaaacccttatagagattgacttaaataaagccttcatgaccaaaatcccaaaagcaaatgcaacaaaaacaaagataaatagctgagactaaattaatctaaagagtttttgcatggcaaaaggaacagtcagcagagtaaagaatccacagagtgggagaaaattttcacaacttatacaaatgacaaagcactaatatccggcatctacaaggcacacaaagaaattagtaagaaaaaaaacaatcccatcaaaaaataggctaaggacatgaatagacaattctcaaaagaagatatacaaatgaccaacaaacatatgaaagccaagtcaatcctaagccaaaagaacaaagctggaggcgtcatgctacctgacttcaaactatactacaaggttacagtaacaaaaacagcatggtactggtaccaaaacagagttgtagatcaatggaacagaacagagccctcagaaataatgccgcatatctacaactatctgatctttgacaaacctgacaaaaacaagaaatggggaaaggattccctatttaataaatggtgcggggaacactggctagccacatgtagaaagctgaaactggatcccttccttacaccttttacaaaaattaattcaatatggaataaggacttacatgttagacctaataccatgaaaaccctagaagaaaacctaggcaataccattcaggacataggcatgggcaaggacttcatgtctaaaacaccaaaagcaatggcaacaaaagacaaaattgacaaatgggatctaattcaactaaagagcttctgcacagcaaaggaaaccaccatcagagtgaacaggcaacctacagaatgggagaaaatttttgcagtctactcatctgacaaagggctaatatccagaatctacaatgaattccaacaaatttacaagaaaaaaacaaacaaccccatcaaaaagtgggcaaaggatatgaacagacacttctcagaagaagacatttatgcagccaaagaacacatgaaaaatgctcatcatcactggtcatcagagaaatgcaaatcaaaaccacaatgaggtactatctcttagcagttagaatggcaatcattaaaaagtgaggaaacatcaggtgctggagaggatgtggagatataggaacacttttacactgttgttgggactgtaaactagttcaaccattgtggaagtcaatgtggcgattcctcagggatctagaactagaaataccatttgacccagcactctcattactgggtatatacccaaaggattataaaccatgctgctacaaagacacatgcacacatatgtttattgcagcactattcgcaatagcagacttggaaccaacccaaatgtccaacagtgatagactggattaggaaaatgtggcacatatacaccatggaatactatgcagccataaaaaaggatgagttcatgtcctttgtagggacatggatgaagctggaaaccatcattctcagcaaactatcgcaaggacaaaaaaacaaacaccgcatgttctcattcaaaggtgggaattgaacaatgagaacacctggacacaggaaggggaacatcacacaccggggactgttgtggggtggggggagtggggagggatagca

SEQ ID NO: 43981 - DNA, 2300 bp, Homo sapien
tcctgataatgatataattgttgacagcaccatctttaaaaataaaaataacatagtaatccttcagatttgtagaatgctttcctgtttacaagtttgttctatacacattatgtcttttaaatgacacactagccttctgagggtaacttatattggcaacagttttcagatgtggaaactgtgaagacaatgttggtgatgtggaagcaacataaactttggagtctttcagacccaggtttgaatgtcagactgctttttattcagagtaacttcagagcattatttctcaccttaattttttttcaggcctctttgtgtctatgtgtcctcttcactcctgtccattgttcattcagtgatttttgcaccttccttcactgttagtgtgtagacacatagttctcctggctctgagacctatgttaattccattctaccatcctgccagcccactcaattcctattgagcaatgctagttgaaagttgtggtgggattaaatgttgcaatgagtattcaaatgaggttgaagtatctacgcattctacttacatatggtgaggtatattcaaggaaggctgtagccattaaaatctcaggaaataatttttcacctcctcaggtgaaagggtcttcaggcctttgtgttctggaaggttcatttatagccatttcccaaatgacaatgcgattgatgagtctagagtctagctcaaatagcaatggactggaagactagtttaggttttactaatgtggaacatagaacaaattatgtccttgtttcagcctgttcatctgtgaaatagagcctatcatatccagtcttccttgcctttaggtttgagttaccttctttggtcaaggtaagtaaatgcctatgatgtttggctgtgcacaagataaagctacaacaaagctacaacccatcttttctctgtagaagactgcaaaaagcaaaagagacccaggcaaaaatctcggaatgacttttggaacagagagcctccccagaatcagaagtcaaaggaatttaaaacatagggaggcccagggtctctactgacataaaggaaagatgttttccttataggtttacgtttacattttctctctctttccattcccacttgcatctccacctttacacagggcttatgggacctcctccacaaaagagcagttgcagtaacccacatcatcctctacgcctggctgtccatcaagaggcgaaaagcagccctatataggttctatccttggatagttccagttgtaaagtttaaaatatgcgaaggcaacttggaaaagcaagcggctgcatacaaagcaaacgtttacagagctctggacaaaattgagcgcctatgtgtacatggcaagtgtttttagtgtttgtgtgtttacctgcttgtctgggtgattttgcctttgagagtctggatgagaaatgcatggttaaaggcaattccagacaggaagaaaggcagagaagagggtagaaatgacctctgattcttggggctgagggttcctagagcaaatggcacaatgccacgaggcccgatctatccctatgacggaatctaaggtttcagcaagtatctgctggcttggtcatggcttgctcctcagtttgtaggagactctcccactctcccatctgcgcgctcttatcagtcctgaaaagaacccctggcagccaggagcaggtattcctatcgtccttttcctccctccctcgcctccaccctgttggttttttagattgggctttggaaccaaatttggtgagtgctggcctccaggaaatctggagccctggcgcctaaaccttggtttaggaaagcaggagctattcaggaagcaggggtcctccagggctagagctagcctctcctgccctcgcccacgctgcgccagcacttgtttctccaaagccactaggcaggcgttagcgcgcggtgaggggaggggagaaaaggaaaggggaggggagggaaaaggaggtgggaaggcaaggaggccggcccggtgggggcgggacccgactcgcaaactgttgcatttgctctccacctcccagcgccccctccgagatcccggggagccagcttgctgggagagcgggacggtccggagcaagcccagaggcagaggaggcgacagagggaaaaagggccgagctagccgctccagtgctgtacaggagccgaagggacgcaccacgccagccccagcccggctccagcgacagccaacgcctcttgcagcgcggcggcttcgaagccgccg

SEQ ID NO: 43982 - DNA, 2300 bp, Homo sapien
attccacttgctttgaaaacctgccacttaaggctccttccagtcataggttaactctttctggtcaagtattactctttttgagcatttacctgtcagtgacaggtacaatgttagatgttgtctctctgttttcttgtttaatctttactttgatcctaggtagctcttattagttccactttataggtaagaaactgaatttcagagacttgaatgacttgttcaagatcacatagtatagtaacttggtagtttgggacttgaattttgattgttcagttttttgtttgtttgtttcctggcctccctgctgttttcactattccacaccacttcagctttatttttcatagaggccattaaatgtaccctccatcagccaaagcctcttgcctcccttcaacgtaactcttctctagcgtcctcttaataatcttctgaaaaggttttacagcctttctgggtactgggacccagagtcttaatccaggctcttaagtgccttatttaactgtaatatggaaaatcaaagtcacagctaattcaggaaaaatgagtttgggatgtgaatttcctaggcaacttgtcatctcttttttacttccttagcttcataaacttacccacaatgttccctgaggactaagagtaatggagggtgatgaggaaaggctttcctcccttcctttccgagagtcctttagccaaatgccacacctcctcctgtttccctagtctccgtgcagagatggaagtgggagatagacatgggttcctttcagccctgagttcatgccagggttttctttccctctagctggactgaggtaggaggagaggttgaagtccaccaataagaccatgagtgaagaagactaaagtacttgaaagagcagcagacctacgcttaaaatactagggtttgtgtccagactttgtgggttactatctgtataattttgggcaagtcaacagttctgagtcagagttcccttatcagcagattggaagataaattctaattatatagatgaaacattaagtctagaagtaatttgtaaattcagaaagggcttatagatttaaagtgtagccgttttgattaccacaaactaaatcctatacttcagggataaaatcttctcctgttttttctaaaagcctgtgcatgtgtggtgtaaggggtgggttttcccttgtaccagcaacttagcaattgtagtaacggggctgagggcagtggcatgcttcttcattgagcaagtgtgaaaagagggttatgcattcaggggtcagcagatggcaggcagagtagcccctccaaatctccctcccataccacaaagccctcttatttattcaaacttaacattagaagctcatttcaagtaggcacgtctgtgtctgggcgtctattttccttctttgtatatagcaggcatttgtcaacttggtgaaaagcattactcttctttccatttctgaggactaattgtgcttcttcgctagacacgagttcaaaacagtgggttgaaagagggcaagtttatgccaaagaatcagaaatagtcataatttagagagaattctagaggtcagttccctttcgtatggactgggcaactgaaacccagacagggaagggaattagaccaagttcacaagcacaaacactttactggcacattcagattggaaatcgagggcttctgctcccaggtcagaactaaatgccctttctagctagggtgttctttgatctcagtgattttgactctttctactgcactctggggacagtgggttctgcggtaccaactccaattaaagtgggaatatgtaccagcccctccccttggtttttatttttcagaggcctggcagtcagagggattctgatctctatatgcaatattttcacactactgtacttattgaaatcacatttgaatcttggcaattaacaaggcagtaattggcatcaggagggtatgttagtttgcttatctgcgccgtccctcctcttcccaacccactgtgtattgcagaatgttttatcagctctgatttgccaagttgctctcttctccagtaggtgctgcgagcagagagggattcctcggaggtcatctgttccatcttcttgcctatgcaaatgcctgcctgaagctgctggaggctggctttgtaccggactttgtacagggaaccagggaaacgaatgcagagtgctcctgacattgcctgtcactttttcccatgatactctggcttcacaggtgggaggttcttcaatt

SEQ ID NO: 43983 - DNA, 2300 bp, Homo sapien
gctgcagtgggtggatccctctagcccaggagtttgagactagcctagccaacatggtgaaaccccgtctctacaaaaaaatacaaaaattggccaggtgtggtggcatgtgcctgtagtcctagctactcaggaggaggctgaggtgggaggatcacctgagcccagggaggtcgaggctgcagggagccgtgattgagctattgattgcactttagcctgggcaacagggtgagaccctttctcaaacaaaaaaatacataaataaataaaattttaaaaaatgtcaatggcaatttttatagtgatgaaaatatatgtataggctttataaataaaagtatatagcaggtgttcaaaaaatgcttgttaaacgagtgaatgaatgctaaaaggaaacttactagtgtgaaagaccatatacccattgaatgggtaccttcccttagtacctgcatttttcaacccatggtgcatttaaagctcattttggacattttcccataaattaaccttaaagataaaaagagtaagaaacaaaactttcccctgagatgtggctacttatttattttcagagggcgttttctcattgccattctgctatatagtgtagtggtcaagagcactacctctagagccagccaggctgggctcaagttcaagtgctgccatttaactagctgtttgtccttcggcaagtcacttaaactctctttgacccagcttctccatctttaaatgggtataataataaaaccatcctcatagggttgttttgaagattagtgagatgggcgataggttgtgtggtgggtagaataatgtttcctccttcacagatgtccatgtcctgaaacctgtggctacgttatcttatgtggcaaaatgaaatttgcagatgtgattaaggatgatgtgatgggggagattatcctgtggacccagtgtaatcataagggtccttaaggggaggcatgagaatcacagtgatgtagcatgagaaagacttgactggccagtgctagctttaaagacggaggaagggagctatgagccaaaggatgtgagcagcttgagccggaaaaggtaaggaaccagattctacccctagactatctgaaaatgaacacaacccttctaacatcttgatttgatcccagtgaggcccatttctgatttctgccttctggaactgtagattataactttatgctgatttaggacatcaagtttgtggtaatttgtcacagcagcaacaggaccctaattcaggtgggtcagccactattattctatttacaacccccttccgttctggctttcttcacagggcaatctaatgtaaacacttctgcagaattaaagggatctctttgcccacgcacaaactattttttagtttttcgagcctctacctacccttagtctcaagacagctgcctttaaggtaagctgcaagacaatttataacatcctattcttagactttccacttacacatggaaaatcatatgcattatcggcgtctgccacaaaagccatgctctgaggtcctattcaggaaaatattaactctgaattatggcctccctttctttggcagggggcactgagcttcacggagaccctagagtaggaatcaacccttcaggtcgaaggcccaagggaattagagcacttagagcaggagacatgggaaaagaaagaggaaaagaagttggtaggtccgaaggaggctggaaagaggggaaggcaaaagaatacacaacccagccgaatcatgggaattgagagatggcttcctgcaatctagtcttgcgggttcttgctctagtttcggaaacttcccccgcagagtccagcgccgcgcacctgccccttggggccggtccctgcgcaggagcctgcggcaggctgggaatgccgttctgggagagcagcctcccaggcggggtggtggggagactgcagggaggagtcttggggagtgcaaacggaaagactacatctcccaggccgccacgctttccagctggagtcctagggcgctgactgctccccagtttccgtagggaagcgctgggctaccgcggctattgtgcgtcgcgctctcgccctcctcttcccgctgcagtgtctatggagcgaggctacgtttcattgccgccctggcttaacccttccggcgcctaaaaggacggccggccggccggctcccttgcaccaggaagaagtcttagcagccagcgggccctggtcaggaaactctaaggtacaaggaaaacagttgaggaagg

SEQ ID NO: 43984 - DNA, 2300 bp, Homo sapien
acttaaatattaattccacttctaccacttacaaaggttctaagtaactttggacaagtcatgcaagtcctgctgtattgtaaatatccatgatctggcaaacagtaatgactgtaggtgtattaaagaactctgagttagtctggcaattttttgagatacacttgcaactaaaaacatagaataattcctagttttgggagcttgttcctgtgcagccccttccttcacaaccttccttcctgattttctttctacaaagcatattgtctcacacccaaccagtaccctattagttaaatggggagaacaggcattggtagtctgaaataatgcccaactaacctgagcactgcctgcctcaattgtcctatggcccgtcctcttttttttttttttttaagacggagtctcgctctttcgcccaggctggagtgcagtggcgcgatctcggctcactgcaagctccgccttccgggttcatgccattctcctgcctcaccctccgagtagctgggactacaggcgcccgccaccacgcccagctaattttttgtatttttagtagagacggggtttcaccgtgttagccaggatggtctcgatctcctgacctcttgatccgcccgcctcggcctcccaaagtgctgggattacaggcgtgagccaccgcgcccggccggcctgtcctcctcttaacctatcaccaaggctaccttgaaataagtggccaagagggccaatagatgaggttagaaggggtagaagcgaggggcttgtggctagggagaaatagctaattttggaggttggcaaggaaatagcagacgttatcaatggcctcagggaagtgggacgggaggtagtgatctggtaatcatggggtgggaggatgaggtgagaagctcaggctggggttgggacatttgtacatgatattcccttgcaattgcaaaaagatttcatgtctactggcttaaattttaatatcacttccaccagtatttgtgcaagtactaaaattgtgcttggtctgaaggggaattatcgtaaacaaaacaaaacaacaaacaccaaaaaaaaaaaaaaaaaacacctccattcgtttggaattttgtccctccacattccacattcttcctccttaaatttactacttggattgcctatccaaaaatataaaacacttttatttcacagccatcccctgccttgttggttaaatgcttaacaccaccaaagggcacccaggtatcctggatgctgatgctgtcaacaatggctgccctgtctgactacattttagcctggggccaacgtaaactgggaccagaaataccttgaaagcccaaaaggatgagataaggaaaacaggttgggacatgaagattatcttttaagttattgtcacaatagttactctcttttagaccctgaacattttcagtacttgctccaaatggtttagcaacttttgaagtgggattaacaagtttggccaatgaagcttcttccctgcccaccgccagaggtgctggagaaaagtaatcctggagggtcggcgtggaggcagtagagaggtttataaaagtcaaggaagtgggaagaggcttgcgagcagcaggagaggcgcagagtcagaggggcaggggcggcggcggagggagcaggaggttggggcttgagcccgtcattccggcgcacgaaaacttgaagtcgctcggtagccggggaagggaaggaagagaggcaggctctttcctagaggtgccgtgatcgagggtctggcactccaagccaactcctgagaacgggaaatgggcgggagtcggtggggtggagagggcagccgtggtcgcgagagcgaaggagcggtctgagaatccggcttgagtgttaaaggctaagcgtgtctagctggacccgtggccccgaagaagcgagacaaggcgacgcggagctgtccctgacaccccgaggaccgagggacagcgaagggccggggccgccggccattgccaggcgccattaggtgacgcggccgtcacgcgatgacgcgctgaccggcagtggcctccacgtcgcaggttccgcaaagacctgtgggagcgacccgggagaaggagggccaagatggcggaagcggaggagtctccaggagacccggggacagcatcgcccaggcccctggtgagcttgggatctgcgacaaaagggaccgagggtgaggcagagtgccccctaaagaagtcgggggacgggctcgtggcctgagagccggagctccttccgcccggcag

SEQ ID NO: 43985 - DNA, 2300 bp, Homo sapien
tgtcagctagctatgtgactttgggctactaataaccaatgtttgtataatttttcccagtttgcagaaaactttaaaatactttctcttattttaacctcattgcaataattaaaattattttatttttctttttttttttgacaaacaagctcaggttcaaaaaggttgaggatttaaccaagatcacataatcagtggtagacctgagattcaacctcaggtttcctcactacctattttgtacctctagggttcattacacatctcttcccacctggtcactctgggtcgcctcttccatatctgtaaagggagtggttgagggtcctttccaggcttaaccctttatgggtctaaattcactaagtttcttgctgacctctctaattttttaaatttaaattgagcatatattaatttaggtaataatgtagagtactatttcttatgcttttagtaaccatgttaagggatgcagcctaatgccttgatggaggggtttatattagatgtcccgagcatatatattttttttacttttgaaagtttaaccttatagattatgtagtttaaccccacttagttgcagagaaaactggagtcccaggacatcaagtgacatatctagtgacagaattaggatcagtatctgggtctcttgccttccaggctagttaatattctttccatcataccatgctgaagcaacagggattccagacaacaagtgatgagtgctggccattctttgcatctggttgtcacgacttggaatggaatatgcatatcatagaatacaaaagcctgtgcatactgccaagtagcatagcagggcaagaaagacttacagtgtgacttctctatactgtttaataagaagaggttgtgagcttacagttattatttttcttggtaataacaccaagtccaaatattcaaaacagtttatatctgtaaaattcttagacaaagaaaggatatttaagtggttgttcaactactcaattccaaagcaaaaccctttagtaataatctgtatgttttgattttttaaaaatcaacaactaaaaaggtttatagactgtttccatttttatttattatttttattttgttttgaggcagtctcactcagttacccaggctgagttggtggtgtgattacagctcactgcagcctcaacctcccaggctcaagcgattctcccaactcagcctttctagtagctaggactataggcgtgtaccaccatggccaactaattttttattttttgtagagacgggggtttcgtcatgttgcccaggctggtatcgaactcctggcctcaagcgatctgcctgtcgtggcctcccaaagtgctgagattacaggctaagccaccatacctggcctatttccatttttaaatatctcaactgaaatcttaacccaagaactacaaattctgatgtgtctaaaggctagaatagtaacctaaatgcatgtagtagtgatatggtgactgtaagccccttgtacttatgtcagttacacttgattgttgcagtgttggaatgcaggctcaatgttagaaagtctaacagttttttcaagaaaatctagaaattcatattcttatgtgaaataaaatagtgtcaacttaaattcaaaatcatcttaaatattatataagcccaaggcctcattatatatgagccacatttgacccttcagtttataacctctgcttaaaaaaaaggtcttcaataattcatttaaacatttcaacaaggtcaaatggagcaccccttgtagtcctgaggcatttggaatttgcagtaagggagccttgccaaatgcttgtgtcattttccttttagcacaacctacatattacagatcttcaggtgaggtatggcacagcaatctgattcaaagtttgagaacccatgccttaactttgttgccctaagtaaaagattaagcaattcttacgctgtttccttttctcagaatgctgcaaagagactctgcagatagtgaaaaagatggagggccccaatttgcagaggtgtttgtcattgtctggtttggtgcagttaccatcaccctcaactcaaaacttcttggagggaacatgtgagtattattaaaatgcattctttttttcctcttgccaggtagtatatcttagattaaggaatacaggctagctagatttttttttttttttgagacagggtgtcactctgtcacccaggctcgagtgcattggtgtgatcatggcttactgcagcctctatctcccaggctc

SEQ ID NO: 43986 - DNA, 2300 bp, Homo sapien
agctgtagcacccagcgagaggaatgattcttttttgtttgtttgtttgtttgtttgttttttgagactgggtctttctctgtcacccaggctggagtgcagtggcgccatcttggctcactgcaacctctgcctcttgagttcaaacaattatcctgcctcagccacccgagtagctgggattacaggtgcccgccaccacacctggctaatttttgtatttttattagagatggggtttcaccatgttggccaagctggtctcgaactcctgacctctggtgatccgcctgcctttgcctcccaaagtgctggaattacaggcatgagccactgtgcctggtcagaagggtgattcttgatgagtaaaacgatgattaggtttttcttagatggacaagggagggatggcgtttaaaagagctgacaatttcagaagcacagttagctcaaaaagcagagcagcacgaggccgtttaccataggaacaaataaccttacacatctttgtaagccttttcagtacagttcaataacttttccagaaaagggtaaaaaactccttttagaaagatttccatccaaaatggtttagtacttgaaataagtcctcggcctcggctctctgaaaaactatgttgcagaatgcctttatctctgaggatcaccagtataactaaacttttagtgtaattctgtgttctagatgatgccaagctcatgaatgtttagtaaatgttaatagttgtgacaatattactgtattaaacattcctttttgttttgtcttgttttgtttagcctccacagctttccttgctgatagccagcctccaaaccgcagagccctagctgtttatcctgttttcctgttttactttgtcatcagttggatgattctcacctttactcctcagtaaatcaggaatgggaaattaaaaaccagtgaattgaaagcacatctgaaagatgcaattcaccatggagctttgtctctggcccttatttgtctaattttggaggtatttgataactgagtaggtgaggagattaaaagggagccatatagcactgtcaccccttatttgaggaactgatgtttgaaaggctgttcttttctctcttaatgtcatttctttaaaaatacatgtgcatactacacacagtatataatgcctccttaaggcatgatggagtcaccgtggtccatttgggtgacaaccagtgacttgggaagcacatagatacatcttacaagttgaatagagttgataactattttcagttttgagaataccagttcaggtgcagctcttaaacacattgccttatgactattagaatatgcctctcttttcataaataaaaatacatggtctatatccattttcttttatttctctctcttaagcttaaaaaggcaatgagagaggttaggagtgggttcatacacggagaatgagaaaacatgcattaaccaatattcagattttgatcaggggaaattctacacttgttgcaaaaaaaaaaaaaaaaaaagcaaagggcctctaaagaatcagcctctttggtccctttgtgctgtcacctttttgccatgtttaacagcatcttggttggcactctagtcttaatcttgctccttaactttgaatatgcagtctaaaatgtcagtagtcaacatgtaattttcctttgaaattctgaatattccagtgctggaacttatccaaaaagaagacctcagaaacttagattggtagatctctagtgcatattatcatgtgggcaccttctcttagggtggaatgaggcagtctggatgcagcatagttaaaaggagctgtttaatattctctgtagtctggcctcttaactagaaagtaaagctaaatcagaagcctgtatttaaccatgtgaacagggagggatttagtgttctgatggctgattaatagaacagctagatacttagagcatgacgtgggatgggatgagtttacagctgctgccttttcatggtgagcttagcagttttctcattagatgtgtttttttgggttggggaatagcaatttattttattgattttagactttatcaagctaattagctcccctttagataagtacatgttgcacatgtgcacctacttgtaatctcagatatttatgcacacaagtgtgaaggtttttcagggagcagagcatctgggacaggctgattctgagctaaacagggctcctttaaggcaatatgaactgttgccttctataaattgcacattgaggaactctaat

SEQ ID NO: 43987 - DNA, 2300 bp, Homo sapien
atatccttcctggctgatggagaatgagccacaaataacatatattgagaacgtactttatgccagacactatactacatgctttaattcattctgtttaaacctcccaaaggaagtaggtactattattattccccattttacggatgggcacactaaggcagtaacaggcccaaggtcaccagttaaagagtaacagaactagtattgaatccaggcagtcaacttccgagttcatggcttaaaaccacctcaagacaaaactggtgtgagagacccagaattgaaactgaagtctcctggtttcttagcttaatgtggtgtgctgcgcactaatgcctcctgaatgaatgcccaaaggcacggctgacacatctcctcccaggggctggaatggaaagaaggaggtgaactccagagagtgaaagactatgaggccatcctaggagggcaggcagcttttcctgtaatagttgcttcccagttctccatcctcaggtctctggctgcagggcaggagggcatatgctcaaaggagaaaactctctctgggctctgactcctcgtgttattcctcccccacatgcagagggcttccccttataagcctgtgctcagctggacgtgggttggaagccacttaccttggctcttgctgaccatcttcccgacacagcccaacagaactcacatctgagacacccctgaggtcggagctagagagagggtgaggtcagtgattgcagcctccttggtacaaacgaggaaactgagggtcacagagtaagttgtaaacagagctggggggaccctcacagagcctctggacaaacctccggacaaagccactgatgaagaaagtccccgaaggcaggtagaggcttgcttaaagcaacctaggaccttccagggtcccaggacctggctgtttgcctgactagcttgggtctctgaaacagaagtgaggccagggagagttagttattctgggcctcatgatgacatgtgcctccagagacccaagcctggccttttgccatggggtccctgggagccttctggctaccagccatggcaccctgccttctgatgtctggggaggggctgagagagggggagggtcactgcttcttaatggctttctgcccagaaagcctctagaactgcctgctgctgactttctttcctttcagggcatccagagggttcaagtttagatttcaggctaaacttctgggcttagagggtcctgagcatgggactggataaaggagggaagccatcatctcttcagaagatgttcagaaaagggcatacacccagtctatctgagctgggagagagctgctgttatgccctggggcagggggatggatgaaatggcatttgagggctcagattctctttggggcaagacctgacttcctatggactcccaggagcagcaggggagttctgagaggaactgtgattgtccagagtggagtttctttgagacttgccctgtacctaaccccaaacagatttgatacttagagacctctaacccggcatctcattgtacagctgggaaaactgagacccaggaggaaggggcctctccgagatgccacagtgagtcaagagtcctcacttcagagggctggagaataatctactgaggcagggccagggcacctgtctgagaggggcttctaaggctgcaagcttttccccttccgtggactgcattcacaccttgttcggtcctgctggggccggggctctccttccttgccccttttccttggcactctttccacaggccctgtgtggtctgggctctaccgagaggtccccaaggagagctggcgtgtcagtcagccaagaagcaagcaggcaggcaatgccagcatgcaggtggcggggctggcaggggagccggcaggagggccggacacccggagccggggaactgtaatgttcagggaatttcaattggcattgctgtcccgttccagccaactggctaacggtgccgagtttgaatcagtgacccgcctcctggtccctcctccttagccggcctctctccctccctccttttttccctccctcggtggccttccaggaggcgggaggcgcccgctgtcgaggcagctgagccccggcaaccgctgctctccgcctctcccctcgcggggccggctcatggagcgcagggaccgggctggctctcgccgagccccgggcctcttttagcctcgtccccagagagggaggagccggtgcccggcacagccccgccggccctagaagct

SEQ ID NO: 43988 - DNA, 2300 bp, Homo sapien
gcttgggccatttcaaaatgtcacaatgtgcatggcaaatatcatgattgtagcttaccctgacaattgtgttcactgtcattcgacaagcatttttattgaacatctactctatgccaggcactgcgaagttctccttctaagtatttatagcagtgccccattttttggtagttttcatactataccctcctccttttttgtttcctggtttgatggcttttaaaaaaatacagctggtgtctcagaacccatgatatctgattcagttaaatgtatctactaaaagataagttgactttgctcattagtcatatgattgtcatttatttttggttgtgctttgaatatctttcaacatttgttcattcattaacaaacaatagtgaggaaagtactgtaagcactgtgcttggtttcctggagtggatggaattggctttgacaaggtttcttgcccttagggaaatgataaaatcattgcaggaccccactttttgtcctttttagcactgtgcacaggcaagatgcctttggcttcaactcagagccttaaggatgcttacaattgttaaagcccagcctcaggaaggaggtcatatcccttcccacccaccagaaggattttgcttctgggagtaacttctggtgtgcaggcctcatccatagacccacagggacttggcgcaccttgaacaaattgctagaggatacgaggggcagtcctgccatcaagaggaaaagagggatacatgggacacacagtggtggtagtgtcactttatcattgctcctctgactctcatcagggccagcagggaaggaatgtgggagaatttcagtttggcctagtgaactgaaagctagacaggagaggggcacttggggctgggttaggtctggctctgtctttccctgggtgaccttgataaagttgctgccctcagagacagatatttttgctctcatctgtatcagatactctaacaagcaagttagatggatgcagttcctgccttctaggaatggtgtggagaaaataaccagtgtacaggtattgaccctgccatggatttgctgagtaaatcatttgaggccaggagtgtgagaccagcctgggcaacatagcaagacttcagctctacaaaaaatgtaaaaattagctgagcatggtggcacacacctgttatcctagctactcaggaagttgaggcaggagattttcttgaccacaggagttccaggctgggtagctttaagtgagtcatgcttaaagtctgctcagtttctgtctttgtaaatgtgagggatagcagttgaactgcatgaggtcctggatactctcagacctgactaataggagtcctcaattcaacaatgaaatcaaggttgtgaacttgtgttggacccttgtgatgaaaggccagagagaaatcaaagccgaaggctcttgtttcttactgaatttgaatggactttctggtggtgcttactatcagaactcctggaagccctcccctgccacgattaatgttcgtgccccaaattttccatgcatttctctgcggaggtagagttcagacttggggtaggggacagaagcctggggtattggggaagttgcagagccactggggcctgagcaacgtagggatggcagcttcctgctcaaattcctaattatctggttttcccctaccaattggagatttcactgaagttgtgtcttctggacatcccataaattatccgagcaagtcactgaaccctcccgggcacatagcatatgtgtttaaatcccccaaacagtgccggactcattcagaactcaataaatattagcctgtgtgcctggccaagtcactgcttgagcctcagtctttgggcttgcacctcctccctggcagcggtgtgaccggagggaaaggcagcggcgagggccttggaggacctgcaggcagtgccccgcccacccagatttgggtgactttctggcgagtccggtgggccagactgcgcccccattggccgaggggaggtgggcggggcgtccctacagccctactcgccgacgctccctccccacttgagctgagtggactcgggttgacaacggctaagcagccgcggcagctgctcttctggctggcaccgtcacccctgcccgaccccaggccccgcgtgtgtcccggacggagcagtccctcctgggctcgcctcctgcccgctcgctctgtgtcagcgcccgaacccaaaggggtggacgcggcctccaggtaggagtctgggcgacggcaggg

SEQ ID NO: 43989 - DNA, 2300 bp, Homo sapien
ctggctgtggggaggaagaatcaaggctggctctagggttggcagtggtggtcttagatgagaagaactctgggctatggccaggaatatagatgaactttccaggcctggcaacctcttgaaggacagtgagggaagagtcctggccagccccaggctgctgctgtccatgcacgacccagccttaaccaggaatgaaccaaagaagcaaagaagcaaggattggctgggaatttgagccagtatggtacaggggaatggccacaggctttggagacagatgtcccaggagtcaaatcctgctttcaccactgatcagcttggtgatctcagatgagtcacttctctctgagccttactttcccctgtaggtaaaatggggatactgaaactcatttcaaaaggttatgaaaggaaaagcatctaacttggttcttgacaatagtaggcactcagtaagcagcaggctgctttctgtattcaggttttgatgtcctagcatgcactccagggatcccagtctcccagctagactactggtgtgtccctacaccctattcatctcatctctccttccttacaccccaatgcagggtccagctgagagctcagagaccccaaacagctccttctttccctacctacccagagccacttcaccctcaagggctgcccctggaagtgggaagggcccagattttccctattttctcctctatttgggagaaaataaaaagacaaaatctgggctattcccacctctacagccacaaagatcatcagaggatccactgagaaacgcagtagctcagtcacctattaagcgagatgatggacatgaaactgtgtgaatggtggagcactttgggaatgttgctcatctaattatctccataaagaaaaagtggggagaccttgtattcttggcagtccctaagcctaccccaaactcagatatccttctagttctttcccttcctccccatacagggtgacggtttttgccaaggctacgcctgtcccaggtcttgtgctatggcaagctccgggtttatcccaggcgcccgcagtgctatggaagtccagcagggggagacattagcacgtgggtacgtcctctggggtccgaccagcgagagtgggtcggacctggaaggtctgagctatgggatcgagccaagttataagcaaagaggcaaggcggggcgggaagaatgggccagggctgggagacaaagacccagatggcgaggccgggacaggctggagtccggcttctccggtccaggatgcccgcttttgctttttcaaaagtctcatgccctgtgctttttcctctttgccctcgaggtgtctttctttatcgacgtgccctctcatccccgcttgcctatcccgggaccttgcccgcgccttcggacaggacaagactaaatcttggctccagaggtcccacaaggctcccccagaaagctgagattccgaaggcctggtccccaggggcgatgaacacgccttctctccccaccacaccccaccctgctccccgccccacctctaaccccaatcaagtactggaccctcaccagtttccccctcccactgttctcacttttatgttcctgactccgggtccaagtgcaagcagacagtgcattttgagggcgagaggaggaaagcccactaaagccttacgtgggactggacgaggagcagacaggctgtccttgacacggaggtgggcacagagcaggacttcaggggtcctgtgtgtaaaaagaaaatggaaatactttcctggggtacttgggacagggtcagtgggctggggtgttgaccagacgcgtggagaggagagcaggccggcagctcttgagagtgccaacttcccacgggttgagctctctgggaacaggactgagagggacccaaccctaaccgcacgagccgcacactcagattggtgccatcgggcgcgcggcgtccttaagagctccctgaaaccccgcccccttcctgctctgggggcgtggtatggggcaaggaccccgccactgagcttgctattggctaagagagcagggttggccttgcgttcgcctgagcaagggagtagacagcacagcggcagcggagggagtctatgcgagctggacagcagtgggaggtttgtgaggctcgcactggccgcagaccctcgggctcgatcgcccgggagccaggactcggcgacgcgaggctgccgggctacccggccgaggcttcgggggcgcaaactaatgggactggctcgctcggca

SEQ ID NO: 43990 - DNA, 2300 bp, Homo sapien
atttatctataccataagaaatgaggtgaagtttcccactataattgcagacttcctgatctctctttatatttctaacagtatttgctttatatattttgaaactacattgtttggcacataaatttttgtgactatcatatgtttttttttaaaatgcactgttctgcaacatgcttttttcacttaatatatttatattagaccagtacatatatacatatatacttgccttctttctttctttcttttttttttttttttttttgagacagggtctgactattgcccaggctggatcacagtggcgcaatcttggctcactgcagcctcaacctcctgggctcaagtgattctcccacctcagcctcccaagtagctgggactacaggcacgtaccattgcgccagggaaatttttacgttttttttgtagagatggggtttcaccatattgtccaggctggtctcaactcctgggctcaagcaatcctcctgccttggtctcccaaagtgctgcgattacaggtgtcaaccaccatgtctgtacatgagccaccatgcaacatgtttaaataaatttaaacaatttatttgttgaggagaattaaagttgtttgcattatcttgctacactcctattcacatatctttctccatttgtgtgtctcaatagaacacacaatagagcaattgactagaagtagaattgctagatgaaaatgtatctccattaaaaaatttgatagtttcagatttctcaccaatgaagttctattattgttattattatcatcatcattttgagatggcatcttgcttggttgtccaggctggagtgcagtggcgtgatcttcactcacttcagcctcaacctcctgggctcacacaatcctcctgcttcagcctcctaagtagttgggactacaggcacacaccaccagcttgtcatatctttctcagtgaataaagcaacctgttttgttctctttagttctttttactttgagttctcgatgtttaggatattgatattgttacgagtttgtttcctccttcctttccttccttttttttttttttgcttctttccttccctcattccctctctcccttttttctgctagtattttactctcatatattttttattcctatttctgctttaggtgaaactcacataaatagaatataacttagcttttaaaaacaaaatgctcaaaataagagtttggtttttattaggagatgttaacccataatgcatgctgatatatttggattcctgcatttttgttttctttttgcatccttttttttgtacccccccagcaacatttcttgacctttgttaagaatgagtttttctctttgttccacatattattactttaatggtttgaaagttatacattttatttctattatgttgttacccctaagatttttgttctattatgcattttgtttccagtaagaacaaaactttgctactgttgtgaacatgggaaatgtttacattggctgtaaatactagagttccattataaagcgcaatttaaagacttcagaattcagtaaaatggtataaatccaaaaggcgtaactacaatatttttaactgcaatgcaataacagaatatgaacctgtgttgtgtcctatgatctcttggacagagaagcttggttttgtgattagcagcaacaaattcaacataaacagcttcaatttgctttaaccatcaggttaaaaaaaatttaagcttactgcaaccctaaatatggtttcacagttttaatactttcggtacaaccataacacgtaacataggatgtgatgtagtaacgtaattactctcacattggacttaatcagaaagaatttgcagattttattttatttattaaaaaaccagaaggcaatatagctaaatgtttaacattagttaaagctgggtgtttgtgacatttttcgctgtccttttctgtatccttgacgatttcatcatttaagatgaaataatgctttcgggcccaccctgatttgtggagagcagctgccgcccccgccacatcaaggaggcgggctccagctgacttcacaatcacttccgccgccgcagtcgccgcccgccccgctgctgtctggcgggggaggagctcgggaccgggagcagcggctctggcggtcgtggcggtcggagatccgagagctctgcttctctgaaaagcgtgtggctttctggacttggtgagtgaaaggctgattgtttcctcgattcatccgggcgctggcggtgg

SEQ ID NO: 43991 - DNA, 2300 bp, Homo sapien
gagatagcaatttttatggtcagatagggaagctgaggcccagggatgttcaaagatttgtccaaggctactcagccagaggtggcagagctgggatttggactcaggactgttgattccaaaggcagctccttctaggactaaagcaagaggaatgtagtggcctcagttcctccctgaaagggaggccctaccaggtagagagttccctggtggaggcctagagcaccttcctggaccctgggcccactctgtagggagggctagctgggtaagagctgtgctagaggggcagagaagcaggttcctctcaccccaacccctgcaggttccgctcaggcagtgctggcctccctcctcccatagggtctccccgctccctttattcctcaacagagagagaagggagccagcagacagtgctgagagtagagtaggcagtcagaagaccagacacagatcattcacaggcaagaactctgggctgcccctgcttcactgtttccatcagggcaatggggcatgggagggtgtataagacgatggctgagaccgtgtcaactccaccagtgtgtgtgtggtgaggcctgcctgggcaggcaagtgctgtgaccatgtcagtggagatggctctgcccacagaacatgattcaggggatagcaagggcaggagctagggtaagccaggaagacacatcaatagctggtacgagagctctgttaggccctgcctggggtccaagccctgcctctggctgctccatcatgacagaaaggtggaggataagcaaatgagaatctgtggttaatagaaatggggtctttttgaaaagaggaacactaggggaagtgcaagaaggtaacaaagggctggaaacactctcctggttgtcctgagaggcagaggaaattgcacctgtaagaaaaagcttgcctttagatctccacagaggcaaggggcactgtgtggctgattaaacggagctctagttacaggcctgatacccctgcttgctgtgcaaccctgagcaggtcttttttttcctctctgggtctcagtgtttccatctgcacagtgagaatttggacctaaatgttctccaagagctctctcagctctcaaattccagaatcttctctaaaccttctctgagtcaagccccttgagcatggctgtgcctcaggcactgacagttgttttaatgtgctgatcagtagtggaagtcacagtaacattgtgaggtgggggtggtgtgcattggggtcatcctaggatccaacgtgaactcctcaccacggcctagaggcttgagtggattaatgccctgcccatctttccagcctcccctctccctctccagtttcccctggcttcctttccttgtctgggatgtatcagactccctcttgctttggcaccttcacatacactgttcactatacttggaacgcaggatccccacctctttggtaattctcttccttttgatcttagctgaaatggcccctcttccaggaagtcttcctgggcccctagcctaggccagctcccagtctgaaacacactcatagcatcatgataatgatcatagtagtagttgcttgtaccatataagtatgtttgtatctgtctctcctcctcaattactatcagctccctgatagcaggacccttgtttatctcattcacagctttacccctggtgtccaataacccaggaaacttttaaccaacaaatatttcttgaaaacaaaacccctagaagctgccatgtgctgtagacctactgggggccaggcacagacatacagcatctcattgggtccttggatcatgctctccctacttatttcttaggtgcagagatggtgtggcagagagctgatgggttttttccttccagaagatctttgtcctggaccagttggctggggtgtgcagagctgggcctggcaagcaggtctgcctgttttgtgcctccttttttgcttgccaccactcttcagagaggagcagcagctgtggccgctcctcgtgttcccatagcaaccaatgcttacctcccgctcacactggttcctaattgcctgattacgcatcttctcccccgccagctcgccagctcgggagcttcttgagagcagggtccatggcaggctttgctcaccattgcgtggctccaggctcagtgagtattagttaaatgaacaaaaatgaatgcatgaccatccatgcacttgggtttttaaaagctttcatcaaaaacaaggcacctggcagcctgtagtggcttggggga

SEQ ID NO: 43992 - DNA, 2300 bp, Homo sapien
ttgtttccttatatagactataatttcctttaaggaaggaatgccttggctctttcatctttccagggccttactggagtgttaagagaattctagagtcagactgagtttcttttttagctgctctggttactttaggcaacaaccacactaaacctcagcttctttgtatgtaaatgaagataacagtagtacctatctcataacactgttgtgaagattggatgacgaatgcatgcaaaatgtatagagcagtacctagcacatagtacgcgctcaattaaggctattttctttattgttattcttaacattaacaaatgcttgccggcaacggttgacaaaaaattacaatgtgagttactgggagtgaggaaggcaagcagaccacagggtcagtggagtccaaacaaggttagtggcgcgtcaggatgtttgtacgtccgaattcctagtgccatgtgactctgtgagggcccaagcacatggttccatccgggcggcgcagcttctctaactctcagtcagctattctcagcagcctgtagggggagccaaaaagctaggacgggggctggtgcttgggtggggggcgggcgggtggggggtggaggctgctggaaatattcctaagggcaaacaccgacaccccaccactactatcttagcccaccgccttgccccctccaggacgctctccaaactcagtcttcctcagcagctaagctgggagctgtccttcagcaccaagggccgccttgtcctcgggcaggacggtgagggcgaaggtggagttagggacactggactggtccgatccgcagccggctcgagcgtcttccagtcacggggacggcggaggcgacccagagaggcagcaagcagctacgagatgcctgctgctccttgcctccaagaatcaccctcagaagtcccctagccctcgggggagtgagggacggccatggagaggaaggcgggcgcccgggttagtgggggagggggagcgccgaggcctgggactcagcgtgtggcatgtgcacgcgggcagcgggcggatgaacggaggcgctgaagtgaatggagttgggggtggactggaaacatccccaaacagcaccggctgcggccggcgggggctggggcggggtggggtggggggagtcctgaggcgcaggcgcagtcggggcaccagtcccgctccctcctcctctccgtgcctctttctccgccctgctccccgccaaacacacttgcacaggggctctcaaggtgttctccgcacagcggaagatggcgacagactgagggtgcatggccagcgggagccacggggccgtgccgctgggctgcagccacagcggtgcgaacgagaggcggaagcgagaggcgcactaagtaaagcccggtgtctgcgtccggcgcctgtggcgctgccgggagccaggtggcccgcccgagccggaactccaggagcagcgggtgcggagccagagcggagcccgccagggactggccccggcgaacacccggagcgcgaacgaagcccgaagggcccggcaacggaccggccggccggcctaggagggcgcgagcgaggcagggagcggcgtggagcgggcagcgggcggacgggcgggagcggagcggcgcggggcgaggggagcggagcggagcgcggcggcggggcccgcacggcggcgctgaggggcgcagagctgcgccgaaccgagacggccggtttggagtgcgagccgggcggccgccggcgcggagtgaagtggcacggagccgagggcagctgaggggcccgacactatgaggagtgcggcgccgccgccgcagccgccaccgccccagtgccccgcaccgcccccagccgggacgccgggcagcgcctagcgggccgggcggcggcgcccgggctgagagcgacggagcgcgggagcggcgcggagacggcaccagagcgccccgcgactccggcctgagcggggcatcgcgccggccggcctgcctcaccatgcagcccccgaggtagagcctggacggcgccgaggagcgcagagcggcgcgcagcccgcccgccccagacggccgtctggcctcgcgcctgcctgttccctccagcccggacccccctgaaatatgttcaggggcgcttggatgtggcccgggaaagacgccgccgcgctgactatctgctgctgctgctgctgctgggctcccaggccgagcgacaaaccttgcgccgactccgagcgggcgcagcgatggcgactgtccctggcgtccctgct

SEQ ID NO: 43993 - DNA, 2300 bp, Homo sapien
aagagaggtcccaggtcaaatgcaaccctcagggcttctgagggcaatggtgtaatccagagtctcagtcaagcctggtagaacatggtaaggtgagaccagtgtggcccctgagcatcaccatcaccaccaggagatggctgtcatttgtttccttttcattttagaggaagaaagggcagcctgtttaaactgtgtatgcaagaaagtcaacatggccagtgacaacacagacaaaacacagtgtaaaggctgttaaagttcaaactcctcattttactgccggagaaactaaggccctgaaaaagcacagtgacttgctcagagggacccagcaacctagtggcaggatgaagtctcctgactcctggtctagcattctttccaataatcccgggctgtgataattaaagtaaatcagcctggcagttttcctagcatctagaattcctggactggacaagcaggacttgagagcagctgttaaacaccttttttccccttagctctaggatgatgatattctttgtgaactttatatttcatgggtaggggttaaagagacgacacaaagatgtttttgaagcactgagaccattcacaaagtgtacagagaaaagttgtctgtggctaatatatttaaggcttatgacctctgtgctctctggactgacctgccagcagatgcttttggttttgtgttttatttctcttattttgtcttcttttctatttctatctatgtttttcttctcttccaccagcctaggtcttaggcctacacataagtgcccccggcattgctgagcctccatgatgacactcaagatgcctgctgcaagtcaataaaattgttaattattcattactcaataacacggaatgagagtgcgtagtgactatgaagcatacatggttcccctgctatggtcatttcgctttctataatctcagactagtaactcttgtcaattgtgactcttgatttaatcctttccatccttcatttcagggtctattgttctgccttttgccacttttttttttttatctgaacccgtttctgattggtgcagctgttgaagatgctgcagttgcagcagtgtacatctggaacatttggctgacttgttgaacttcccccagggagtactccaggagaaggatgggaggggtggagaggccagaacagttgcctgtaaataaagatgccagtagtgtctggccattctgtggaccacacttgtacaaatccacttcattctggccctcggtttccctgtctactcactgaagacatacgttctccaatcaaaactgctgcagtggaagaaatctattctggctgtggatgctctcatacagcattttttgcattgtacagggatcgatagatatttgttgaattaattaatatatcaagaaatcctaggagactgttttacccttcaagggacaacatcatttcagttccgcttggcatggggcggcttctctgttacttagattgagccttcagagtcactccaggagtgaggctgcttgagtcccacccattcccatagttcccaggctcctgggtctccttttcttcgggcgagccattgaattgcaaacacagcaggcatggtttcattccaaacccagagctgttttaattagtttaacgtctgttaaacgctttgaagattggaagcaacagataagtactggatgatgttattaacaactgcagttaattgcaaacatttctattaatgctagtttctgcctccttttctttgctctactttctttccaaggttcccaaattcttagcctccccctcctttcctccccgtactggcgctatagggttaaactggggcggagcccagggatgaacgacagcgccagtcaccaactggtacggggcaagcgggaagagctgggtggggcggccaggcagaggcgaaccctcacgcccccaggccccgccccgcggctggaggcccggctggaacggcacggggcggggcgccaaggcttggcggccccgtggttgggcgtcccggcagccgcttgagggatggggcggggtcggccgggacctcctccttcattccctcggcgggccgagcctcccctctctcccgcccctcctcctccctttcccacccctcggagtagagctgcacatgcggctgctccctgctccgtcccgcccagccactgtcgcgcaggaacgggtccctgcagcccccagccgatggcaggacagtagccgcctgtcagaggtcgtgaacggctgaggcagacgc

SEQ ID NO: 43994 - DNA, 2300 bp, Homo sapien
ggcatctcattaattctctttctccttgtggatctacactttaaaaaacattttaatgataattttcatggagctccagcaagaagtcaaggcaaaaccttgtgttcaatctgcaatgttcaattagaaatgttctctgtcttttctaaccttttactgacccactttcccaaataatcttactacagctgccttaaaaactgagtccagtagtaattctgagtgtggctccctatgactcatctctagtaactcttcctaaccatgctaacctacagtgttcctatcttactggaacttaatacagcccagtaccttattctattctggtttgtatttttctttgtttgccatctggtgtgctcccaactgggctgaagatgggtctttgctttccctggtattcccttaactaatgcctcagagagaagatttggagaggaggacgtgaattggaggaaaactgttccaggattccccacctctggtggcccaccgctggctcactgccattgaccacactgcaggcagagcccagtgcagtgctggagcagggcccagagaggagagggcttacagtgtgaattcagctcagctggggaagaagacaccttcccttctagacctgaatcgggttcccaaggccagatagaagagggggctgggaacatgggcagatgggccaggtgctggggtgaagaagtgagagtgttgagtgggtatgggtgagagagagtgcacgtgaccttggggtggacagaactccggagagagggtaagtgtgagggactgcttgaaattcattaactctggtctgggcttcctgcagcaaccactgtgattgctgtcaacctctacctggtggtgttcacaccatactggcctgtcactgtgcttattcttacctggctggcttttgactggaagacccctcagcgaggtaagcatcctgctggtgctgtgttgccacatgccacatgctctttccccttctctcatcacaatcctgagaggctctggccaattcccagacagccctttagcctgtccctccctgggctagagaggctgagggaaggggtccttttaaggtggtagaaaggcccagatcagaactggagtgggttaggggaggggcagctagtgaagcagaagctaggcctgtcctaaattgccctgatatgcccaccttggttgccacttaagaggccaggaaacagcagggggtgagagcaccctggggcaggcccacagtgggaatggacaaagcttggctgcattgcctctgttttcaggcggccgccggtttacctgtgtgaggcactggcgcctgtggaaacactacagcgattatttccctctcaaggtcagtagccccaggtccccactcaggcccaggtccagccccgacttcagtgctagcagttgggtcaggctaggggtggagggcgccatccacattgagcctcttgagaatgacgccccctggagttgcacattgggcaacctgcatggctagacctagcagtccttttcctttcagatctctgcccaaaagagaagttctctaccctgggaatagccctcctgattctactttcttccgcagcttctgaagactcatgacatctgccccagccgcaactacatcctcgtctgccaccctcatgggctctttgcccatggatggtttggccactttgccacagaggcctcaggcttctccaagatatttcctggcatcaccccttacatactcacactgggagcctttttctggatgcctttcctcagagaatatgtaatgtctacaggtaagttggctcctaggacacaaagccaaagaaaaaatggctccccaagggagaattgtagggggatgcgtgagagcaaggccagctcccaatcccctctggtgtgaaacagctatcataggctcacctgcctgatgttaggctccttgcactccccctcctttgaagcagtagaaaggaaatgtaggggtttgggaagtgaccagtggctgtttggctttttctatccaccaggggcctgctctgtgagtcgatcctccattgactttctgctgactcataaaggcacaggcaacatggtcattgtggtgattggtggactggctgagtgcagatacagcctgccaggttcttctaccctggtgttgaagaaccggtctggctttgtgcgcatggcccttcagcatgggtaaggacagctccagtccaggctggcggaagggatccaaaagtgttgcagggaaagaagaagagggggttttgatg

SEQ ID NO: 43995 - DNA, 2300 bp, Homo sapien
tccctttgtacatatatactcacaggcaaagaccacatgtgcacatgtatgtgcatgaaaaaaatcatatttgtaaaatttcttctttttttgtttgtttgagacagagtcttgctctgttgcccaggctggagtgcagtggcatgatctcagcttactgcaacctctgcctcccgggttcaagtgattctcatgcctcatcctccagagtagttgggattataggcacacgccaccatgtccggctaattttttgtatttttagtagagatggggtgtcgccatattggccaggctggtctcgaattcctggcctcatgtgatccacccaccttggcctcccaaaatgctgggattacaggagcgagccactactttttttttttgagacagagttttgctcccgttgcctaggctggagtgcaatggtgcgatctcagctcaccacagcttccatctcctgggttcaagcgattctcctgcctcagcctcctgagtagctgggattacaggcatgtgccaccacgcccggctaattgtgtatttttcagtagagatggggtttctccatgttggtcaggctggtttcgaactcccgacctcaggtgatctgcctgcctcggcctcccaaagtatgaccttgagggaactcttttttcaaaattctattataaaaaaattcaaacctaccgagtagttgaaagaattgtacagtgaatacccaccacctagattgtacagataatattttatgttatctgtacagaaatataaaatataaaatattaaaatataaaaatatatttaatatattatatataaatattaatatataaaaatatattaaaatataaaaaatattaaaatattaaaaatataaaatatttatatattttactagatttaataaatcaatctttgtttgatttattacatatttatccatcagtacatccctgtatccatccatcaatatattttacatgcatttcaaagtaaattgcagacatcagcactcttttttgttttgtttttttagagacagtgtctcactctgtcatccaggctggagtgcagtggcacggtcatagctcactgtaatctctaattcctggcctcaagtgatcctcctgccttggcctcccaaagtgctgggattacaggtgtgagctaccatgcccagcctagtattcttcacccctaaacacttcagaattaatgagagttcaactttttttttttactttcgaggtaaaatccacaggcagtgaaacgtacacattttaagtgtatactcactgagtaatgaggttttgatctgtgtaactcacagtcctatcaagacagagaacgtcactgttacccctaaaggtttccatcatgccccttcctagtcaatccccaagcacaggtaaccactgctgtgatttgtttcactatagattggttttgcctattctaaaatttcatgtacacagaataatatacaccaatatttgtttcttcattcaataataggtttattcagtacctatgatagctcacagacatacatgtgatgtctcttcaatgtgagtaatgagttctcccagactgactaaaaggctgaaggtatttctaaggccttgcctgtgacctccttccctctgccctccaatcccattgtcactgagagaccatagacagttgggcctcagaaacagaaatgcaagccctgtgtcccatttgagccctgggctccttcctgcccatcactctccaccatccagactggccctggaggcctcttgtcagctgcacgcccacactaactttcacaccagggtttcatcacatttctctagccaagtgcgcaaaggagtgtcacaatctcagtccaggcaatacccaagtgggtaaaagtacaggtgagtgggcagctggaaggaactggataagcagaggcattatatggtcctgtaattctgtggaggggtggtacaggggcggaggctagccagaggctggggaagaaaacattaagagaggaaacatcacagactcctgagcaatcagggctgggcagctgaacagtgcttacctggagccactgggacgctgggcacaatgctcttgccctctaagaaggacctcaagactgccctggatgtctttgctgttttccagtggtccttcagtgccttgcttatcagtgagtcttcagcctttggtagggtgaccaaccatcctggcttgcctgagactgaaggattttagggttgcaggatgttcaatggtcaaactagggttgttccagtaaa

SEQ ID NO: 43996 - DNA, 2300 bp, Homo sapien
gccaggcgcggtggctcacgcctgtaatctcagcattttgggaggctgaggtgagaggctcgcttgagcccaggagttcgaaaccagcctgagcaacatagtgaggccccgtttctacaaaaagtaaaaaaaaaaaaaaaaaaaaaaaagttagctggatatggtggtgtgtgtagtcatcccggcactttgagaggccaaggcagggggatcgcttgaactcaggagttcaagaccagcctggccaacatggtgaaaccctgtctctactaaaaatacaaaaagtatccgggtgtggtggtgtgcgcctgtagtcccagctactcaggaggctgagacatgagacttgcttgaacccagaagctggaggctgcagtgagccgagatcatgccactgcactccagcctgggtgacagagcaagactccgtctcaaaaaaaaaaagaaaaaaaaaggaaggaaggaaaccaaggaaggaagaagaaagagagtaagagagagagagagaggaagaaagagagtgagagagagagaaagaaaataggcaaatgaagggctgagcatggtgtctcacatctgtaatcccagcactttggaaggcagaggtggaggaccacttgagcccagactggagtgcagtgccgctatcttggctcactacaacttctgcttcccaggctcaagctatcctcccacctcagcccccaggagtagttgggactacaggcacacaccaccacacctggctaatttttgtatttctagtagagttagggcttcaccatgttgcccaggctggtctggaactcctgacctcaagacatcctcccaccttggcctcccaaagtgctgggattacaggcgtgagccaccgcatctggcaaaaaaaaaaaaaaaaaaaaaattccccaaaattagccaagtatggtggtgcctgtagtcccagctactcaggatgttgaggcaggaggatcacctgagcctgagcccaggagtttgaggctgcaatgagccatgatcacgccactgcattccaccctcggtgacagagctagactccaccccccccaaaaaaaagagagagaaaataggcaaatgacataaacattttactgaaaaggatatggcatagatgacaaatgagcacatgaaaaaaggaacatcattagccatcagggaacttcacacttatcaaaatggctaaaataaaaacttgtgactgggcacagtggctcatgccagcactttgggaggccgaggcgagtaaatcacctgaggtcaggagttccaagaccagcctggccaacacggcgaaacctcgtctctactaaaaatacaaaaattagccgggcgtggtggcaggcgcctgtagtcccggctacccgggaggctgaggcaggagaatcgcttggacctgggaggcagaggttgcagtgagctgagattgcaccattgcactccagcctgggcgacagagcgagactccgttccccgcgcccccccctcaaaaaaagagtaaactgaaaggactgtgtttgcaggaatgtaaggaaatgtccttgttctgatgcacaagttaatggttccctggtgaagggacctgaaagactggagaaaaacgcactgcttcctcaacagtaggggcaatgccaagtccagggttagagcacattcagcggtgtagtatctgtcatgtggctgtcaggcatggctactgcctgcattgtgtgcagacttggaaatgaagtcggctctcaatcagcgaaagactctacaggcccaactgccacacacattgcaggaaggccatatttgaatcccgccaaaaacctttgctgtggggtccaatgggctcatacttccggtctcccaacagccaatcctagcactgggcatttgcgggtggcccagcaagtggcctagcacttgcgggggcgtggccatggagacacagtgaccaaaggcagagaagaatgcgaatgggggaggggaagcggaggctgaggtgagcctagagcggcggttagagccggtgaggtgaaagagagcgaccgttaggacaggctgaggacttctggtctgttcggtacttgaactgccagcaaatttcaactcccgcttgccattcaacatcatggatgatccgaagagtgaacagcagcgcatactgcgccgccaccaacgcgagaggcaggagctgcaggcccagatccggagcttaaaaaactcggtccccaagaccgacaagacgaaaagaaagcagttgctccaagacgtggcccgcatggaggccgagatgg

SEQ ID NO: 43997 - DNA, 2300 bp, Homo sapien
tgacaactctaatatataacaggcactctgaaagtaattggcatctcccataaagaccgtcattttggctgggcacactgaatcacgtctgtaatcccaacactttgggacggtgaagcgggtggatcacttgacctcaggagtttgagatcagcctgggcaacatggcgaaaccccgcctctacaaaaaaatacaaaaattagccaggagtggtgacttgcacctgtagtcccagctaattggggggcttgagggtagaggatcacttgagtccaggaggcggagtttgcagtgagctaagatcgtgccaatgcattccagcactccagcctgggtggcagagtgagaccctgtctcaaaaaaaaaaaaaaaaaaagactaattttgaaagccataaaaaatgacttacaaagtttaagaccaaattaagactgtgcacatttttttcctcttaagtaacagtaaagacatgttttaatccaagcaaatgcagagaagcaaattatctttactctcacaattactacatttctaagtctcctccacaagtactatctttttctttatattccctgccaagcctgaccctgaaaggtcagtttactagaggtgccagataaaccaaataggtaattcgccaaagcctcacttccttcttagtttataaagcaggggttgcaagggaaggtttattagaatcacctgggaagctttttcaacctacatgtgtgccacagcctcctctccctcttaggaagcactgttctagtttggggcttcaatctgtcccacattaaaggtcttcatctttctaaatcctacccaactgaaggttaatggagtagaaacaattgaacgcagaagtcactgactttgtcacaaactggctggacaagtcccttaacctttctggtctcaagtttttcctccgattttgggggttccctttaaactttgacattcttctatgtgaccgcatgtcatgtctaagaagccttctgaactactcctagcatgggatgacttgccctttcttgcttttccaacagcctgtgcaatacaacatatcacctattttatactgtcctatattgccctctagttgttttttaatgaagctttttttcttctcaacgatatgtagtttaaaatactagtttaaaagtttattttcaggggtagacagtgtgcctgctacttaaatctcctaggacaattcaggctgcgtcctaaggtaatcagtatgtatttatattgctttgttcaaaacaatgacgtcccttctttgaagtcctgaaattatgttttccatcagttctgtccagtagaaatataatgggagctacaaatatagttttaaattatctggcaggcacatttacaaagtgaaaagaaagaagtacaattaattctaataatatatttaatccaacatatccaaaagactatcatttcaacatgtagtccatgtaaaaagtatttacatttttcattcttttttttttaaatgtctttgaaatctggggtgttttttacacttgcagcacatctcgattcaaaatagccactttcaagtgcttagtaaccacatgtagctagtaactacctactgaacaatgctgttctgcataagttggctgctttccaaactgatcactttttttttttattcagataatgactgatactgagtactcaggctagccagagtggtgcaaagatgagtcaaattcattctgataagagagatttgtaagtcactagcaattatacagcgtggtaggtgccatgatagagatgcataggagaaacccagacttggcggctgaagggcacagggtggaaggcggtagagagacaaggaaggttgcacagaaataacatttgatgtaggaactaagtgcacgaagggaagccggctgtgcggtgaccggagttgcaggttgccaatcttgctgaggggggctccaccggacgccggcctacgggtcgtaggcgtgtgtggggtgaagggggaagaggacgggagaggattggctgggaggaacccggagctccatctggtgggtggacggaaaccgcaggggggcgctacttgcacttcgcgctcaagcgaccggatcttcaaaccgtgggagtggtgcggcggctagagtccctggactcctcaacctagggagctactcgcgaggtaaggggcgcgccagactggctcctaaaacgcactcgctcgtccgcactcctcgcgctccgaattcagcctcgcctcacccgggcttcagagcccacagaacttctc

SEQ ID NO: 43998 - DNA, 2300 bp, Homo sapien
aaggggcgttggagctcttgatactgtggatctcgtctggcctgggcactctaagcccctccatatctctgctttccctgagcagagccaagcctgcctctcttacctccctccctcctcccgtgcaaattctgagcagatacgctctgatacatctcaccttctatgtggtcaagcagccccaagaagcagctggagaaccccagctagcccaaggggaagaaaagaaagaggaggaagaggaaggtgtcgcatgtcagatgaccatctagtgcacacgggggagtgaaagcacaccctgacataccagaaaagttccccaagctcagctctgaagagtcacattggtcagtctaatgcgggaagcccaaagcagagtgggggtggggagatgacagagttccaacaatctccctggaaaagggaccaatgcccccttgcacttatagaacccttgataccatttttgtatctcattttcccagcaaccccttcagttatgtttaacagatgtttttgactaccttctatattcaaggccttctgctgggagtactgggcttttcctgtaggacacattgcaacttcaagtgtacagacattttatcttaattttattttattatttatttatttacttattttgtagagatggcatctcgttatgttacccaggccggtctggagcttctgggctcaagtaaccctcccgcttcagcctcccaaagtgccaggattacaggcatgagccaccgcacccagcctaacatttttgtgattttttttttgttttaatgtctgtctcctccactagactgtagactcaaagaaggcaagaatcatgtctgtcttcttccctactgaatcctcagcacctaaacacagtgcctggcaaacagcagtcactcaatagatagtgacagaaaaaatatatccaacatggtgaaactctctcactactaaaaatacaaaaactagctggacgtggtggcgcacgccagtagtcccagctacgcaggaggatgaggcaggagaatcacttgaacccagaaggcagaggttgcagtgatccgagatcacgccactgcactccagcctgggcgacacagtgagactctgtctggaaaaaaaaaaacaaacgaaacaaacaaacagaaaaaaaacggtctgagacctgggaacagtcttcagttttccaaaggctattacacagaagcaagcctcagcctgaaacatatgttacttgttcaatatgtgttacttgaactcagtgagtagtaatgacaggaaacggtgccaggctgtgtgctaagcactttatattcattcacttatctaatcctcagaactactctaagaagtaggtactattatagtcccacttttacagatggagaaactggggcatagaggttcaccaccttgtaagtgacagagctgagatgtgaaccccagctatctggctctaaagtctatgcccctaacctatattacattctagcaatgaatgctcaaactgagctctagagagatgtaacattttccaaaggtgtcacaggaagagcatggcagagctgggactgggagccaggtcttccttctgtgcaatgtttctcccgctctatgataaggtatctggccactgaggcaggtcccttgggactagaggcacaaagagggatctgaagagtctattaacagatatccggtgcagaaaaacagccccagtgggctaggtgactcagcagaagacaagaggagacaaagggtaaccactagggcaggaacaagtgtggctgccaagtcccttttcttaagcagggaaaggtagtggggtgcttttcggaggtcctatttgaggcccaagatactctcttcctgcgctgatttatcaagagtgcccctcccccacagctagagccgccccagggccatttctgcttcattacaattgggcacacgtggagaaaggatactactggggagatcaattatattgcctgatctgcaacctgatgtgtgggtaggaagttggggcggggcagtggaggaaaagtttggtcaagcctgacaaaaccccagcagctaatcttactccacagtaagagattatagcaaagcatctataatcaactcagcttaagaagttttgaccttctggttaggcttcttgccacaacagaacagcaccataaccatggctttcttctcccgactgaatctccaggagggcctccaaaccttctttgttttgcaatggatcccagtctatatatttttaggtgagtgaaccccaaggg

SEQ ID NO: 43999 - DNA, 2300 bp, Homo sapien
ttgacaaagggatcaaatctgaatcactatagtctttgaatccagctatcaatctgcaagaaatacagaggaacatgctgaagcaccctaagtaagtatgagataagcaaaatccaaactgtgggaaattctacaggtcaaatgctgtgggttcttcaatagctaaagcataaggaaaggaaagggatggagggggaaccgacttaaactcttcaaaagcaccaaagtcatggaagtcacggaaagaccgagaaactaacccaatctgagtatgtggttaaaaaataataataaaataaaataaaaacagagacactgtcaaaggaggaggagacaaaggagagatgatgattaaatgcaatgtgagattccaatgggatcctgggacagaaaatggacatttgtggaaaaaaattgatacaatacaaataaaacctggtgtttagtaaatataaatgcaccaatattggtttcttagttgtgataaatataccattgttttataagatgttaacataaaggggaagctacacgaagggtgtagggaactctctgtactatctttgcaactctctcataaatctaaaagtattccaaattaaaaagtaaaaatggccaggtatgatggctcatgcttgtaatcccagcactttgggatgctgaggtgggaggatttcttgagctcatgagttcaagaccagcctgggcaacatggtgacaccccatctctacaaaaaataaaaaattagccaggcgtgatggtgcgcacctgtggtcccaactactcaggaggctgaggctggaggatcacttaagcctgggagattgaggctgcagtgagctgtgtttgcgccactacactccagcctgggtggcagagtaagatcctgcctcaaaaaagaaaaaaaaccataaaaaagagagagagaaaacttcaaggacatatcaatatttaaaatggggaagactaaaccatagtcattagggaagtacacttaggtaagaaaaccacagaaatgcaaggaaaagatgactctaaatgtcaaagataatggttactttgggaggaggaagtggattgtgattgaaatggggcacatggagagcatcctggggtggagagaaaagttcatcttcttcatcaagtggtggttacaagatgtttgtcttataataattcattaacccatacatttgttttaagtggctctctgtatctgggttctattttataatgacagacagagagcaagagactgagacataagacacataacatccaaatataaccagtggaccttgtttggattctgattcaaattggccaactatagaaagacatttgaatatggactggatgttagatattattaaggaattattaaatttgttaagggtaatatggaagaaaacatctgtattttttgtagatgcatagtgatgtatttaggggtgaaatgacacactatcttagaattgctttaaaatactccaagaaaaaaaaaaggtggggagataaatgaaacaagtatggaaaaatattaatagttgttgaagatgaacatgaagataaaaatttgttgcatcttctagctttttgtgtgtttggaaatttttataattaaagttaaaggtggggcagccccaaagcaggctgcttcagggcaacaaaagccaaatcccaggtgctccccacatcacaaatccccagaactcccttcccagcagtcatctcccaaaggtcacaaatccctatagtttctgagtagcctgtgagggggtttcaccttctctaggtccctgtgtcactctgactacatggcagtcattctcacctttctccatcttgatgtcctaataatcctaggaaagagagtcaaagggcaaatgagctggaccagacctgacggggcagtccttgtacttcagagcctgcccctgcggtgggtgggggggcagggaaggacaagagggaagagggcaggtgcaaactcctcatagttatatgcattcactattaagtgaacttccagaggctggtggcacctttggttggaacactgttctgagatctttgcctccctcaggctcccgagaatcatggctcattccaagcagcctagtcacttccagagtctgatgcttctgcagtggcctttgagctaccttgccatctgtgagtattgacccaagagtgcatagcaagaagccagagtcagaagccagggccagatctagggtgacttttagggccatgtgaagtctcattttgagcctttccatcatctaagattgtacta

SEQ ID NO: 44000 - DNA, 2300 bp, Homo sapien
agatagagccccaggagacagtgagaatatgtagtgggagggggcggggggtggaacagggtcatgatggatatgagtagatctagttaatttcagccacttcctaatccttactatctagagaggaaaagtgaggcccagggaatgctcccttatgatcatggggaataggacagaggaaacattagcatcccagacttaaagaagtatagcctgtgtctgaaccatagagttgtctattctgggagtggggtggtggtagcatgcgggaagacagtgtcattggaaagaatggtgaatgggcaagaggacaagcatagtggataggaaatactagaaggatgcagatgctggatgggcagcgtgtaggaagatatagatagtataggggtgagggagagtgggctagtggcttaacgagggatgacggatagggagggagacaggagacaagaggaaaaagatggtgaccaaatgggggcaggaggaaaaaaaactggtgggaagtagagagcaggagtacagaggtagtggctgtacagggaagcaggtggacagggatgacagacaggcagagaaatagggcttctgtatggtaaatgatagaggaaaagtttgaaggacaagtagacatggatgatgaacaggacctggattgtgttgagggccaggaccagaggcttaggtaatgtggagagctggtgatgggactgggcatggtcaagttctgctggcagcacaaatttggtctaacctggtccctcatcagtttggatcttgcagccattgttcgtctacctgctgtttacatccttgtggccgctaccagtgctttactttgcctggttgttcctggactggaagaccccagagcgaggtaagactcacagacctagaaagaagaatgttccatcataacctgcagccagagagtcccactcgccataccacaggcccctcatccaagttctcagagccacaggagctcggccaaacaggaccatcctagggtctcctcctttcccacctctctagcagagccatgctagggaatccctgagtccgtggaatgtatgggatggcacacactgacatcatcccctacttcttcttttgcctcaggtggcaggcgttcggcctgggtaaggaactggtgtgtctggacccacatcagggactatttccccattacggtaagtatctcttccccagtgtcctcagagttcccaaaatactgggtaggcatttataccacatgactagagttgtccataaggaagataagtatcccagggaagtctcagtctatgctagatatacttcaagattcaacatttctactgagcactccatactcagctaggaaactttggacacccttggcatcacctgccagctgacacagtcagaaggcaagcacagttcagatcagtttaataagcatggattgaaaatctactctgaaccacgttagcagtacagagaaatgaataggatgcaattctctgccatcgaggagctcacatctaatggggaggacattagtataaagtatattatttgtttggcacaaggtacagaagtagttcagatgcgggataaggaaaggcttcacagacatggtgatatcttagcagggttttccaagttccatacaagttatttaggcaggcactggaaggggattggcaggaaacaatgccaggaagaggttccagaaatgtactgttatgctgatcctcagggcactctttggagtatacaacaaacaccaccccgacttttagagccaagcttcctgatctttttcacaaaagtgctcatagacaatgataatttgcacaaagcacactgacatagatggctgaggctacttctagccacaggcaggagatctggcagttctagctgtcccagatcctaccttgttgtccaatggccacagagaccaatatctcagccctcctgaaacccattcaggaaatctgttggaaagctctgctttagagagcaccctgatccctgaagtatcaccacccttgtttctgccatgtaatctcattccaccacctctggcatttctctccatggctgcagatcctgaagacaaaggacctatcacctgagcacaactacctcatgggggttcacccccatggcctcctgacctttggcgccttctgcaacttctgcactgaggccacaggcttctcgaagaccttcccaggcatcactcctcacttggccacgctgtcctggttcttcaagatcccctttgttagggagtacctcatggccaa

SEQ ID NO: 44001 - DNA, 2300 bp, Homo sapien
aatttgaccacttctcatcatctccaccactgtgatccaagctaccatcatctctatcagcaatagcctcttgactggtcttccccctgtacctccagccctgcagtctattctcaatatagagctggccagtgagccttctaaaatgtaagtcagatgacacctctcttctctaaaccctaagtgccttcccgttcaccaaagagtcctttacaatggcctccaaggaccttcatgatctggtccctgccaaactctctgacctcattttttacttttccccttctcacaacacctggcctttattcaaaagtcacccttaatatttatttatttacttatagacagggtcttgctttgtcattcaggctggagtgcagaggtctgaccatagttcactgcaacctcaaactgctgggctcaagtgatcctcctatctccgactcccaaagcactgggattacaggtgtgagccactgtgcctggtttcattcctaatatttaaaacaacaaccctctctattacccttttccttccctctttattacccttttccttccctctttaatttttctccataatgatgatcacaatctacatattttacttattaattttattatcccccagtagtatgtaagcaccattagggtgggagtttttatctattttgtccactcctaaggaactaccagtaactagaactggaccaggcaaaagtaggctctcagtaaatattcgtggttttaaaaaaattatttatatttgagacagggtctcactttgtcacccagattggagtgcagtggcgcgatcacagctcactgcagcctcaacatcccaggttcaagcactcctcctgcctcagccccccatgtagctgggacatcaggtgcatgccaccacgcccgactaattttttgtagagacagggttttgccacgttgtccaggcttgtcttgaactcctgagctccagcgatctgcctgcctctgtctgccataaatatttgttgattctttcctggatcatagccagtggcttagagaggcaacttaagcatagcaattaagttatggatgctagagcctgatccaaaggcaggcctgtcttggttcaaatcttgactctaccactaactagcaagacacctaaactttctgtgccttcattttttcatcagcaaagcagagacaataatagtatctagctcatagagagcctatggggtcattaataagtataaagcacttagaaaaatgcctgtcacatagtaagtgctatataagcattctttgtaattatatgcatatgagatttatattaaatatcagtagtttagattttctaaaatctttcaatgtgttgtcttgcacttgcccatgtgaaaattcgtttcccatgtttctgctcacttacacaggcttgtatgatccccctgtaatctatctccagggacctggctcttcatcagtaaacttggatgtttcctcgtgttctccctcctgcagtcatttcaaagctgttaaatagtaatctcgctgggccccagtttcccaatctgtacaatgagtgggttggactaggtcatcgtaaagggcctttctaactcttttaatctcccaggtgggaggagggacaggccccacctccaactccacctccttggatatgccctctggctgccaaggggaagggtgacagagtcagctgagctcagcttcaaggggaccaggtaggagatgtgccaacgttcttgggcaagggtggcaatggggctcctgggctgtaggcaggcagtggggaaggtgtcataggtaaatgtcatctggagacactgtgaccagggcactaggagaggcgaaggcactgtggggagagacactcctcttccagggatatagctgtgatgacgagtcagaagacactttgggtctgggtatcttcccactttggatagtgctgggaggcctccaccctcttcagccagccaggctcttagggacagagtgagctgcagagtgagtacaacccaaatacacgggctgcctgcctgagccccagcactgcctgctgcccaccacttcccaagctggaccaagggagcttgggtaggggccaggctagcctgagtgcacccagatgcgcttctgtcagctctccctagtgcttcaaccactgctctccctgctctactttttttgctccagctcagggatgggggtgggcagggaaatcctgccaccctcacttctccccttcccatctccaggggggccatggccagtacagagtcctc

SEQ ID NO: 44002 - DNA, 2300 bp, Homo sapien
ctagagctgtattccttgcattccttagctcatggccccttcctccgtcttcaaagccagcagcctaacatcttgcttcaggcctcatatttcctcctatctcagagtcaaaactctctctgcccctctctcataaagagactggtgattacattagggcccacctggataatccagaatgatctccctatttcaacatccttaatttattcacatctgcaaagtctctttttcatataaggtaatgttcatcggttcccaggattaagacctgacatctttgggggcataattcagcttgccacagtaggtaaaaattcattgagctgcagttaagatttgtgaattttacctcagtcaagaaatgcacaaacttctggaaaagagtaatgatttacattccatcataataatgaattaaagacctagcagatctactcttttcctaccgagaggcccatggatctgagtagaaagagaagataagcgggattgagtacctaaaagggaggtaggagcctcgagtgtgggtctaaagacaaaaacaggctgaccactaatcattctagagatctgggaaaggtttcctgaatgatgaaaataagcatacaagaagagaggccttcctttcctgccattgaatattgccatgtctggcatgaaaagtagattcattctgacttttcgccttcctcgcagacaccaaccttggcatgtatacaaatctttcctgtatgtccagcatcagttcctatcccactgtggtacctgcagaatctgggcttcttgcactatctgaaagcccctgagaaggagagagttatagtaactaaacaaccaggccctgagatgcatattggctaggaatggcaggggctgacactgtgaactgtgcaaagagaatatgggacagctgtccagggccctcagtgaggggcaggagttagggaaggccctgcccagccctctgagccatagccatagccatcctctgaggaatggacaccccattgtgggggttggggttgagggctgtgtctatagataactactaatgtccagactgctgtaaggggaggtgaaggaggtcagagtcctgaaaccccagagcttatagattctgtctctacattttctatgcccgtgaagcctgagcctaggccctgtgggaaggacagtcaagaaaggaagattactttgttgttgctgttgtgggggtcctggcagctgaagagacagaaatatctctaattccatgagcggtcatacgaggcaagagaagctgcttagagcatggacttagttagtttcagggattggacagagtcaagagctggggtgaggaggtttaccctcggtaggggtgacacagatgtcaaccgcctattccctccacatgcatgtcctgccagaagaacctgtccctgggctgggaatcttatattaccttcctctccaatgagaagagaagttcaaggctcacagacatgtgcatacacagctcaatgcactcagatccccctccaccactcctgcccccactacctacaggagattgactcctgctgtgcacataagctgggataatcagggtttctaaacatcagcttcaaaagtccaatgtcccaaagtggtggggggctggggacgaggtactctttcccatacccttggcttttgtgtggcctggagccgctgatatagagattggagtgggacacgaggtattcctttcaaaaacacaaaggcctatactttgagccctcccatttcaatcccccaccatgcttcacctttaagacctccaactccactttgatcccagttctcaggttcaaggcctcacaaggccaaaatcctgaagttacccttctcaaactcccttgcctttaacatcatcagaatcaacctcctacccccactctgtcccagcagcaatagcctgctaatcttttagccactaatcttttaggcactaatctgctttccaaactcttggcacctgaactatttatagcagtgttttatgcccccccaccaagaaccctattcttttcccatgacccccaccaatcaaaacactcagaggactgtgggtataagaggctggggaggcaggcatagcaaccagagctggagactgatgtgaacttcatctctctccccaggtaatattccaaagccctctacttctagcccatactaagccctatatcccttgctcttagcatccctcttaatatatcaggcagcagttgagggacacccttcctgacatagcctatagacattcaggccta

SEQ ID NO: 44003 - DNA, 2300 bp, Homo sapien
tgtctccattataccccttctatgaatccagagtcatcctctcagcccttgggacattagggttctgcaatctgttaatttaacaaagggaagtaacgatccatattgcctactgggcataaataccttggagatgaagatgcctagctgggaggcctttcctcctcggatgttaaatcccaactgtaagacaagagcacagaatgggggctcaatggagaccacaaacacaagaacaactagtagcatcatcgtacaatagctcagcttgtgtgtccctgagaggaaagtcagaagttgcagaagtgttatctcagcttttctgtccacaagaaggaaagtttcctcacatctgcacctgctttccaatccatccccccaacactgccaatttgtggtatggatgaatctagcctgaaataaggtttcataagttcacctgagctccaggaggcttcttcagtgtgatggttcggggcagaaactgggtcaactcattgttgtagtccgggtggtgtaccctctgcaagacacagcaaccccagaaattttaccagtcttacttcacacctaccttcatctgaaacactaatgaattaccctgaagtcaggaaaaggaaaggtcatagacttaatttaagtagaacagataacacagactaaatgagtagatggatagcactggggcagcccagtagctccccatttcttcaccttttttttttttttttgagatggagttttgctcttgttgcccaggctggagtgcaatggctcaatctcagctcaccgcaacctctgcctcccaggttcaagcaattctcccgcctcagcctccctagtagctgggattacaggcatgtgccaccacgcccggctaattttgtatttttagtagagacgcggtttctccatgttggtcaggctggtctcgaactcccaacctcaggtgatccgcctgtttcggcctcccaaagtgctgggattacaggcatgagccaccgcgctgaacctcttaacagtatggaaatgaaggctccaaatttccagaattaaccggtgtgaacagaccctagcaggaggcttccataaagaagttcccaatgggtcctgttgctcagaatccagcttctgggtcctctggctacaagtgctaagattcactctccgtttcgccttctaaccctgctatcctacctttcatgcatcatctcatgcccacggggaaaaaaatctcctactcaggaatacagatggttcccacctcatgaggaggaatccatgctggaggattctcataggcaggcaagaaaaccaccgggtagtcatcataaggaatccggctgtccatctcgggcaaggccctggaagagtgaatcagaacagacaaaaagtggttcaaaagggagagcagcccagcaagtttcagacagcagctccaacccattccaaggcagtcagtctacaggcccagcccatatctaggtgttaaggttggaggagagaaggaagacagaagaaaactcttaacttagctaaacatcttctggatgccaagcaacctgtcaggtactctagaaagaggacctcatttttcacaatcctgcaaaacagatgttaccgtctcaaacctggagaagaggaaatcagggtcgagtctaaaaagatctactttcgaagcccaagggagtgttaactatccgcagggactcggggcaaggcaccgccccacatttcctagatgtgattagtaatggtagggtccttagatcgacccttccttcacctgaccagccacctcccacgtccccgccccacattctgcctgagacccgcactctcagccgcataaacgccgcaccacctcaccagtgggcagtccacagcgacctcagactccgctcactgacaattcagtctgggaaccggaagcggatgctccgcagggtcgaaaagaggccgggccagggtgcaacgagctgaccctccccttcccaccgcgccggcctgcgcgcgccgacgtgcgcgctccgccctcgggcagtccgcactgcaattggttggcgtctccgggacggatttgaaacttggcggttaaagctccggctgggacagggcggcgggaggcccagggagaacggggaagggacatttagtttggtgagttacgggggcacaccttagctcagaacctgtttttacccagtaccctagggctttggttctttgtcgccgtccccgttggagttttttctttgcctttcagaagcccgtgcactctctttagagtgcagggctga

SEQ ID NO: 44004 - DNA, 2300 bp, Homo sapien
attattcaagacccatctcaaagttttcccactctgtgaaattcaccccaaattccccaagcagagttagagccatccttttgtttttcataccactttgtatgagagcagagctactacttccataggactgactctgttgtatatttttaacttgaaaaatttttcttctaaaagataggtacaaaaaatttaaaaatttttatatattcaaaattatttatgtagtcatctatctccattcctatcccctggactttgaactccttcagggcctcgaagctatattatttatcacctgaatccctcaacaagctttgcagtgcctgggcctcaagtaggttggcacacttatcaccatcagcaaccaccacagagtttataatctaatgaagttccaggataaacaaacatatacaagtcaaagatgaacagaaccacataaagcaaatacagaataaaactagcttcaagggtacagagacgttgacaaatgttattaggctaagggcttcttgaaggcaggaatcatgattcatcgattcctgtatttgcagtgcccaagcacagtgcttggcacatagtatatgctcaaggaatatatatgttacgttcgaggaatcaaatcgccttacctttaaatacaccttttatgagtggcgctactgctgtattgaagacttcttcctgttcagtagagggatcaaatacaaaatcgtaggtgaaggatttatctgtaccaaccaccacctagagaaggcacgggacaaggcgtaaggttaaaaatgaaaggcaagaccacacccctcgttaccatttggccccagctgttcagacacaggctctggactctgctacgcacctgaggctctccgggcacgaaggaaaggcacatctggcagccctcgctaatctctttggggaccagagggcgacaacgcagcgccactcttacgggaattcccttcacctcttccttcatgatcctatctcagcaccgtctctgcgagggggaaaaagaaggctcgctgatgaatgttagtaggtcagcaggggtgggagggcgtcctccccggttccgaccctcctcagcgggaacactgacttgggagattcacgctccatgacttggccagggctggaccgcccgtcagccctgcactctaaagagagtgcacgggcttctgaaaggcaaagaaaaaactccaacggggacggcgacaaagaaccaaagccctagggtactgggtaaaaacaggttctgagctaaggtgtgcccccgtaactcaccaaactaaatgtcccttccccgttctccctgggcctcccgccgccctgtcccagccggagctttaaccgccaagtttcaaatccgtcccggagacgccaaccaattgcagtgcggactgcccgagggcggagcgcgcacgtcggcgcgcgcaggccggcgcggtgggaaggggagggtcagctcgttgcaccctggcccggcctcttttcgaccctgcggagcatccgcttccggttcccagactgaattgtcagtgagcggagtctgaggtcgctgtggactgcccactggtgaggtggtgcggcgtttatgcggctgagagtgcgggtctcaggcagaatgtggggcggggacgtgggaggtggctggtcaggtgaaggaagggtcgatctaaggaccctaccattactaatcacatctaggaaatgtggggcggtgccttgccccgagtccctgcggatagttaacactcccttgggcttcgaaagtagatctttttagactcgaccctgatttcctcttctccaggtttgagacggtaacatctgttttgcaggattgtgaaaaatgaggtcctctttctagagtacctgacaggttgcttggcatccagaagatgtttagctaagttaagagttttcttctgtcttccttctctcctccaaccttaacacctagatatgggctgggcctgtagactgactgccttggaatgggttggagctgctgtctgaaacttgctgggctgctctcccttttgaaccactttttgtctgttctgattcactcttccagggccttgcccgagatggacagccggattccttatgatgactacccggtggttttcttgcctgcctatgagaatcctccagcatggattcctcctcatgaggtgggaaccatctgtattcctgagtaggagatttttttccccgtgggcatgagatgatgcatgaaaggtaggatagcagggttagaaggcgaaacggagagtgaatcttagcac

SEQ ID NO: 44005 - DNA, 2300 bp, Homo sapien
tatcaggccaatgattcatctcaaatggttcagggaaaaaatgttttttatgctgttcttgcaacattctatacgtttgaaattattgcattaatatcttaaaattttgaaacaaaaatttcagtgttccttgagccatatcattaaacaaaaaaacgtgaaaaaatatgtgaatagctgttgcctagaagaaggcttctaaaggaatgaactaacatcactgggtagaaattaccaggaagcaaatttcatctcattataaagatctttataacataattagacttgtccaaaacccaaatctcaactggactacctgtgagtcagtgagttccctgtcaaaaaaattttagacactggcagttcacctaacagatattgttagaacgcatttttctttggatgaaaaacaaactagatgatatacaaatgtctctttcaactttaaggcactagcatgccatgattctacttcttttaaacgaacctctgttttgaatcttgaataaccactgtattagaataataattagacatctctcaggcactgctcccttctttagaaccctgctatggtcctcaacagcattaaagacttagcttccccagtaaagattattaactggtgatagtattcagaggctttaggcactccccttctccacctaaaagaagtatactcattattcaagacccatctcaaagttttcccactctgtgaaattcaccccaaattccccaagcagagttagagccatccttttgtttttcataccactttgtatgagagcagagctactacttccataggactgactctgttgtatatttttaacttgaaaaatttttcttctaaaagataggtacaaaaaatttaaaaatttttatatattcaaaattatttatgtagtcatctatctccattcctatcccctggactttgaactccttcagggcctcgaagctatattatttatcacctgaatccctcaacaagctttgcagtgcctgggcctcaagtaggttggcacacttatcaccatcagcaaccaccacagagtttataatctaatgaagttccaggataaacaaacatatacaagtcaaagatgaacagaaccacataaagcaaatacagaataaaactagcttcaagggtacagagacgttgacaaatgttattaggctaagggcttcttgaaggcaggaatcatgattcatcgattcctgtatttgcagtgcccaagcacagtgcttggcacatagtatatgctcaaggaatatatatgttacgttcgaggaatcaaatcgccttacctttaaatacaccttttatgagtggcgctactgctgtattgaagacttcttcctgttcagtagagggatcaaatacaaaatcgtaggtgaaggatttatctgtaccaaccaccacctagagaaggcacgggacaaggcgtaaggttaaaaatgaaaggcaagaccacacccctcgttaccatttggccccagctgttcagacacaggctctggactctgctacgcacctgaggctctccgggcacgaaggaaaggcacatctggcagccctcgctaatctctttggggaccagagggcgacaacgcagcgccactcttacgggaattcccttcacctcttccttcatgatcctatctcagcaccgtctctgcgagggggaaaaagaaggctcgctgatgaatgttagtaggtcagcaggggtgggagggcgtcctccccggttccgaccctcctcagcgggaacactgacttgggagattcacgctccatgacttggccagggctggaccgcccgtcagccctgcactctaaagagagtgcacgggcttctgaaaggcaaagaaaaaactccaacggggacggcgacaaagaaccaaagccctagggtactgggtaaaaacaggttctgagctaaggtgtgcccccgtaactcaccaaactaaatgtcccttccccgttctccctgggcctcccgccgccctgtcccagccggagctttaaccgccaagtttcaaatccgtcccggagacgccaaccaattgcagtgcggactgcccgagggcggagcgcgcacgtcggcgcgcgcaggccggcgcggtgggaaggggagggtcagctcgttgcaccctggcccggcctcttttcgaccctgcggagcatccgcttccggttcccagactgaattgtcagtgagcggagtctgaggtcgctgtggactgcccactggtgaggtggtgcggcgtttatgcggctgagagtgcgg

SEQ ID NO: 44006 - DNA, 2300 bp, Homo sapien
aaaaaaccggggagggggagtgctgagtaactagtaatctggattatctgacaagagaaaatataaaaactaatctacaaaataaacatttttaccagaactaagcccaaacagaaatatacttttttttgaaaccgaatctccctcagtggcccaggctgaagtgcagtggtgcgatctcggttcactgtaacctccgcctcctgggttcaagcaattctcctgcctcagcctcccgagtagctgggaccacaggcgcccaccatcacacccagctaatttttgtgtttttagtacagatagggttttgccatgttggccgggctggtttcaaactctgacctcaagcgatctgcccgcctcggcctcccaaagtgctcgattgcaggcgtgagccaccacgcctggccaataaactcaaacagaaatatattttatgggtctttctgcaaacagtactgataacataagtgataacgaaaaacacagcctctgttcaataatgccttctatttaataatttaaaaaatacaaacgggggaaaagaaaacacaaaaaatttaccatcctatggcttggtgtggtggctcacgcctgtaataccagcactttgggaggccaagatgggcggatcacaaggtcaggagatcaagaccatcctggctaacacggtgaaaccccgtctctactaaaaattcaaaaaattagctgggcgtggtggcacgcgtctgtaatcccagctactcgggagactgaggcaggagaatcgcttgaacccgggaggtggaggttgtagttagccgagatcgcgccactgcactccagcctgggcggcagagcgagactccatctcaaaaaaaaaaaaaaatttaccatcctatttctcagagataaacatcaaaataattaataatttatatacttttgatcttttcctatccatacactcatatttaacaattatttttaagctgcttttttcagttaactatattgtgaacatctttgaataaatgatgcttttttttttttttttttttgagacagggtctgctctgtcacctaggctggagtgcagtggcttgatcaaggctcactgtaacctctgcctcccaggctcaggtgattctcctgcctcagcctccaaagtagctgggattataggcacctgccaccatgccctgttaatttttgtatttttagtagagacagggtttcaccatgttgcccagtctaatgttaaactcctgagctaaagcaatctgcctgcctcggcttcccaaagtgctgggattacaggtatgagtcacggaacctggctcattaatggatgattctttatcaattctcaataaaagcaaaggcatatatcacattgaattatgcttaaatgatgatatttctgtaagcagcctgataatatggttcaaatgcattctgagagttcagatatgaagtagatgctttcattgactgtaaaaagcaatgttgtttccttttcagataaatactgttaatcaagaaaatacatgccagaatcctttctttttctttaatttaatttctgtaatttaaaattgcttaaggtaggaagacagaattttcaagctccaatggcttttgacagtggcttggccaccttcatttagtcagtcatatcttttaagtgtttgatttcttagcttctaagggctatcactacggggacacattttagggttgggttttgttttgtttttgtttgttttttgcttattttgagtagtgcaaggtcatggtacccacagaacttttctttgtgtctgccattcttaagagactgtattaagagagcaatctcagttttattacaaataattgctgaaggaaatggagtatattgattagatgaaaatgtttaaacaccactatgcatgtgacgtctattttgtcaggatataatgcaacggtcctggcctatgggcagactggctctggaaaaacctattcaatgggaggtgcatatactgcagagcaagagaatgaaccaacagttggggttattcctagggtaatacaactgctcttcaaagaaattgataaaaagagtgactttgaatttactctgaaagtgtcttacttagaggtaagcaatttatgtttaattattctgaattcgaaattgtctttgggtcgaaaaataaatccaaatcaggtttttcctgacatgactcaaattagtaagttgcattttaattaattgatagagaaaacttactgactcagttggatccggctcccacccagttctttccttggtg

SEQ ID NO: 44007 - DNA, 2300 bp, Homo sapien
ttcttacagttctggagactgagaagtccagggtcatggtgccagtagaatcaatgactggtgaggacagacatcctggcagcctcacatggcagatggggaaaagggataaacggtgtgtccccacatggcagaaggggcagaagggcaaaagcaactagctaattctctccagtcctcttatcaggcaccaatcccatccatgaaggtagacatttcatggcctaatgatctcctaaacgtcccacctcctaatactattgcattgggggctaagtttcaaacgtgaattttggaggagacgcaaacatttaaactatagcatgatttatttatcatttaactttgcttcatatatagtatcttaattaattccctaccacaacccaataaggtaggtagatttgcctcattttataaaggaacttaacccaagatcatataactagtcagtgacagagccaggattgtaagctgtctattttaacaccaactatgcacttaaccattatactatatagcttttccacagtaagcctaataatgggaagttaattgcttcagcagaacttcagaggttattacagtgtttaagaagtaaacctcagaattaaccaaagtggaaaataatctttatcttttttaaagctacagtaggaaaggtatttcactatggtataatgaaaagagcataggacttgactaaaatcttgagatagaatctcaggcctaccatttactagctgtttgaccttaggcaggtcatttaacctctgagcttctttctttatctgtaaaatgagaatgataataaaaataatgatgatgatatggtaaaaaaaaacctgttcatccaatttcacagcattaatttaaagattatcataatggatataaaaagtaaataactatacagatggttgtcatggtgatagttatttatctatctgctttgtttccatgggaaagggcaagaagtgccagtggactcaatcatacatatccaacatttggacctttgtcctttacttaaagaggcactccaaaaagtgaacaagattaagaagttttctcaagattgatgactcgatatttttatggggtctttatttcttttctctttctcagaagaaacataggtatatgttggatgcattaccaagcaatttaaatttcatttcctgctattaggtattaatattaaccgaggcctcctatgcttgggaaatgtaatcagtgctcttggagatgacaaaaagggtggctttgtgccctacagagattccaagttgactcgactgcttcaaggtaagcccaaagtgcctccaaaaataagagagtaactcaaaatgatagtgctgagacagcaaagatgaaataggtaaaaagccagctatttggactatgacatacacagttgtctaattgataaatacgagagagtgctgttggcaagcaggtttctaagataatggaaaaatatcttcatatatgacattgagagccaagaaatctgtagtgcaccaactgtactttgtactttacacctgaaagtgaatttggttactgtttctttaattattagtgcggctaagcagaattccctggagagttaaaatccacctagagggggcatcctaagaatgtttaattccactagtggctcctaacttacttaggccaggccccagttgttttaacctgattaactgctgaaatcacaatcccttttgagaaaggggacacatgcaataggatttaaatgtatattacatcagaaatcttagatatgtatacatttcctattatttcaatataaaaaacactaagaactttttcttatagctctgaattttaagtcaccaacccgaatggacggctttgcttatatcctacttgtttgatttcatttcctttcgttattctttattgttctttttcagattctctaggaggtaatagccatactcttatgatagcctgtgtgagtcctgctgactccaatctagaggaaacattaaatacccttcgctatgctgacagagcaagaaaaatcaagaacaaacctattgttaatattgatccccagacagctgaacttaatcatctaaagcaacaggtataagggacttaaagtttgatgggaaaaattacaagtatgtgagtggaatgatagagcttctgttttcagtttcttctttatcagaagtttagagatgttggttaggcattatgtttgttcggggacctcttaaaataactcctattaacgtgtttgctgtccatttaagattgggggt

SEQ ID NO: 44008 - DNA, 2300 bp, Homo sapien
tctgggagtacccatctaaggcatttatttctttctgttttttgtttttgtttttgtttttgttttttgatttttgttttttcttcaagatggagtcttgctctgtctcccaggctggagtgcagtggcacaatcttggctcactgcaacctccgccccccaggtttaagcaattctcctgcctcagcctccagagtagctgtgattacaggtgctcgccaccacgcccggctaattttttttgtatttttagtagagacggggtttcatcatgttggccaggctgatctcgaactcctgacctcttgacctgcctgccttggcctcccaaagcgctgggattacaggcataagccaccgtgcctggctaggcatttatttctttatagaggaagatcctgctaccttgactgactataaaaataaaaaataaccattctatttacttttctgatgcattgccattatttgatatgtctgttcgtagaatggtatgtccccataagaactggctaggcttgtacattaatagaggtatactaagcggtagatgcataaaaagaaagggtagagtccataaaatgggttaaactttggccttttggaatggctaaatgtttcactctggcccaaatgtctctggcagggcaggagaagtgcaagaaatatgtcagttgccacatgaccttattttttataagagctacacaattgtcctttatgaagaagaaagactcttgagagatgggaaatggaaacgtgactattggggtttctgtaactataaaatgggtccaatatcttaaacagtctctgtatacacttaaaaaaaattaaataaccaatataaaatccaccagtaagctttacttcagactctttccctaaaccaaaacatttgttactgcaggatgaaactgttgcttgcatggctgcagccattgatactgcggtggagcaagaagccgtaagtaattggcccctttgtgtagaaccaggagctctaactgccgtttcctataatttatcactcaactgaaaaagagaacctgtgattgttaccatcctccatagaatgcctgttaaatccagaaatctttagtgtaaatctcagcttcataaaatccctaccttggataggctctaccactaatagtataactggtaatggggggcaggacttctcaagaatgtaatgttccatatttgcaacccagctgactgatttcttgttagaggctagtattctgcatcaaccgtccagcaagttaaaaatgaggagaggaaaaaatgaggaaattatggcaaagtcaaaaaagcattagaggagaaacagaagagaattttttctatggatgagatattaggggctaaaagaaccaaggaaaataatttaagtgttcagatcacaaggatagataaaatgtgttagatgttgactaaaggttataaagacaaaatgaaaggctggatgatggattgcttgagacaggcttttctccctaaaatgaatctatgtcagtagttttcacattctgaaagaaggaaaatactaggtcaggtactagaggtcagctgtgtgagaacaaatgaacccttttctcaatttccaggaccttctctcctgtaagaaccccttggaatgaggtaaaagtaagaaatgccatccagatcaataaaggaaagagcaaagaaagttagttgatactaaaagagtccattaaagtatataagaaataaggtgcttgagagagcagggaactaggctagctatttatttcagatacttaaaacaaatgtatgcagagccactgttgtaaaggaacagagatattgttaatggagaagtgcctgtgagacttgatgaaatagtgcctaaggaactccatttgcttgtttctcttataaatcattatcctgatttttttccagcaagtagaaaccagtccagagacgagcaggtcttctgacgcttttaccactcagcatgctctccgtcaagcgcagatgtctaaggagctggttgagttgaataaagcgcttgcactgaaagaggccctggctaggaagatgactcagaatgacagccaactgcagcccattcagtaccaataccaggtaaactatttcctagggcagtatttgttcatgtctacagtctcttaaactgaatgggaagaaaacaacaagcatataatttttgatgatgaaaagacaacaaaatgtatatagtataatgggagttgtactgttggtttaaaaagaggatacattcaggacagggagcatgtaattttgtt

SEQ ID NO: 44009 - DNA, 2300 bp, Homo sapien
cgcttgttgagttttagtgtagtctcaaagaagactatttgcagttatctgaaaaggctattaaaatactccttttcccatctgcatattcatgtgaggccagattgtcttcatttacatcaactagaacaacatgtcacaaaagattgcatacagagggagacataagaatccagctgtcttcaactaagccagacattacagagatttgcaaaagtgtaaaataattccttttcttactatttattatctcagaaaatgctacttttcagaaaatatgtaatgtataataggtttatgttttttttttgtttttgtttttttgacagagtctcactctgtcacccaagctggagtgcaatgacgtgatctcggctcactgcaacctccacctcttgggttcaagcaattctcctgcctcagcctcccaagtagctgggattacaggcacctgccaccaggcccagctaattttttgtatttttagtagatacggggtttcaccatgttggccaggctggtctcgctcctgacctcaggtgatccacctgcctcagcctcccaaagtgctgggattacgggagtgagccaccgcgccccgccaataggtttatgatttttttttttttttttttgagatggagtcttgctctgtcgccaggctggagtgcagtggcacaatctcagctcgctgcaacctccgacttgctggttcaagcaattctcctgtctcagcctcccaagtagctggaattacaggcacacgccaccacccctaactaatttttgtatttttagtagagacagggtttcaccatgttggccaggatggtctcgatctcctgacctcataatttgcctgcctcggcctcccaaagtgctgggattgcaggcgtgaactacctcgcccagcctaggtttatgatttttaagtgaattaattttttttttttttgagatggagtattgctctgtctcccaggctggagtgcaatggcacgatctcggctcactgcaacccccacctcccgggttcaagtgattttcctgcctcagcctcccaagtagctgggattacaggcacccaccaccacgcctggctaatttttgtatttttagtagagccggggtttcaccaggttggccaggctggtctcgaactcctgacctcaggtgatccacccacctcggcctcccaaagtgctgggattacaggtgtgagccactgcgcccagctaaaatttttttcagttgtactttctaatactataaatctctataggtataacacatgtgaacagaatgtcctagatgtcttcaataatttttaagggtgtaaaggggtcctgaaaccccaaaatttgagaactacagtcttagattattttcatacccatcttccttatagtaccaaacttatcactgcatatgaagcacatgctggtatactctttctcactagacacagaagaaatttgagaagaaagctattaattaaactgaaatactgtgtagattttggtctaggacatacttgatcagaaagtacccagaagctataaccagggtcagaatatctagtcttcttagaaacttctcggtcttgtggcaggcacatcaagataacctctcacaatgccagccatgggtatcattttggtacttgattgtagtaaagagcatatctacctgttcttttgagctttttccttcaagtctccaacctgaatcttatccttgcatgggtggaccatcatgtcacagtctgagcttatatggcctcaagacaaagtaacatattatacttaatccactacaacaaaagccttactgtgataagtctttccaagtcccactttatgacccatttatttcaaccagtatttaatggaataaaaccatttaaatagtctcttagagtccctttgttacaagatttgcgatactatgtaaaatcctaaccagatgacttaaacattatttaaatgatatttaactgatagctccatccataaaattatttgaagtttctcctcagagctcttcccccttcttgatgttcaggctacttgcaataaggcttactgtttctttccctgaaggagtgctcagattgctgacctacagcagaagctgctggatgcagaaagtgaagacagaccaaaacaacgctgggagaatattgccaccattctggaagccaagtgtgccctgaaatatttgattggagaggtaaacatcactctaaccagcagttaggaggctggctgtgtaggttgaaatgggatgttagccttgaa

SEQ ID NO: 44010 - DNA, 2300 bp, Homo sapien
gtggcctgacctccactgtagaacctgcctggcttccagatttgggaggaagaaaccgcatttactaaccatctccatgttcttgctacagttttatttgttcttcatacacacacaaaaaggtcaacatagatagatgtccttattttgcagatgaggaaactggggtataaagaagtaacttacccaaagtcacaaagctagtgagcaatagagctaggacctgaacgcagagctaccatccaagcttcactctagccaactctctagagtgccagcagcagccacttctaatgccctgcagcctaatttcttagtgtaggaggggcgttgcaccacactgctgtccagtcccaggacagaacagcactggctccttgcattctcctttgaaagatgcttacgccttacagtctatcagtgttctctatctctgcttaaagctaaaagggggccagccctggaatgccatacacaagctgctgactggccttgtagccttctgaggtagatgctcacaagccctgcgcttcatatccatgcattctgaatcccaaaacccttctccccaaaaaagctcccaaaccatccccaaacactcaaaagccaagactcctctagaatccaccagagcccaagcaaaagaaattgagcaacaatctgcctagaatgaagcctgccatggactaggtgacctgctggtcctccctggcctcctgccagcaagcagccctgcttctctttgcattttaatgccgagggagcaagggagcctctgccattgccaactagagcctctggatacaatgggaagcctgagtgggaggggggccagctcttggcataagagagccagtcttccttctcactgtttgaaatccagtgtgtgttgggggaggggtaagcaggcttatccccagagaaaacatcctttcccaccaacactgcactaatagcccccagacctcgagtcaccacatcaggcgtaatgtagagggagaggtcaaccaagccagcccctggcccccatcccacccagacccctgtgctttagcactaagcaaactatagtgtgctagccagcccttccctgctgatgctgatgctatagtaacagcatcttttctatgtgttcatcttccaaaagcctgtgaccccaatatactctacactcctcaaaagattcttggaaagagactcatatgccttagggacaaggcagcagaaatgacacaagtcctgaatgagcatctcctgtctggggtgatgagggaaggtgggagaactgctagtgtcacccaggatccacaaggcccatggggacctctggtccagaaacggcaacttgctatccagagttcaggaagtagcttgcagcttctgttgcccaggctggagcacagtagcacaatctcaactcactgcagcctcgacgtcctgggctcaagcaatcctcccacatcagcctcccaagtagctgggacaaatgaccaaggcttgtctttgctttaaacctggccttgtgagatgtcccatgcaactacctagtctttggtaggtgcacaccatcatgcctggctaatttttgtattttttgtagagacagggtttcaccatgttggccaggctggtcttgaactcctgacctcaggtgatccacccgcctcggcctcccaaagtgttggggttacaggtgtaagacaccgcgccaggctgcagcttcttatacatgcaccttgctgaattagaagtaggagctcaataggggagggagcctaatgaatcaaggctgtatttccagggagcttgagacttgatgttaggcttacacacacgcacacacacacacacacacacgcctttccagtgggctggctgggcctcttctcctcactgccaagttgcaaagttgtgtggtcacctcccccccccacacacaccagcttcccgccagcctgtgccctcagccctcgcctccctgagccaggacaaagccccggcagtgactgggaggggaacaggaggagggacagagggatgggaaagcctgcacaaaggaattcctcaccccaagccccctgaccgccagcgagtaaagaagcagatttgctctccctcccgcttcctccctcccatcttcccacccgggctgtgcccaggccacagagcagctgcaggccttgggagaggacccacacagcctcctgtaggtggcaacagtgccacctgtttgactcatagggctgaaccgaggactgaaaaagggaggaggcagaccactcggagaggagctgggaagc

SEQ ID NO: 44011 - DNA, 2300 bp, Homo sapien
ccccagctccagctcctcacccctaccctaaccctcctttcccaaggcagcataaagagggcagttcagaagcagccacaccttcctgcttaccggacccacccactgtgcacccctctaagactccatagcctcgggagagctctgaggacaagaggtcctgtccctcagcccgcacgcacacatgctcacacactttgggtgtatccaggggctcctttacatactcaaagtcacctaaaatcatattgtaccgacagccagttgtgctgtcgcgtgcaaatgctgacacaaatcacataccgtctcgcgtagaatcagtcacgtacccagccaagtctggggatcagctcagtcagccaaacccagaagcataaggtacaggggtcccctgccccaagacaaccacaccccgcatacacacctttgccctgcgtttgttgtactttcaccaaagctaacttagagggtggggctcctaaaggcgagtctgggcttctggttggggttgggggatgactgggcaggaaagggcaggacttgaggggaggctctgtattttgaaaatccaaagattcctttagaagactgggagtgacccaggcaacatgttcacctcaagtctttctctttttggcagtgccctttgtcccctgagaggtggacacagagaatctttcagggatttgtgatctgaataatctctataaccatagcaactggccaactagctgggccttccttagccccaggtcagaactgtaacctttgcttcaggttactcctgcttcctgggctggaaagcaattcaacatggggttgcctccagcttggccaaacctgctttaacttgctgaactgagtttgtcccaccctgggcagtttctcttgagttcttacccccagggcaagcactccatccccagaggtgtgtgctgttaaatggggaggagctggagagagtggatatgaatcctgcccgaaaagaggctggacctcttgggtgtcccactgactctccaggtaacaagattaaagggaaacgaaggctctggagactgtctcccattgccaggcttgcagctggggctgctcgcctcatccactctggcactctgggcctgccccgtgacctccgttgctgagcagcggcccaggcctctgcctctcccccgggctcctcagatacactaggagggagactgggatctgccctctgccagggtccctgatggtcgagtgtcccttcccccaggccttcaccatggccgagtcccccggctgctgctccgtctgggcccgctgcctccactgcctgtatagctgccactggaggaaatgccccagagagaggatgcaaaccagcaaggtggagtagggatggaggggggaggctggaagtcagaaggcagaggctcactggaggggataaggaggccaattgtgctcatagacagcttgggggaaggggctctctctcccaggaagaaaatctccctcaaatatggaaagagctgccccccgagcagagcagcccaacacggggcaggcagctccctttagctgccacccgttggggactctgagtttgaagtaggtattggttgtgagtttctctcctgcccctttgcagtgcgactgtatctggtttggcctgctcttcctcaccttcctcctttccctgagctggctgtacatcgggctcgtccttctcaatgacctgcacaacttcaatgagtgtgtcatggattccccctgcttccccagcatacctgtcaacctgctccccaccctgggacccgggggtggcccactgtcagtcatcccccagccctgcccagctgctcaaacccagctctgctgctacccaatctccttagaaaatccctccacaaaatctcctcaatccttggagcccctggccacgaggggctttctcctcactcccttctagtcttcctggatccacccaccccacctcccctcaggccactattgacaccccttcccccacttggacacctccctctcccctcccacagattcctcttccgccgctggggacactggatggactggtccctggcattcctgctggtcatctctctactggtcacatatgcatccttgctattggtgggtccggaggccgctggcctaaccccacctcagccttccttcctgcttagttttagctccctattctcatcctggccactgagggagggggctaattcttgggtaggagggaagtaccagcctgggaagcccacctcagtaaccttgctcccctcttggca

SEQ ID NO: 44012 - DNA, 2300 bp, Homo sapien
tggtagggaggtgctccttacaattttcgctttgcatacatttattccttgattcaacccaccaccacttccactgctgtcactcactggttcaccaaaggttaggtaattatttacttgttttcattaatctttctatatgtatgcatagctcatatttatttcaatgttcaatatcagaagtgttttgggtctttatttggaagctgggtgatgttttgtgaccagaaatatgctgtaggaacttagctcttgtttatattaattagcctgtggtaaaattggttgtgttatacgttgtttcacttagtcccagttgccaaggacctaccaatgatgttaaatgaggacctactgtactacataattcacttatttattgtgtttatttttgtctgtgtcctctcactaggaggtaagctccccaagggcagggatttgttctgtttgttctgttttattttgtttcctgctatatccccaaatcctacaacagtgtctggcacacagcaagtgttccacgcatatttgttgaattaagaatgaatctctgagggccgggcacagtggatcacacctgcaatcccagcactttgggaggccaaggtgggtggatcacttgacgtcgggagttcgagaccagcctggccaacgtgatgaaaccccatctctactaagaaaatacaaaaattagccgggcgtggtggcaggagcctgtagtcctagctactagggagactgagaggcaggagaatcgtttgaacctgggaagctgaggttgcagtgagctgagatcacgccactgcactccagcctgggtgacagaatgagaatccatctcaaaaaaaaaaaaaaaaaaaaaaaagaacctctgtatccctaatacctaggtcaaggtcttgcacagagcaggtgctcaatgaatatttgctgaattgaactgagatgtaaattctgcaggagaacttagaatagacctgtcgtactagagtggttcacagcgtggactctggagtcaaataatcaggatttgcatcctgattctgtcacttccagctgtgttacctagctgtgttaacatctttgagcctcaatttctcattggtaaaatgaagataataatagcatcagcttggtaggatttgggtttgcgtgttatgcacttaggactttgtaaagacccaataattggtagctaaaaacaaaacaagaactgcaaaaaagatagtctttcttgtatgtcatccttcctccattcccccgacaagctgagccaggagagggtaaggagatgtccttggacaagtattcctaagctctattccagacccatagaagggtttctctctcttcaaatcccttcttaccttttcacctgtcctggactttcatcttgatatcctgaagttccttcccccatcataaccatgcaggggtggagtggaggagataggggtttgtgggccagggacaaggacttagagctttctgttaatccctgttctagggttgagttctttactggtgatggtagaaggtcaagtgtgaggtcacagtaatttcagggcctagagactgagagaacaatagtcttgtgtaggaggcattgacaggacagcgggcctcatatgctgccttcttctttggtcccctgtaagagaaagcacctccctcaccctgctccaacgtcctttctgtccatcctgctacctcgtctttacttctggtggccccagctcagagcaagcctggggacccattgaacatctccctgcaactccctcttggaagtggggtggggtggagtgggcagaggacaggctaaaactggcgatataagggcacaagatcgggtgcctgagctttctggtggcccacgtcctctgcccccgcccttagagccaacagttccctagagattgggggagctggggctgagcctgggggcgccgctgcctctgttcctttaagtagccgctgtttagcattcctgccgccgccgctgccgctgccgctgcctgcctctgcgcgctgattggctggaatcaactgagaagggagccagggagagatgctcttgactccactcagatccatcctggggaccagagcagaagcggtcctcacagcacccattctctgcttgagctcccgcttcttctttgccgctgggcctcggcccagaagccacgacgggcgacacggagccgccagtgctggagggggagccgtgggtgcggggcagcgtgggggccgaggccccgggacgcccgcccggccccaggccccgctcagcccgg

SEQ ID NO: 44013 - DNA, 2300 bp, Homo sapien
agcacatcccaggagacaacagcatctacatcaccaagatcattgaggggggtgctgctcagaaggatggacgcctacagattggggaccggctgctggcggtgagacagacttcatggggatgcccaaatggtagggtagggaggaggagctccagtaccccttactccgcctaaacctcactcagggatgaggcatcatgggggaatttcaagagttatcatctgtgttgtgtttgcccagatacaaaggccctaattctttctgtggccagggtcttgccctatcccctacctcctgcctctgctcctcacagcactatacttgggcctttgttagcatgctgttgaatttcactgaaaaggcatccctcgagttccctggagaagcctctccttcttccaagtcccagcctgaggcctctcctcttctaggtgaacaacaccaatctgcaggatgtgaggcacgaggaagctgtggcctcactgaagaacacatctgatatggtgtatttgaaggtggccaagccaggcagcctccacctcaacgacatgtacgctccccctgactacgccagcagtacgtactcatcagcccctgtccctggtctaaagctctgtcccctggtttctggaggggaagaagttcataccctttgttaagagagggcaagcagctttgctcagtggtggcactgtagcagccaataaggtttatctgaggcgccattattgctaattgaaaactttgctcagtaccccatcgtgaagacttgccatagagtcagcattggcaatttttgacaatttctatggagagtgaattttaaaaagaggagagagagaagccgcagaggatagtgcacagaactgagtccagatcccagttctgtctttgtttttttgtttgtttgtttgagacggagtcttgctctgtcgccaggctggagtgcagtggcacgatgtcagctcactgcgaactccacctcctgggttcaagcaattctcctgcctcagcctcccgagtagctgggattacaggtgcctgccaccatgcctggctaattttttgtatttttagtagagacggggtttctccatgttggcaaggatggtctcgatctcctgacctcgtgatccacccacctcggcctcccaaagtgctgggattacaggcttgagccaccgtgcctggcccccagctctgtcccttagagctgggtgcccttagacaagtccctttcacctgttttttgtttcctctttggcaaaagggagctaatgatgtatgtgctgccttcctcataggactgctgcaaggatcaaatgagatcatggatgagaaaacccttggaaaactgtattaggctatagagatgtgagggattattattagtcacacctctagtcatgcctttctttgtagactgccttgacttcagctctttctaagactcacaggagtgagccaaggatttagaaagggactgcggaggaggaaccctgggtggcgggtggatggagtggggaggtgcggcctgaggaatcagcatcccttggtctcttttgcatctgaagtggggtgtgggggaaagtccttgaggagtttggggtacctccctggaccagtctctgaacttttctctccctttcttgattccagcttttactgccttggctgacaaccacataagccataattccagcctgggttatctcggggctgtggagagcaaggtcagctaccctgctcctcctcaggttccccccacccgctactctcctattcccaggcacatgctggctgaggaggacttcaccaggtaagaccccgcccccaacatcccattcaatctacccagaaattggggaggggaggaatccgtttctggccggccacaggctccttgtagtatggcaaagaagaggataaggccctcatcactcccggctttggggtccgaggccctctctcaggccttggggacctagagagggacagaagtggctgcagggacaagctctaccatcagggggagtgccgagtgagtggccccggtccaaaagtgcagataaagaaaggatggggtggagcgtttagggggctgaggaggcgagggcagcggagtttcctgccctgagatagttgcagcccgctctgctgcaaccatttcaaattagagaagaaagcagttcagccggtggggctggcgggactctgaccggcccggtggcctcgccggcaacggccccgccccgctggcggcagcggcggcggcagcggctgcgcggggcctggaa

SEQ ID NO: 44014 - DNA, 2300 bp, Homo sapien
gtccattatctggggttgtttggtaatgaaatcagtgaaaatcatatctggaattgtttggtagaaaaaaaccagaatgttaaatttgtgtgagaatagcagactcaaggaaaacagatgttgccaagatctggaagacctctatgtctctgaagataaaagggaattgaatccaacacatacttcaacaaacctacaggaaagatggtaatgcaataaatcaaaattggcaacttcagtttattctttgtactagtgtcatctatatttgcaagcccttttaataccagtgcttactttctccaactttctatttttaagacatctcacatatgaatacctgtaattatgtgcagagtatggagctaatcagtacggtgttcatgtaggggttaattggctttgtagagagaaaagttctgttctgtgggcctagactgtacttttagtcttagaaagttgtttaaagatgtaccctgtcaggcgaaagtggaaccgggaagatcacagatggcttagggccaactaacaatgatttagaaataacgttgttattaatggtaaacacgacaggcatatcttatggaaaagacaatacattttctattttattccgccattgtttgcaaaggaccttagtcaataaatctcaaaagaaaataaaactagccggtttgtggttttgcttacaaagaatatggcctgagatttgtacagtttaagtattaatcttgtcattaaatgtttgtcactcattggaaatatttacatgttcttttccatatattatttcatttagattgaaaaaatattgggaaatatcctcagggatagaacaaatgttatgatatggtcttctgtaatttcgatttcctttgattatgagttatcccaaggtggttgaataaagcaggcaattacttgaaaattgtcttttacattccacaattttaatatcattgtgatttctttgtttaaaataggaacatttaagttctcctgggcttttcttaaaaatgaaaatcctcttgaaaggcgaaacatctaatgaagaactccttgaaggtatgatctctgtatgtgaagagcacaccattttgaaacatcactacaatttgttaaatataagatcttttgtagtatactaacaataggtgtaatttgatggtggctgagaaggaaaatgatcacccaggaaagggaaaatattgtcacccaggaagaaagagagaaagaagaaaaaatagtagcaaatttaaaaggtgtttttttttttaaaaaaagctgaataaaagcaatcagttttcttttagtccagcagagaactgtagctacccaacccttctgaagttgtctaccaccatgaagaaagaaagattacctattaatgggaaaagcctttgtaatgctgtgatttttataattacttgtttataaacattgctatttatttttcataattctccaaggaccagaatgtacactgcacaaaagttggtcattgggcaagtcacttaactttgctttgtttcttcatttagcaaaagagatattattattatctacctcatcatgttgttttgagaatcttgtgagaaaatgtgtataaagcatttaacaccatacctggtgcatagtgtgcaatatatgttacctattactgtagttattattattactgttattactactatatagatgcattacatgaagcaaaactatgcacactagcccttaacatttcagttttgtttagtcataaaaattatttactctaattcttttaatgttgtacatgcttttcagtaatctttaagagctgcattatttgtactatacaaaattatatgttagtatagttactgattatccaataaataataacaatttgttatagttagaactaaaattcaatttggcagtagccctaaatttagtactactgaatctttcggcggcctctagaattttagccaatcacttaagagacctcagaagctcaaatgtattggggattctgcatctctaggcaacagtatcacctcagcatacacagattgaaaaatgttagaaaccaggaagacaactctacttttttgcattgggggaataaacaaaccaactaaccaactaaaataatacacttactccaactaagacaacataggaagaccagagagatgattggagtcaccaagttgaagtacattagtttgggatgataattccttatgacagtgtttatccaaatgtaggtaagaagcagagtttaaaatgaaattgttctttattcacagatt

SEQ ID NO: 44015 - DNA, 2300 bp, Homo sapien
gatgcaaaagaagaggaattaatagcagtactttctgttttcccatttttcttcattgtactatgcaatctagatacaattttgaagagggaaaataaattacttttagtaacctcatcttgtccacgagatctaatgactgattctgagactttcaggatcaggaaggaactctgttaatgttcccagaaactggagccacaatctctcttctttatcctgttagccagctccatatctggcctgaggtgcacaaggcttaaaagaggggtatataggaagaagtgggaggcttattaatgttttgattctgtgtttgtctacaaatctggaggcatcatgttttcacactgttatctctgagtggagattagcatcatgcttagatttagctggaatcaaatttttacttacatattccacccctcaagccatttggtttggagatgggtgggacatgcgagcttgctgtgagactgcaggggagtctcctagtttcctaatgattggacaaaggcagggcaacagaaacgtcttggaactaaaaggctttttttatttttattttttatttttatttattttattttcattttttttgagacggagtttcgctcttgttgcccaggctgaagtgcaatggtgccatcttggctcaccgcaacctccgcctcccaggttcaagagattctcctgcctcagcctcccgagtagctggttacagacatgtgtcaccacgcctggctaattttgtaattttttagtagagacggagtttcttcatgttgggcaggccggtctccaactcccgacctcaggtgatccgcctgcgtcagcctcccaaagtgctgggattacaggcgtgagccaccgcgctgggcctgtttatttatttattttttgagacggagtttcgctcttgttgcccaggctggagtgcaatggcgcgatctcggctcaccgcaacctctgcctcccgggttcaagcgattctcctgcctcagcctcccgagtagctggttacaggcatgcgccagcacatccagccaattttgtatttttttttttagtagagacggggttttgccatgtcggtcaggccggtctccaactcccgacctcaggtgatctacccgcctcggcctccgaaagtgttgggattacaggcgtgagccaccgtgctcggcctatttatttatttattttttgagacggagttttgctcttgttgcccaggctggagtgcaatgtctcggctcaccacaacctctgcctcccgggttcaagcgattctccctcctgcctcaacctcccaagtagctggcattataggcatgcaccaccacgcccagctaattttgtgtttttagtagagacggggtttctccatgtttgtcaggctggtctggagcacccgatctcaggtgatccgcctgccttggcctcccaaagtgttgggattacaggcgtgagccactgcccccgacttattttttatttttaagagacatgatctcgctgtctcccaggctggagtgcagtggtgggatcatggcttattggacctaaactctcaggctcaaatgatccttccacctcagcctcccaagtagctggaactacaggcgtgtgccaccacacctggattttttttttttttttttggttcaggtgcagtctggcttgttgatcaggctggcctcgactagtctcctcagcttctaatatttctgctatttctgacctttgccactcttgcataaccagtgatcaacaatgtctacttgctttatttctttttctgttcttttttttgtgtgtgtgaagtcctgctctccttttggtaatcctggccatctgcacttttccctcaattcattgtcttatgctttcagaattacatcatatttgcttactctcagttattctcaccctgaactcaccaagtgactgactctctgaactgcatccccaggatctaaggtctagactgggtcgcaaggcttaggctccgtgacacagcgtaaaggccaagtgggagtggctttagtggcctagcgtgacaccgctagcgtcgctagggggcggagttttctgaacgtcctcgtgcgctgtggacggaggttgtggagagagcagggcggcattggtggctgcggctgaggtgagtggtttagtgggcaggaaggggtagaataggcttcaagcacaagttagttgggtagtttataactagcaagaatatattatagccattaggccaaaactttttagagcggccctaaggcagtgactttgta

SEQ ID NO: 44016 - DNA, 2300 bp, Homo sapien
tggggacccacacgtgtgtcggaggggggacggcgagggtccgggcgtacctaggattctctggcaaccatggcatgcagttgcatcaacggggccgtgacctgttgctggcgagacccccgccccgggagttagggctcccgtctccaccccagctccaaaccatttctagatgggggcaggaaaatctgggacctgagtcggggggcatcgggtggaacccttcctctctgctgagaggagagtgcgagcaatctcgggctgccctggggcccctctgggggcgcatctccaaatctttagatgtcgaagccccgcctcgctgttgatgcttgcaggtcagcctagcagggcttgggaggaagtaggggaacatttgcttactcccctgggcgacagctgcgctagttgagcagtgtgggcttggtgaggagggatggaattgagtcggtgctcacttttaatctgcagcgaggttggtcccctctccctctggggggtctgggggctgtgtctgtttgaagccccgggggaagcccctgggtggagctctgtttaattcccaaatagccacaggccaaggaactgacacattaggtttcaagattcctgggttgagattaggataaaccctatcagtttctggcaagagaaagagacctaatattgattgagcacttactaggcgccagccactctacttcagggggctttcacgtgccatttctgaaattagcccttccaaaaaccttgtaaggtattgtaattcctacttgtttatgaagaaactgaggttagaggtaaagtgacttgcctttgtcccttccatatccccgtcctcatttcccaatagctcctttgcttggtggagggggtcttgtaattcgctttcagagtttagggataatgagccctgtcgaggggtttttgtcttgtttttcaccagatcatcttcttcaattcctgctaggatgccgtggcaagcatttcgcagatttggtcaaaagctggtacgcagacgtacactggagtcaggcatggctgagactcgccttgccagatgcctaagcaccctggatttagtggccctgggtgtgggcagcacattgggtgcaggcgtgtatgtcctagctggcgaggtggccaaagataaagcagggccatccattgtgatctgctttttggtggctgccctgtcttctgtgttggctgggctgtgctatgcggagtttggtgcccgggttccccgttctggttcggcatatctctacagctatgtcactgtgggtgaactctgggccttcaccactggctggaacctcatcctctcctatgtcattggtgagatatggtgggggagggagggaactgcacagccagcaaaggggtttttggtcaggaaatctgggtggaagtattctttatattattcacaggacctcaatctccctaaatgtgcgggtttgctgggggtctgggggggggtgttgaaggtgtggagaaattgctcattctatccatctccgtcctggtttccttaattaagtgaatggttttggttcttaaaaagtaataataggccaggtgcagtggctcacgcctataatcccaacactttgggaagccgaggcagacagatcacctgaggtcaggagttcaagaccagcctggccaacctggtgaaaccctgtctctactaaaaatacaaaagttagccgcgcagggtggcttacacctgtagtcccaactactcaggaggttgaggcaggagaatctcttgaacctaggaggcagaggttgcagggagaggagattgtgccactgcactccatcctgggtgacagagtgagacttggtctcaaaacaaaacaaaagtaagaataggtgaaaaaggcagggacttgtgtgagcctggggtctgggaagaagggaacttggccacatgtttctctctctgctacaccaggtacagccagtgtggcccgggcctggagctctgcttttgacaacctgattgggaaccacatctctaagactctgcaggggtccattgcactgcacgtgccccatgtccttgcagaatatccagatttctttgctttgggcctcgtgttgctgctcactggtgaggcaaagagcagggtataatggtgggggttgggccaggaggggctagtccttggggccagggataaggatgggggatgggcctgagaaaggcttaagggaggtgataatggtggggaagaagaaaagctgggaaggaacctagaggcagggaaacaaagcttggactgaag

SEQ ID NO: 44017 - DNA, 2300 bp, Homo sapien
cataattactattttttgatgtgataagaacatttatgctctattctcagcaaatttcaagtatatacatgaatatacaatactattaactgtatcaagcataatacagtgttataactataatgaccatgctgcacgttagatccccagaacttagtcatcttgcataactgaaactctacatcctttgaccaacatctaggcaaatttacagaggcaaaaaaattgatttgtggttgcctagggatacggtgaggggattgggagaaaatggggagtgtctgggaatgggtacagggtttctttttggaatgatgaaatgttctaaaactgattgtagtgatggatacacaactctgtgactgtatactaaatcctattgaattgtactctttaaaagactggatttcatggcatttggattttatctctgtgataaataatcaatctcataatccaatcaatcacctaatctaagcaaccagatcatatacactaatatatcgttccaaatatgtatcaagtttttcttgagtactttccatgtgccaggcaggaagacttgacttcataatctcatctaagcatcacaacaaccttgtgaaatatgtatattatgtccagaaactgaggctcagggatgttaggtaatccacagtggctgagctgtgagtttaacctaggtgcaattccaaacacagcactcctaacgtctatgtaataaggtttcagttgtatagtgtgtgttttctttccctagttagattaggactaggagggcaaggattttattttatgtttccttcatagtctcttcattgctgtaccagctactacacatagtgctcaataaatgctcaataaatacttaatgaatgccaaatggagctgcagctggttgaaaataccaattctttcagaacggatttagattttagattcatgggtaatatattcatcatggatcattaaaagaagcaaggatatttgagtccatccttagtccccaagatgtcttggtggagcagggaccacactttcacaacctttggtgctttcttatgagtaagaattgattgggtcagatggattatggatctgacccaatgtgatcattcgtagattcttcgggtccttttctgtttcctagtatctcctagcctaaacggacctaccctgctgctgatgcctctccctgtttgtctttccttgtggccacatccctcttcttgttcatttgaataagatatggtgcctacgggaggcaggcattgaagtccaacaggccaggttttatcaaaggtggtcaacaataattatggtgtggtgtcaaacaagtcatgcctctgagcctcagcttacacatcaataaaatggaactaaacaagcttcctcctccaagatgttggtattgtcagaatttcacatttaatagtttaatatttataggcagctggagacacattatagagagattggggcctataaatcaatttagactggattaattatctgtatacaggtggcttgaaatcatcttccattctcctgctgcctgcattagaaacacccacagctgagcgtgagagctgaagggtcagggtcagatgtgtagacaagaaagctaaggaagaaagactgagagtgaggtggagactcccctgctgtgttccgcttcactcctgacacacacacacacacacacacacacacacacacacacacgcacccaactcccccccatcacaccccacctaccttccccattcctgcccagaatcactggtcctaacagggcacagaggtggaaaatctcatgggttctttggccaggaagcctcttattgtcctgttctgacgaccagcgagacaaatgggaaaagactgccctcccccttttctcgctccccggcacgccaggcttgctagtgaggatgggacgcagtctcaggccccacgcaatccttttgcaaagccaagaagtgtgtgtgttgtgtgtgtgtgtgtgtgtgtgtgtgtgtgtgtgtgtgtgtattgtgtgtagcgaggaggattgggggtgggatcccatgacgttaccggctccgcctcctggtgtatataaggggcgcttggcgcgcaacgaccccaagccgcagctttgaagcctgagcggccgaactcggcagctccaacccaactcggcttaactccgcctcaccgagcccagtccaagactctgtgctccctaggtttgcaacagctctctggtaagcgttggggacccacacgtgtgtcggaggggggacggcgagggtccg

SEQ ID NO: 44018 - DNA, 2300 bp, Homo sapien
gcaaggatttaaacccaggcagcctaagttcatgggtcacacatttaagccctacactatactaccaccatatctaatcacgtacaagtcgtatctattttatttcttcaatctctttcctatctcttccctcctctccattgtcaccatcaccacttgattcggagtcttattgtcaataccttcataattcaacttaaatataccttccatgttgtctacaaaacaattcttctaaaacataaatctgatcatgtatttttcctgcttaggatccttcagggactccctatcacctaccagaaagctttgtatcacctatcatgaagtcagagatcctttacttaatataagcggatcatcctttgtctgcccatccctagccagtctacctttctaaacacttccatcacacagtctgaattggcgataaatgcctaaaaatgctccactgtttcttatcgcaaggactttgtgtattctttctttctttcgctctctctctctctctcttttcttttccttttctttctttctttttttgatggagtcttgctctgttgcccaggatggagtgcagtggcatgatctcagctcactgcaacctctgcctcccgggttcaagcgattctcctgcctcagcctcctgagtagctgggattacaggcgtgtgccaccatgcccagctaatttttgtatttttaatagagacagggtttcaccatgttggccaggctgatctcgaactcttgacctcaagtgatctgcctgcctcggcctcccaaagtgctgggattacaggtgtgagccaccgcgcccggcctgcatatgctgtttcttattccagaaattacctttccctatttccactcctatttgtcctttatgtcttttcatgtctgttaaactcagatgtttcctcctccaggggaacctcccctaatttttccagttatacatttcctatgtgctgctttgaacatttacttattttgtatttgtcgcattatattagttttgtttacttgtctcccttgctagaatgttaactccttgagggcagggactcttatttaactccaggattttagtgtttagcatggtgcttggcacgtatttgcttagtggatattggttaaattgaattaaacagcaattgtgaaattgtagggcctcatactctgttgaaagaatttcaggcatcagtgatatgggaaatattttttgagtagaggagggcaggggaaaggtggagaaaggatgacctgaaatcatcacccagtctaccctttaatgtggagcatatgtaaattagtcatataaatattaatatttctatagatattctcatgtaaacatttattctatctccattatgggttgcaagcaacctcagagcagtgccaagtatggagttctgcggagtagaaatagaaggtatgaaataagtaccctcaatttgctgataaatgtaagattgagtacacctggagtgtggcaacaaggagtaagatatgcccaattttcctgaaaagtaagagagaaatgtctttctttaccccatcctagttgcttgctgctttcctggcgccatacgtagtgctgagtgcgccattgtgtgtggcgtgaactgaaaccatcagtggcacaggtgggacggctacgttataggttctcagtactattgttggaaccccaccctccatagaccacccttctattttcgcggaaaaccaggacttattcaggtcactgggcttcggcctatcactgtaggagcctggctcacggggcagtgcccactgttgattgatacacggtacgagacaatttcttgggttgaggagccgcgattggcggagccagcctgtgctgctaggcagggtattgggtactgcgtattggggatgcaggttcccgggtggccacaaacatcacccggaagcctgaatatggcctccactctacagggcgcgcagcagtcagcacggccgctattcagagcccggggcccaggcccgtgcggcgtgcgcgtgcgtgcgtgggcgcgcgtgcgcgccgccgccgcctgtgggttggctagttattttgcaagcgggaggggccgtgcgcgctcctgcctcaggcctctgtcccccaccccctttccccggtcccaggctctccttcggaaagatgtcggacacggcagtagctgatacccggcgccttaactcgaagccgcaggacctgaccgacgcttacgggccgccaagtaacttcctggagatcgacatctttaatcctcagacggtgggcgt

SEQ ID NO: 44019 - DNA, 2300 bp, Homo sapien
tggtggcacatgcctgtagtcccagctactcccgaggctgagatgggaggattgcttgagtgcagcaggtcaaggctgcagtgagccaagatcacaccactgcattccagtctgagtgacagagcaagaccctgtctcaaaaaagaaggaaagaaggaaggaaggaaggaaggaaggaaggaaggaaggaaggaaggaaggaaggagaaagaaagaaagaaagaaagaaagaaaaagaaagaaagaaagaaagaaagaaagaaagaaagaaagaaggaaggagaaagaaagaaggaaggaaggaaggaaagaaagaaagaaggaaggaaagaaagaaagaaattatacgatcgcatgtaagttatataatcccagttctgcctcgttgggcaagtcaatctctgagcattgttagtgtcttcatctataaaatgcggataatagtggtacctacctcatggggttgaattgaggagtaaatgattgaggagtaaatgaactaatgttcgtaaagcaatttgcacagagactggcacataataagggctccataaattttagccataattaccagacatgtttcttagaacggtaaccttgctggcagctctgaatataaactgtagtgaggtaaagactgatggaaggagatccaattaagatgatactgcacctttttttttttttgacagggtgttattctgtcacccaggctggagcacagtggcatgatcttggctcactgcaacctccacctcttgggttcaagcgactctcccacctcagcctcccaagtagctgggactacaggtgcgtgccccacaccaggctaatttttctatttttagcagagatgggtttcaccatgttggccaggctggtctcaaactcctgacctcaagtgatccgcctgcctcgacctcccaaagtgctgatattacaggcgtcagccactgcacccggctgatcctacaatttaaatgcagttataaataggtcttgaactgggatttggatgtagaaagttacggagatgaagaagtaatgggtaattacctctaagctgctgcttggagcttgggagactgggtagatcaggactaccataagtcaaattcagagataagggtagccagaggataggggtgcgggtgcaggaacagataatgagtttggacctgttgaatgagaagtgaagccgttggagatgtgaacctggagaatatcggtgttgaagggaaagccagaagagccagtggaggaaactgattggtaagtgagacctcactgtcagtgggaactgcatatggggggatgaaggcgggtggagggaggaggaagggggtgaggaggaacaccaccgtgggctaaccatttgtttatgttacacaagccccccacccaactctccaacgtgcatacatcctattttctagtcagttccttgcttcttgcttcttggtctcctgcatctttaagagaataattttttcccttttgccgtctcctaaatgaaggagggaaagggctagcacctctcaatctggtcacctacacgactctgaatcacaagggagacaatggaaagggggaaagggcgaaaaacgattcttaagaaaagaaagagtccgcgacgacttctaataattaaagttccacctcgttatatcctgccacgccgctctcctgccgccgtatcgggctcctggccgcgaagcaggacgggagatgtagtcctcaagagtgaccagggtggcacgactgcagaactcggtttcccgactggctttcgaggcgcgtgcgcagatggctgccccggcgagtggtaaacagagacgtcaggagggggctgctgcttggagcaaaacaaaagggaaacccggggggcggggggtggggggggttgataggggaatcggtgcgggaataagggaggccgcagccgcggggacccggaccctagtaagagtggcgagaagggaagaggcgggggaagggggagtcaggggaggggcaagtgacgcgggggagcggggcgtgggggagggcagcaatccgggtggaggaaatttgggaggagtgtccggggggcagcaacttaaaagggggagggaactgcggctaaggagacgttcggtgatgggagcgcaatatatgaggggatacagtgcctcaggtttaaaagagcaggaagctgagtgagaggttgcagaaaaagtgtcttcgctcggcagaggttacaggtggcatctcagaaagagctttgaggctacaggctgtagtcgggaaggggatcggag

SEQ ID NO: 44020 - DNA, 2300 bp, Homo sapien
agagtctgtgtaccacttgctagttccaaggcctaaagaagaggagacaaacgggccttgtggctattaagtagtagggaaaggaatggatcttctcaagtagatccagaattagaggataaaaagaggagaaatcatagtgccaggtcatggtcattgtggtccttagttactatgaggtgaggccggatggacaagtgccactccttgaaggaacatcagcacagttgaaatgccattacctcagggtcccaggaacacaaggagttctttggctaaagaaccctggaacaagaagcatcattccccaggcaaaggtgctccttatcttaagagcaccagtcagagaaacaagtagtttctgaccgtcccatgtactcagcctcctagttgctctaagcacttctgggctcctcctgaatttctaaactaaagacctccaagtgggaggtcaaatgcccccaaggttgaagagtttatgcacaaattcctgagaaatgggggaaaggcactgggaaggaggtagggaaaagaaggcaggtttcgggaaggggggtggccaggggagggccaaaccccttgtgtaactagcctgccccgcggcaatcagtaaatataagctgcactgggggctgaagaagctgccaatctcagctccctgggccactggaaagcatcgtttccctagtagaatgtcaccagtgagggaggaagggaaaacatacagcttccaatacccaaggcactgaagagctggcagagcctcaaggggagcctcaccattgtcaacccaggggcaacccaccaatcaggtacaaatattgattatgtactgtgagcttgagtaggtatagaatatgtgctgtgagcttggtgctctgggagggctttgatgggggatgtgggactggaggacattacacttggcacttacactcgatgagacgaattacatgaaaccataagccacacaatataaattgggtgaaattgtgtggcgcagattttaaaaatactatactagaaatttggctgccaaagtcaagcagccgctttataaaagaggtggaactgaagcttggtcttgacggaactagtaaaacttagagaggggagatccctcctcggaaaagaggggaggggaagattgcacctcacgcatttgaggcacagcaggaagcctgaacctgaactgaatgtagttgaggatgtgtgttgtggattggaagaaataaggctgggattcagggaggggggaaaaaggaatctttaaattctatagagagctgggtggcccaaatgctctgtggggaatggagcacctgctgtgctgagattccagcccttcagcctattcagagaactggctctgggcagggcgggtccatcctgggctggtgctgtaccactgtcccgtaaactctacccaaacctgcactcaaggaaaggggtgcaatgctctttcccacctgaacctagttcttgctgggcaaggagcacgtctccccagtgcccaccagccccaggtaccgctccccccaccccccgcaaaacacacacgaagccctgggaagagcagagtaccaggagcttttccagggtgggcatcccccgtgctctctgcagtggattattacacgttatctcccacccgctgtacagagaagtctggagcagaggctgagcagcttgtctgggagcgggaaatgtgtgtggtctcccctcacaccccacccccacccctacttctaccagttttcccccctggattcaactttctttgagtctccaggaatacccctgctgtgttccagcacccttttatcttttatctttttctctttttttgtaaattatttaaagtttttcttaaactttaatgacctgggaaatgaagccccgaaatgaaccctgctgcggtggtggcaccaaatcctaaaccctagatcatcagggtccagcatcctcttagacttgaccgctggccactgacctcccctacagtacctcacgcccctttcctgccatctctgcccctccagaactcgatccgccacaacctgtccctgcacagcaagttcatcaaggttcacaacgaggccaccggcaaaagctcttggtggatgctgaaccctgagggaggcaagagcggcaaagccccccgccgccgggccgcctccatggatagcagcagcaagctgctccggggccgcagtaaagcccccaagaagaaaccatctgtgctgccagctccacccgaaggtgccactccaacgagccctgtcggccactttgccaag

SEQ ID NO: 44021 - DNA, 2300 bp, Homo sapien
taattaaggcaaagctcctaggagagaacaccctggattagggtgggccataaatccaatgacaggtgtccctgtaagagaagagaaggataaaggagatgcagagaagaagaagaggtaatgcaaagatggaggcagagattggaatgatgtgtctacaagccaaggagcaccaaggatcgacggcagccaccagaagctagaagagaggcatggaacaacttcttcctcagcgcctccagaagggaccaaccctggccacactgatttcggacttctgggctccagaactgtgagaaaataaatgcctttttttcctttttaaaaaatttttatttatttatttatttatttatttgagatggagtctcactctgttgcacaggctagagtgcagtggcgcaattttggctcactgcaacctctgcctcctagattcaagcgattctcatgtttcagcctcccgagtagctgggattacaggtgttgccaccatgtctggctaatttttgtatttttagtagagacggggtttcaccaggttggccaggctggtctcgaactcctcaagcaatccacctgccttggcctcccaaagtgctgggattgcaggcgtgagtcactgcacccagccgagagaataaatttctgttggtttaagccactcagtttggggataacttatggcagccctagcaaactaatacatactaaagatacatactaaatactaagctgggccatatagtccagttttcctgagactcccaggcaagtgctgtttttctttgcttaatatcctacaccactttctgtctggtaaaattacactcattctttaagatgccactgaaatagcacctcttcagcacagccttcactaaactatccccctctccatcttggtaaatttagttacttcctcttctgtgctcacatactttgtagtatctctacatttatgctataggacttgttacactatgttgtattacttgtttatgtcttccccacttttctgtgagtgtctagaaatatgaggatgtcttgttggtctatttccagaacataagcacagtgcctggcacatattaaaaacgtaataaatgtttgctgaataaatagtttctgtaagtggcttctccaatcacctctgtgttttcggggaaggtaaaactggcaacaggatgaagaatggattagagagcagagggcctttagaaagggaggccagttgatggagtctagatagaatcatgactagagctaatgaaagactgatttagcagagtggctgtggtaatggaaaggaggaaaccgttgggagaaacaccacagaagcagagtgggttatattctctgggtgagagagggggagaaattgaagctgattctgaggtttcaagtctgggtgactgagagggtgacgataccattgactgaggtggggaaggcaggaagagaagcagagttgggggaagatgggaagcttgaagctagtattgttgttcctccatttctagaatatttttgtattataagtcacacttcctcgccagtctcaacagggacccagctcaggcagcagctaagggtgggtattctggtttggattagatcagaggaaagacagctgtatatgtgcccacaggagccaagacggtattttccatcctcccaaaacagtagagctttgacagagatttaagggtgaccaagtcaaggaagaggcatggcatagaacggtgatgtcgggggtgggggttcagaacttccattatagaaggtaatgatttagaggagaaggtggttgagaatggtgctagtggtagtgaacagatccttcccaggatctaggtgggctgaggatttttgagtctgtgacactattgtatatccagctttagtttctgtttaccaccttacagcagcacctaatctcctagaggacttagcccgtgtcacacagcacatatttgccacaccctctgtaaagccctggtttataaggttctttccaccggaagctatgacagaggaaacgtgtgggtggggaggggtagtgggtgagggacccaggttcctgacacagacagactacacccagggaatgaagagcaagcgccatgttgaagccatcattaccattcacatccctcttattcctgcagctgcccctgctgggagtggggctgaacacgacaattctgacgcccaatgggaatgaagacaccacagctggtgggaaatctgggactggagggggctggtgagaagggtggctgtgggaaggggccgta

SEQ ID NO: 44022 - DNA, 2300 bp, Homo sapien
caaaaaaatatttagctgggcatggtggtgcatgcctgtaatcccagctactcgggaggctgaggcaggagaatcgcttgaaccagggaggcagaggttgcagtaagccgagattgcgccattgcactccagcctgggcaacaagagcgaaactcagtctcaaaataaataaataaataaataaataaataaataaataaataaaatatcgttcaggctgagcgtggtggctcacgcctgtaatcccagcactttgggaggccgaggtgggcggatcacttgaggtcacgagtttgacaccagcctggccaacatggagaaaccccgtctctactaaaaatacagaaattagctaggcatgatggcgcaagcctgtaatcccagctactggggaggctgaggcaagagaatcacttgaacctgggaggcggaggttgcagtgaaccgagatcacgccactgcactccagcctgggcaacaagagtgagactccgtctcaaaacaataaataaaataaaaaataaaataaaataaaaatatccttcagagttagttcaaatgttacctcagcctcctgagcagctggcattacaggcgcctgccaccacacaagctaatttttgtatttttagtagagatgggatttcaccacgttggccaggctggtcttgaactcctgacctcaggtgattccctgccttggcctcccaaagtgctgggattacggacgtgagccaccactccccgccttgaattacttcttctttccattgtgattcaatagcattttgttatttttgttactggtgttatttttgtttattgttatttgttacttttgttacagcacactggctgtcttttctctaaaaggcaatacaaggccggcacagtggcgcacgcctgtagtccaggctactgggaggctgaggcgggaggatcgctggagtccagaaggttgatgctgcagtgagccgtgatagcgccactgcactccagcctaggcgacagagggagaacctgcctcaaaataaacaaatagcaatacgacaataggatattggctctggaattcagaatcttagtgccagctctgttactcagtagctgtataatattggataagtgaattttcacactttgaaaaccagcttcctccatccgcaaaatcgagccaataataatccctaactcatgaggctgtgagcagattaaaggagatagtgtctgaaaagcatctgacacaataggtgcctctttagctagaccaagggttcttaacctggagttcatggacccttaggggatacatggatgaacttcaggggatctaagaatctaaagcaacattttgcatgtcaatatatgcatattattattattattattattatttctgggaagaaggtccatagctttcatcagcacctttaagggtttgtgaatcaaaaacgttagtatgcggtacccttgggcagaaaaacaaacaagaaaaggttagacaactcgatggtagaccttgagggattagagccagcctttcagggtttaataggttctttctcatgcatacatagtttctaatgttcacaatagccccttgaaggaggtgttagcgcacctatttttcagatgccggaactaagaaacgaactgatctgtaatagacggagttcctaaccaatgcaaatattattgaagacttttctaggccaaaaccgagctaggctatgggaaccgaagtccagtcagaactcagcaccacagaggcctccttcttccctggtttgcatccccagctcattctgcgcctccggaacgtttcatagatttttgctgagtgaaatcgacttgctgccgccaccgccgaaaaactcccggggcacagagctccgcccccaccgggccaggccccacctcctctgcagtcggtattgtccgatggttcccggcgtacctcggcttccctcggtagtttccggcaatggtcgagagtttctaacgtgcccccttgttgtctctcggccgccgtcctctcaaccaccgccccccttttcggctccctctcccccttcccgttcccccagtcagcctggccctgctggtgcctccggcgctacgggctgggcaagatggcggccttcgggatcttgagctacgaacaccggcccctgaagcggccgcggctggggcctcccgatgtttaccctcaggaccccaaacagaaggaggtgcgttcgaaaatcggggctctggaggggccgggggcacgcggtcagcctaggaggaggcactgacgg

SEQ ID NO: 44023 - DNA, 2300 bp, Homo sapien
gcccggctaatttttgtgttttttttggtagagacagggttccaccatgttggccaggcttgtctcgaactcctgacctcatgatctacctgcctcagcctcccaaagtgctgggactacaagcgtgagccaccgcgcccggcctaaatttcttaattctaattggattgctaccctctcttcctcttcttcaacatggcaacacattaaggtataggcccttagtctctttttatttatttttgagatggagttttgctcttgtcgcccaggctagagttcagtggcacagtctcagctcactgcaacctccacctcctgggttcaagtgattatcctgcctcagagcctctcgagtagctgggattacaggcatatgccaccaggcctggctaatttttgtatttttagtagagacggggtttcaccatgttggccaggctggtctcgaactcctgaccgcaggtgatctgcccgccttggcctcccaaagtgctgggattacaggcatgagccaccacacccgtccccttagtcttttaagaaggggcaatgaacattctcaactaaatgttggagcttctttacagctttcctccatgggggatataccgctgggattgaggaggggccattaggccaggggaaacatcaatagaacctgattcttcttccacaacaccccagatgttgggcctcaaacaagctggggagggtggagatgacagacactgcctacccttcttgtcatcttgtgtggtccccatcatgcaccaagtggcatacctttcataggacagagaacttccctgagagtcacattcctggatgaaaaattgccctccattggcatgtgccatcatagaataggtcgtggaaggaccgtttggttctaggaggaagagagaccagtaaaaataagcaccctttctctctctgccctactgccagaactgcctgttctcacgtgacccaccttggcagttacccaggatgacttgctcgctcccattttacagtagagaaaactcaaaactgttgccccagagtcacatttggagctgcggcagggccattctcgccctcttgctttccagtttgagttctagatccaaggctgtccaggagagccaactggtttactacaatggagtcttggagtcttctgccctgcctagctagggctggaagaggatcagcctcagccttgtgagtgggtggtacaggatgatttgacaacttaaggataacatgcaagccatagttgcaccctattactgggaagtgtctagtgtgctggcaaaaccaggagcaccaatcagtacccaagttataaaaaataaaatagccctctttgaggcccacgaagcccttgcttatatgggacttaccaagtttaagagttgcgtgcacaaggaatggaactccccaacagtgtaaaggcaaacatgactgaagctttcttctcacttattctatcctgacataaacattctgaggagccacaggagtacaggcttggctgggatgagggacattcagaggggcttgggggttgctaaacaaatggcaggtgcgccacatacaaaaacacaagacacaaagacactgaacctggaggggagagactgaaatggtcagacaactggcatgctgacagtctgacatgccccagcagaagcagcagaagggaacagcattgacctttgggagagtgacaggatgagagcagagtggccccactggttgctgcttgggtagtgctggcgctgagaaataagggatgctgattgaggtggaggtgtgtttttgtgtagtatgactgagggttcctgcaggcagtgcctcagtttctccctttgggacaaagtctcaagctttgcgggtaaagtttgggctagctgccctggaagatcacctgtctgatagcttgcaatctgaggtgtgtgtgcgcgcccgcgtgagagagagggagcggaacgtgcctgagcatggggggaattgggccatgccccaggacttgagccatctctggcacaaaaggagttaatggcagggaccgcgcccccccgtgtccgggaacgcgcagcgcgccccctcggtgcgcgggcacagcagccaggctgccggagagctgatctcggggattcgggtgcggagcccttggcctggaggcgatatgggtggtccgtggcccggttcagtcgcttgcagcagcccggggaacaggtgaggccgcctgccccggtctctcatcctctagctgcccataccttgcccccatcctaacccctcccaat

SEQ ID NO: 44024 - DNA, 2300 bp, Homo sapien
ctctgactggggactcctcccctaggagaagaaagcctttcctggagtggtgctatgctttgtctcatagggggcctgtgtctctggaggtttgactttttttttttctttgagacaagatctcgctctgttccccaggctctgtcccccagtgcagtggtgtgatcacagctcactgcaacctgttcctcccaggctcaagtgatcctcctgcctcagcccccagagtagctggggactacaggtgcatgctaccatgcccggctaattttggggataaatttttttttgtagagacaggttttcgccatgttgcccaggctggtctcaaactcctgagctcaagcgatctgcctacctcggcctcccaaagtgctgggattacaggcgtgagccactgtgcctggccgaggtttgacttctttaaagatctgttctctctgtttttctgtaattgatgcatggagaataatctttgggaaaatgaggctgtcttttaagtagtaatctatcatttctttccctctctttccactcatgcaaactggctttctcttaaaggaatggaattatgtgcctgagggacaaattctcccttgggaatgttggggccagggagagaatgatatcctttttttttttctagaggggaaaattattttctttttgagtttgggggactggctccctctctgctaggggaaaatctgaatttgaagtatcggtagcttcagataaaaggaaagtctctgccaggcgcggtggctcacgcctgtaaccccagtactttgggaggccaaggcgggtggatcacctgaagtcggaagttcaagaccagcctgaccaacatggtgaaaccccgtctctactaaaaatacaaaattagccgggcgtggtggcgggtgcctgtaatcccagctactcgggaggctgaggcaagagaaacgcttgaacctgggaggcagaggttgcagttagccgagatcccaccattgcactccagcctgggcaacaagagcaaaactccatctccaaaaaaaaaaaaaaacaaagtatcagtggagaccacagacggggagcacaggttccctggagactttcagacccgaaggcctttgcccttgggctccttccccaagccctcagaatgtggggctcttgcctgcctgcatttctcatctctcatgaaaaagactcctttgtggtgcaagtgccagctccctggtggtgcgctggcacggagctgggcccagctgggcaggaagcaagaggggaagacaaggagagataaagagaggcggcataagggggctgatgtctgggattcaaggggttaattcttcctgacattgccttaacccctaagttaccagccatcgcaccaggacagggaagggatggtggaagccatcaaggaaggggttcagcaacccctcctttggccctacatcatcccctgccaaaagagttgttcccccttcctagcccatttaaaccatggggcagcctcagtgacaaaggaatgaagagatttatggctatgtgtgacacgacagatctgacctggtgctacctgtcttctgtaggacttttccagagagccatcatccaaagtggctctgctctgtccagctgggctgtgaactaccaaccagtgaagtacaccagcctgctggcagacaaagtgggctgtaatgtgctggacaccgtggatatggtggactgtcttcggcaaaagagtgccaaggagctggtagagcaggacatccagccagcccgctaccacgtggcctttggccctgtgattgatggtgatgtcattcctgatgaccctgagatcctcatggagcagggcgagttcctcaactatgacatcatgctaggtgtcaaccagggcgagggtctcaagtttgtggaaggggtggtggaccctgaggatggtgtctctggcactgactttgactattccgtctccaattttgtggacaatctgtatggctatcctgagggtaaggacaccctgcgagagaccatcaagttcatgtatacagactgggcagaccgtgacaaccctgagacccgccgtaaaacactggtggcactcttcactgaccaccagtgggtggagccctcagtggtgacagccgatctgcatgcccgctacggctcgcctacctacttctacgccttctatcatcactgccagagcctcatgaagcctgcttggtcagatgcagctcatggggatgaagtaccctatgtttttggggttcctatggtaggccccactgaccttttcc

SEQ ID NO: 44025 - DNA, 2300 bp, Homo sapien
taattcccctgtaacatgagaatattaatagtgcctactttgtagggttattttgaagatcaaacaaagtaatacaaaacaatttgaacattgcctttaatgcattaagtacacgggaaacggtagtcctctctatccattacaacttgtactctcagcgggaagaatggtgttcagcctgtcccccacccaccatgatgtccagctcagttttgccttttaccaagtttaccaggcacaactaaaggattccctatctggctttaaatgtcctccatactctaagcctcttaactgactgacagtttcctccacagcccctcaacacagtcctgcctccttactggctcccagatatgccttgctcgttcctactctgtgccttcactcacactgttcctcctccctggaatgctaacccggtccttccccttccagctcctacctgtcttttacttctccactcaaacctcacttcctctaggaagccttccctgattacttcagtttattctcatcattcccttctctggactctctcaggaatcaaagttagtgaatacgcactgatatttttcacaacaatttattgggtcttggtcccctctcctccagaagttcggcagggcatgatagctcacacctgtaatcccagtgctttgggaggctgaggcgggcagatcacttgaggtcaggagttcgagaccagcctggccaacgtggtgaaaccccatctctactaaaaatacaaaaattagctaggcgcctgtaatcccagctactcgtgaggctgaggcagaagaatcgcttgaacccgggaggcggaggttgcagtgagccaagattgcgccactgcactctagcctgggtgacagagtgagactgagtctcaaaaaaaagaagttgataaatctcttatgaacagttgggatgttttcacctcctttgccacctgcacccagcacgtagccctatgctgggttcctagtaggtgtccaatactcatggattgatgtatccatatgcccaggtttggctaagggaagctgaggccctggctccctttctagcagtgagctcaagctggagtgaagaacagaaggcagggggccagtttctctgctaacttcccttgtttctccactgccattcaggccacagaacacagcagggtcttcaggtaagccgtcagtggtgcagaccttgaaactagactgatccctcagttaatggttgacagtctctgtttaccttaatgattgccaagattcattactgaacatgatacactttgcagttcaactgccttggccttgagggtagaaagcaatttctgaggttttagggttctgggataggattagaaatacttgggtccatccccagccactcaggatgtggacaataagcaagtggccggagggcaccctggtactgccatatgggtgggaagcactgccagctcccaccttgacctcaggtgccagcaggcatcacccatggctttttcctccccattgtcatctaatgtgtttatttatttatactttttgtagagatggggtcttactatgttgcccaggctggtctcaaactcctggcttcaagtgatcctcccgccttggccaaagtgctgggattacaggcatgagccaccatgcccggccctgtcatacagttttagaggctgggagctagaagggttgaccaggatggcagcctgtacaggatccctctctgcagcttgcccgcactgtggatctgcctaaggccagggcatgggggaagcctgagggatgctgaggagcacaggtccagctcagtctcccagagagactaaacatgggtgggtgacaatgatgcctctcttcctctgggacaaggcagtgactccaggctatgtgatctgtctctccaaacccatagggagctcagaggatcaatcttgtttaatgattgtatgtgggaggaggtggggctggttaatgtttgtctggttcctcttgggctgtgggccatttctggctctggccctgggttcgttgtccctcccctgggctgggctgacagtacctggtggcatagggcagacacgcctgcagacattctctgggaaagggcagcagcagccaggtgtggcagtgacagggaggtgaggagactgggggctgagggaggtgggccagggagggctgatgtggcacagtgggccggaaataggggccgggtcttgccttctactgacctccgccttcagccacttaggtcccttccatgcttccctctgaagctggggtgag

SEQ ID NO: 44026 - DNA, 2300 bp, Homo sapien
tccgcccgccttggcctcccaaagtgttgggattacaggcgtgagccaccttgcccagcccctgaagcatttctttatggctaactgtggtgcctagtgcagcagctttgcatatagaatcccaggcttgggagaaagggcacccatagccctgcttccccatgctggttggcacatgacatgaactcactaaggctttttatttatttatttatttatttatttatttatttatttatttagctaaatgaagaaaccttgttctgagaagtaacctatgtcctgtggactgtccttctttccccagattctttcatcccatttcccaacttttgcagttgctgttaccccacccctttcctctacagcatagaggaccacccagggctgaatatgaggcttcttccacaaccagttgctctgctgtggagcatgcactggggtcaggaaatgactccagggatcactgcacctcctatggtccagggctgcatgtcctcctcacattcagtttcctgctgctagtatgatctccttgcaacttaatggcagaagtggcaagaggtgggagaagccttcttagcctgcctaagggatagaggagaatttcctccctagagcaactggcaagctcctgaaaccacgaggttgcaatatgcacttggggttgggggctgggcagcaatggggtctcagacagaccctataggtcaacaacagcattggggactgctcaaggtggctcacacctgtaaacccaacactttgggaggcaaaagtgggaagatcgcttgagcccaggagttcaagaccagcctgggcaacatagcaagccccccatctctacaaaaaaaaaaaattgaaaaattagctgggcatggtgacacatacctgtggtcccagctaattgagaggctgaggtgggaggatcgctggagcccaggaggtcaaggctgcagtgagcagtgattgtgccactgcactctagccttagtgatatagccagaccttgtccccaccctctaataaaaaacaacccacagcattagggagaaaaaggagagatcttgggtttgacagaccatttattcccccaaagcaactttgttatcttttcctgagaagatttttttttttttttgagacggagtcttgctctgtcgcccggactggagtgcagtggtgcaatcttggcccactgcaacctctgcctcctgggttccagtgattctcccacccagcagctgggattacaggcatgcgccaccacacacggctaattttttgtatttttagtagagatggggtttcacattgttagccaggatggtcttgatctcctgacctcaagtgatctgcccacttcagcctcctaaagtgctgggattacaggcgtgagcaacggcgcccagcctttttttttttttttttttaatggttagcctttgctttctacagacactatctgcagaagcacagggagcctgctgtagaaagacttctgtctcagatacattgtttcatcctacctatcctaccgctttggaacggtgtgaccttgaggagttacttatctgagcttcagcttcttcatctggaaaatgggataacaggcttcctaaatgggtcgaaagaaaaaatgtatggaacaacgctcagcacagtttgtggcttcataaatgagctctctttcctgtcctctttcctctccatattccggagaggatctaagcctcagggaaaatcctggtgaccttaagcttctgacggggccatgggggagggcctcagcccagagcctctgggtcccctggggtcccctcttcacatccacctgcctgtgttttatctccctccccccgcccccccgtggccattcttctggtggggctatggggcgggtgcggcgatggaccgggcgggcacagaacaggtgggtgcaggctgggtgtccggcgctgggacacaagtgctctgtgtgtagggtgggcggaagtcagggcgtttgatctgaattctaaagggcgttgttcagagccccacaaaggtctcattgtgcagacactgggtataaagcagcatatgactccccagcaccgggcggtgatgaattgggacgcaggcgcggagcccagggaccactccccctgcacagacatgagaccataggggacctgtctgggtggcctcagggataggcgctccccaaggtaagagggctttgttgagtttgccccaggtctggagttaaggagctaggggacagggagccataggggatggctgatatcggaacaaga

SEQ ID NO: 44027 - DNA, 2300 bp, Homo sapien
cctttggacttcatctccaccttgcaggagacgccccgattctgcatcagtggcttacacatggcagccttgtttttgcggggtgttgctgggggtggtgggggtggaggggtgggagcagtgggagctgatcgggtcttcacagggatctgcaaagacagaggaacatttgtgccaccaaccgccgtaccctcctctgagattatcctcccccttggcttttgccccgaccttgcccaaattcccattttcctctggggtcctcactgtgttgctgttctccactttggtttgagagggtgtctggggttttgactcaggagactgacctgtagatcaaaacaaatgaatgctctcatccaagggactagctctccattttccttacccctgttccaggagagcttcattaacaggtacaccaaatacagatgggaacttctaggatttgacccccttgccatcccagatctagtctcctctatgccccagcaatagcagcctaaaagattatttgttcctggagaatgaaacattacattttcccccaaaacccacatttgagaccttccacttagatagcctgaagagtctgttatccctggagttgtggaggggcaggggtaacattctagaaatagcagtcttcagtctcactaaatgtagagtttatgctgagatttccttatctcagaaacgtaaccataacccctatatgctccatcctaccaggaaaggcacccactccctaacaatatatatttcatagacaatcagtagatgctaactccaagaagctttaaataagactcccccggtacctgcagggttcggaagctaaaagagaatacagttcacagtactagcaccctatctggccaggggtgagctgaacgcaagaggaaggagaaaggggctaggcttaggattaggagagtccaggctccctctaacagagtgtaccccctgcctgggactcactgttcaggaggctctcgggcccactctgggtatccaggttgggttggttctgctggctatagaaacgcagaagacactgctggttgcagaaatgacggatctgcccacgccagtggatggtctccagcagcttcccctggcgcttacacgcatggcaccgggcagcctgaggatgtcaaaaggatggtcagacctgcctccctaaaatgcgttgggccctttctttcccccgggataagccatgctcctccccttggagatcgggccagcttagagatggaaggctggctgccctccctggagatctgtccacaccccgagctcagtaccacagcccgtgctccccactgccctctttcccgcctcgctcgcatgctgaccctccttaccttgcagtaccacagcaggtacttgctcttacagtcctcactgcagaagtcccaggtgctgccatccagttgctcggtgactccgcgctggcaggtctgggagcagtaagtacaagtgatacagcacaagcccagcttcttagtgaagtcctgtttgtacagcagcacacagcctggaaagaggagaagaggaaagagagtccagagacacagatacccaagggcaagagacccaaccttttcaaggtgctatacctgaaacctctctctaagcagccccttgtgcccaaaactttaggggagatgggggtagaacatcccgggcagaaggccctgcctcatggaccactttcccggcctccctcccttctcctccattctccctggctgggagttatagtgtcttctgcccttccccatctccttaccttcgctgcagaagcttttctccactccgctgaatcggagtttctcatgcaagagtttctcctgccgacagtgctcacactgggacaccacaccccgaagccgcttgaagtcctcacagcaatcacggcagcagaactggaacacttggtcctgaggtgggggcacagggcagggaggacaagctgtaacatctggccccagcaggggccaagtggaaggaccccttcagacagtctggtcgtgtggcaagacgtgggtgggggtggggctcttacctgccagtccaagacctcaggcttgccactgaagaggctgtgacagtagtgacagctcaggtgaatgcccccctcagggcttgtgcgctggagggaaggaagacaagtaagggaggggcaagatgtgtgcagcggtggggaaggggagtcaggcttgttctttgctctgcccaggcctgcctaccccaattctccaaccctctttatgttgccaaacccttctatc

SEQ ID NO: 44028 - DNA, 2300 bp, Homo sapien
aatcccctattattgggcatttagattgtttccttatctgttttaaagaggagaaaactaaggcccttcacttgacaagtcacttgtccaaagtcacctggctaaaaagtaggcagaactgatattagaaatctggtctgactccagaacccattcttaggccaccacactgcgtctagaattaataacacaccacttaaccccgttagatcagctcccctcaacttgaaagatagtgaccaggcacctccacaagcagagcagccaaggattcaagtatatgttgaggaaggcaggcaatacagaaaaaactaggtggctcaactgagatggaacaagcagaaaatgcaaaggggaggtccaggaatagaaataaacaggaggtaggagatgggtacacagaatgctggttaagacaaagagaaagctggatttgggaaatctaaaagtaagaaactctggcttttatctctgtatgtaggagggagcaaagataacctcaaggccatgtggggagctagcaaggataaggtttctgggaaaaggaatgagaaaagggagggtaaactcccgaggactacaagagcaggagaggctttgtgtggccaggaggagaggccagaagtcaacgaggcaggctagaataggcactggataccaaaccttcctgttcctaaggagacttccttccagcctgagcctcctctagtagttcggctactaaatgctctcagcccttaggggctgtggtgggaagtggggagcggggattgtaaagtgctctaactattaatataatgcggactgagaatggatgctggcacaattttttaaaggcagtaggcttaacgctagtgccacctacccctactccacttctctagcctaacctcagccacacccacatgctaaggaccatccaggaggggggagcgtgtagcgcgcctgcgtgctcgtgcgcacgagaagcagagaggcagagaaggagacaaaaagagatagggggagagagagagagagagcgagaagagagagacagacaaggacagaaagggggctggaggagaaagagagagagagatacagagagagagagagagagagagagagagagagagagagagagagagagagagagagagagagagatcagccctggtgagggaggaaaactccatagataatacagggagctcctgcaggaagactcagggagaagatcccagaacttaccctaagactgttgagagagtagggggtagctttgcaggacctggtttgggggtcatcaagcagtaacggttactgcacaggcgttgccactgagccagagccatttaacccgacctgtgtggctggggatcaagcttcagataccccataactctgactctcagactgttttgggggccccgtggctgcagacaagggaaggaggggcacgtgagggctgggtccctgcctccccccgtcctccgctgtcactcactaccccaacagtcgcccagggggcgggacccggagaggtggggatgggggagggtaatcttggcaggcgcctgctgcatggcgtaggtagggactattgaggggggcggacgccgagggggtgaacacgagtgggaagctaagagagacacggggagggggaggggaccgggaaccatttgaatgagaggaggggatcacgggtagagtgggctccaggaggtagggcgagcagggtgtgacgggggccagactcttgagccaggtaaggggagcaggtgcgtagatctgtgttttttgtgggtgagcgcactcggcccttgggtggaaaggggacgccgcctttcccggggggccggcttcaaagctccagaggctatcttttccttctcaactaacggggccccgggcgggggctcaggcgccgtctctagtggctgcattccactccgcaatttccaggcggccactggactgggagtctcgcgccgggggccggcgctgtctcgcgagccccctcctcgagccagccaatggggttggttgctggcaccgcccgcccgcctggtgcagagcgctgggcgctgcgagcggcgctgccatttaaaggggccgcgacccctgtcccggctgctagggagggaggtagagaaggagcgcggggccgtcgctgtctgcagttctaggcttgtagcctttgcactaaccctgccgcaggtaggggtcgggcctgctcaagccgaaccgaacctgcaagcgggatcttgcagtagccgggaggcggtggtgggggggtctaaggagagatcgta

SEQ ID NO: 44029 - DNA, 2300 bp, Homo sapien
ccactattacagtatcatgagagtattttcgctaccgtaaaaatcctctgtgctgtctgccattagttgttttttgtttttgtttttttaatgtggggttttgttttgtttggtttgagacagagccctcgtctgtcgccccgggctggagtgcagtggcgccatctgagctcgctgcaatttctgcctcccagctcaagtgatcctcacacctccgcctcctgagtagctgggactacaggtgcacaccagcacaccttgctaattttttgtattttttgtagagaaggggtttcaccatgttgctcaggctggtttggaactcccgggctcaaaggatccaaccgtcttggcatcccaaagtgccaggattacaggcgtgagtcactgcgccagacttaaaatgtggttgttaatgactacgtctgttgcataaccaaaatcccctattattgggcatttagattgtttccttatctgttttaaagaggagaaaactaaggcccttcacttgacaagtcacttgtccaaagtcacctggctaaaaagtaggcagaactgatattagaaatctggtctgactccagaacccattcttaggccaccacactgcgtctagaattaataacacaccacttaaccccgttagatcagctcccctcaacttgaaagatagtgaccaggcacctccacaagcagagcagccaaggattcaagtatatgttgaggaaggcaggcaatacagaaaaaactaggtggctcaactgagatggaacaagcagaaaatgcaaaggggaggtccaggaatagaaataaacaggaggtaggagatgggtacacagaatgctggttaagacaaagagaaagctggatttgggaaatctaaaagtaagaaactctggcttttatctctgtatgtaggagggagcaaagataacctcaaggccatgtggggagctagcaaggataaggtttctgggaaaaggaatgagaaaagggagggtaaactcccgaggactacaagagcaggagaggctttgtgtggccaggaggagaggccagaagtcaacgaggcaggctagaataggcactggataccaaaccttcctgttcctaaggagacttccttccagcctgagcctcctctagtagttcggctactaaatgctctcagcccttaggggctgtggtgggaagtggggagcggggattgtaaagtgctctaactattaatataatgcggactgagaatggatgctggcacaattttttaaaggcagtaggcttaacgctagtgccacctacccctactccacttctctagcctaacctcagccacacccacatgctaaggaccatccaggaggggggagcgtgtagcgcgcctgcgtgctcgtgcgcacgagaagcagagaggcagagaaggagacaaaaagagatagggggagagagagagagagagcgagaagagagagacagacaaggacagaaagggggctggaggagaaagagagagagagatacagagagagagagagagagagagagagagagagagagagagagagagagagagagagagagagagatcagccctggtgagggaggaaaactccatagataatacagggagctcctgcaggaagactcagggagaagatcccagaacttaccctaagactgttgagagagtagggggtagctttgcaggacctggtttgggggtcatcaagcagtaacggttactgcacaggcgttgccactgagccagagccatttaacccgacctgtgtggctggggatcaagcttcagataccccataactctgactctcagactgttttgggggccccgtggctgcagacaagggaaggaggggcacgtgagggctgggtccctgcctccccccgtcctccgctgtcactcactaccccaacagtcgcccagggggcgggacccggagaggtggggatgggggagggtaatcttggcaggcgcctgctgcatggcgtaggtagggactattgaggggggcggacgccgagggggtgaacacgagtgggaagctaagagagacacggggagggggaggggaccgggaaccatttgaatgagaggaggggatcacgggtagagtgggctccaggaggtagggcgagcagggtgtgacgggggccagactcttgagccaggtaaggggagcaggtgcgtagatctgtgttttttgtgggtgagcgcactcggcccttgggtggaaaggggacgccgcctttcccggggggccggcttcaaagctcca

SEQ ID NO: 44030 - DNA, 2300 bp, Homo sapien
agtctcgctctgtggcccaggctggagtgcagtggctcagtctcagcttaccacaacctccgcctcccgggttcaagcgattctcctgactcccaaagtgctgggattacaggagttactgcaccaggcccactttattttttagagcagttttggcatcactgcaaaattgagctgaaagtatcaagagtcctttgtacccctctccacacacagacacagcctccctatcaacatcctgtccagagtggtaaatttcttgcagtgatgaatatacagtgacacattatcaaccaaaggccatagtttacataagggcttccttttggtgttgtacattctatgggttttaatttttttaaataaagattttattttttaagagcaattttagtttcacagcaaaactgacaggtaggtccggagagtcccatatacctccttcccccatgcagtcacggctcccctgactaccaacatccctatcagagtggtaaatttgttaaaatcgatgaacctacattaacacatcattactaaccaaagcctgcggtttacattagagttagttcacccttggtgtttacattctgtatctttgaacaaatgtatacttacaagtatccactattacagtatcatgagagtattttcgctaccgtaaaaatcctctgtgctgtctgccattagttgttttttgtttttgtttttttaatgtggggttttgttttgtttggtttgagacagagccctcgtctgtcgccccgggctggagtgcagtggcgccatctgagctcgctgcaatttctgcctcccagctcaagtgatcctcacacctccgcctcctgagtagctgggactacaggtgcacaccagcacaccttgctaattttttgtattttttgtagagaaggggtttcaccatgttgctcaggctggtttggaactcccgggctcaaaggatccaaccgtcttggcatcccaaagtgccaggattacaggcgtgagtcactgcgccagacttaaaatgtggttgttaatgactacgtctgttgcataaccaaaatcccctattattgggcatttagattgtttccttatctgttttaaagaggagaaaactaaggcccttcacttgacaagtcacttgtccaaagtcacctggctaaaaagtaggcagaactgatattagaaatctggtctgactccagaacccattcttaggccaccacactgcgtctagaattaataacacaccacttaaccccgttagatcagctcccctcaacttgaaagatagtgaccaggcacctccacaagcagagcagccaaggattcaagtatatgttgaggaaggcaggcaatacagaaaaaactaggtggctcaactgagatggaacaagcagaaaatgcaaaggggaggtccaggaatagaaataaacaggaggtaggagatgggtacacagaatgctggttaagacaaagagaaagctggatttgggaaatctaaaagtaagaaactctggcttttatctctgtatgtaggagggagcaaagataacctcaaggccatgtggggagctagcaaggataaggtttctgggaaaaggaatgagaaaagggagggtaaactcccgaggactacaagagcaggagaggctttgtgtggccaggaggagaggccagaagtcaacgaggcaggctagaataggcactggataccaaaccttcctgttcctaaggagacttccttccagcctgagcctcctctagtagttcggctactaaatgctctcagcccttaggggctgtggtgggaagtggggagcggggattgtaaagtgctctaactattaatataatgcggactgagaatggatgctggcacaattttttaaaggcagtaggcttaacgctagtgccacctacccctactccacttctctagcctaacctcagccacacccacatgctaaggaccatccaggaggggggagcgtgtagcgcgcctgcgtgctcgtgcgcacgagaagcagagaggcagagaaggagacaaaaagagatagggggagagagagagagagagcgagaagagagagacagacaaggacagaaagggggctggaggagaaagagagagagagatacagagagagagagagagagagagagagagagagagagagagagagagagagagagagagagagagatcagccctggtgagggaggaaaactccatagataatacagggagctcctgcaggaagactcagggagaagatcccagaacttaccct

SEQ ID NO: 44031 - DNA, 2300 bp, Homo sapien
ctctacaaaacatacaaacccaccgtgggcgtagttgtgcactcctgtagtcccagctactgaggaagctgaggtgggagaatcgctagaacctgaaaggcagaggttgcagtgagctgtgtttgtgccactgcactccagcctgggtgacagagcaagactgtctctaagtaaataaatataaacagtacatacatagaaaatagaaacgcaagaaagtggtcataattgctatctctagagaatgaatgggggggagactttttttttgagacggagtctcactcattgcccaggctggagtgcagtggcgcaatcttggctcactgctagctccgcctcctgggttcacaccgttctcctgcctcagcctcccgagtagctgggactacaggcacccgccaccacgccggctaattttttttttgtatttttagtagagacggggtttcaccatgttagctaggatggtctcgatctcctaacctcgtgatcctcccgcctcggcctcccaaagtgctaggattacaggcgtgagccaccacacccggccaagacttttctctttatactgttgggtattgtttgatttttctttttttttctatgagtaagtattagttttcttcttcttctttttaattgagacggggtctcactctgtcacgcaggctggagtgcagtggcgcgatctccactcattgcagcctctgcttcccgagctcaagctatcctcccaccttaaccttaacctcctgagtaggtgggactacagggacactccaccacgacaggctaatttttgctttttttcggagatggagtttcgccatgttacccaggctggtctcgaactcctaggcttaagcgatcctcccgtctcggcctctcaaagtactgggattataggcatgagcactgcacctagccggaattaaaaattcaggttctcagttgcattagtcatatttcaatggccacttatagttagtagctgccatattgaacacagcagacataggacctttccatcattgcacacagttctattgaacagcccaagtctagatcattgtgtccccacataaggtggtgcccattgggataccctgcaaccctgagtgtgaattaattaatgggaattaacaacacatacttatcaattgatccttgtagtccttggttaaccacgggggcggggcgagttaggcattactgaaacaatgaaggttagttactgataggcctcctatggaatatacagtctgatctagaggcctacaatatatccatggcaatgatgacacctgttgaatctctcagtaaatcataggaacaatagtgatgtttggactgctaggttttctggttaccatggaaatgagggtgctggttacaattctgtgtaatcacgcagagcctaaggtatgatgcaccccctcctcccccaccccgtctgtaaccatgaccaaagagttgactatttcagttgcgtttcccgagtagccccagcaacaggagaagcatctagaaatatgattaagtatggggtgtcaggatgcaagccctaacaaggaagtgtgaaaaaagaaacatggcggggcatttttttcagtaggaaaaggccaaatctattccattgaatacaatgacattgttactcttgcttcttgcacaggcgcagtgcaggactgctccgagcacgcctacgcgcgcattttctccccttcctctccctctttccactttcctctccctttttctcctctcctttccccctcccaccacttggtctttcagtctttcagtcagttcgtttaggtctctccttccgacccccacccccagctcctctccctttccttttccccctccccctttcctttcccgtctcacgcgccaggccgcttgcacatgcgcattaggtacaaagcctcgctctttgtccccatctgtcgttcacacgaactcaagcctttggcattcggcagccaatagaatctaagaaatggcggaaaaatgattccgcctcgggagctaaaccttgattggcagtttagctaaccaatcgagaacgccattttgtaccccttggcaggcaccgagctccgtcgtctcgtttccggcggtcgcgcgctcttttctcgggacgggagaggccgtgtagcgtcgccgttactccgaggagataccagtcggtagagggtgagttttgggacgtcttggttcttgtttgggagggtagtgggatttcttggaacaatcagcgaaggaagaggctagggcgaagctaggtttgg

SEQ ID NO: 44032 - DNA, 2300 bp, Homo sapien
ctccaccacgacaggctaatttttgctttttttcggagatggagtttcgccatgttacccaggctggtctcgaactcctaggcttaagcgatcctcccgtctcggcctctcaaagtactgggattataggcatgagcactgcacctagccggaattaaaaattcaggttctcagttgcattagtcatatttcaatggccacttatagttagtagctgccatattgaacacagcagacataggacctttccatcattgcacacagttctattgaacagcccaagtctagatcattgtgtccccacataaggtggtgcccattgggataccctgcaaccctgagtgtgaattaattaatgggaattaacaacacatacttatcaattgatccttgtagtccttggttaaccacgggggcggggcgagttaggcattactgaaacaatgaaggttagttactgataggcctcctatggaatatacagtctgatctagaggcctacaatatatccatggcaatgatgacacctgttgaatctctcagtaaatcataggaacaatagtgatgtttggactgctaggttttctggttaccatggaaatgagggtgctggttacaattctgtgtaatcacgcagagcctaaggtatgatgcaccccctcctcccccaccccgtctgtaaccatgaccaaagagttgactatttcagttgcgtttcccgagtagccccagcaacaggagaagcatctagaaatatgattaagtatggggtgtcaggatgcaagccctaacaaggaagtgtgaaaaaagaaacatggcggggcatttttttcagtaggaaaaggccaaatctattccattgaatacaatgacattgttactcttgcttcttgcacaggcgcagtgcaggactgctccgagcacgcctacgcgcgcattttctccccttcctctccctctttccactttcctctccctttttctcctctcctttccccctcccaccacttggtctttcagtctttcagtcagttcgtttaggtctctccttccgacccccacccccagctcctctccctttccttttccccctccccctttcctttcccgtctcacgcgccaggccgcttgcacatgcgcattaggtacaaagcctcgctctttgtccccatctgtcgttcacacgaactcaagcctttggcattcggcagccaatagaatctaagaaatggcggaaaaatgattccgcctcgggagctaaaccttgattggcagtttagctaaccaatcgagaacgccattttgtaccccttggcaggcaccgagctccgtcgtctcgtttccggcggtcgcgcgctcttttctcgggacgggagaggccgtgtagcgtcgccgttactccgaggagataccagtcggtagagggtgagttttgggacgtcttggttcttgtttgggagggtagtgggatttcttggaacaatcagcgaaggaagaggctagggcgaagctaggtttggagggtggatggcgcttccgaggccccttgaggccttgtctctgccgccacactgccttctcagcccacccgcggggggccacctttctcaactcgcttcgcttcgggctttccccattttcgttcctgccctgtttctttgtgcaactcatctccgaatcttacccgtgtcagtaagttgccggcctctgagccgccctgggcccgacggtgtggggtctattatgagagatcgctgaagtcgtggttggttagaggaggaggcgctttgtcgggcgctcctcctctcggccccgcgaggccattaattcagaatgggcaagtggggcccctcaagcgatatttctttgtcaaaactcttagctggaaagttcctctgcatatccagagcccgccgctttcgtagtcagatttctgtatgccctttttctaaagtcctaaccgcctagctccttgacgcatttatatagcatcactttttaaaatgaaacttaaatttatggatttcgcatcgagtattttattttccagtttgagaaactcttaccataacctgacacgtttctttgtgtttttaacagagaagtcgaggttagagggaactgggaggcactttgctgtctgcaatcgaagttgaggtaggtgtaaggaagggatagggttgccagacaaaacaccgggcacccagttgaattagaatttcacctacacaaccaattatttttaagtatatgttgcatagttttcaattaaatttcaaatttaattgtgggttgtgtat

SEQ ID NO: 44033 - DNA, 2300 bp, Homo sapien
ctgggattacaggcgcccgctaccattcctgggtagttgtatttttagtatagatgtggtttcaccatgttggccaggcttgtctcgaacccctgacctggtgatccacccaccttggcctcccaaagtgctaggattacagtcttgagccacacgcccaacctgcctgggtcatttttaaatgttgttgtagagatgggggtctcacggtgttgtctaggctggtcttgaactcctgggctcaagtgatcctcccacctcagcctcccgagtacctagaaccacaggcgtgcgccaccacacccagctaatttttgtatttttttggtagaggtgaggtttcaccatgttgcccaggctggtctcaaactcctggactccagcagtcctcccacctccgcctcccaaagtgttgggattacaggcgtgagccactgcacccagcctttttatttattttttctttatttttttccttttttgtttgatttttactatattttgtaacctccagaacgcaagattttttttaacatagtttccatatgcagcactgatagatttttgaattgttcttctttgtcatggttgttcaaagtaacaaattgtttgcctctgacaaaagccagagcacttaaggtgatgaattacatataagtcatcaggaaggtggctgattgtgttattagtactgaatttatttattagtctactttttctttgtagggtgcaaaaatgcagagtaataaaacttttaacttggagaagcaaaaccatactccaagaaagcatcatcaacatcaccaccagcagcagcaccaccagcagcaacagcagcagccgccaccaccgccaatacctgcaaatgggcaacaggccagcagccaaagtgtgtatatgctaggtgatggagtagaaatggattccctctgggaatggtttcttggtttttagattagtttctcgggcttataagggaataggcctttatggcacacctttgttcttttttctctttacctcttaatacttacgatggaaaaggctgattctccggaaccaaggagcaaacatgtatgacagcagttgagtacaggttgctctgctgtgttgacacattctactgttaaacagatgtctgcatgttttacctcagcttggttcttagaggtagtcatcagatgactggtagttaaaaataatatagaaaagtctttaaggcttaaatggagaagtctggtactgaatactgtacttttagccttgagcctgtaccagctcattgtaaaaagtctttaagtatatgttcctgtttgagtaccaattgtgtgcctctaagactagaaccaatcccaactttgtttatttccagagattactataaagagttgctctttcctaactcatttcattctgttgcccccagcctgaaagaatgggaactgttaaggttatgaaaattggtgagagattaggaaaatggaacagttactttgttttttgtttttttttttgtttgtttattctcatctgaaggtacgttttgaatgttaaaatctgatgccttgtaacatagggctgcttccttgaattgcttaatttttctctttggccggtaacgcctatatttttctttctcttgcttagtccagcttggcttctggcccgtcgtagagctgttcagatgtcctctgcatactgctttcacattctaaggcacaatttactcataagtggttaggttgccttgggaaatggtgtttacattctctacaacaattaatgtttcctcatttatcagtggttataggtctttgaggatacgactataattctatttccccagtcttttaagtgactgtgtgtcttctctcagatgaaggcttgactattgacctgaagaattttagaaaaccaggagagaagaccttcacccaacgaagccgtctttttgtgggaaatcttcctcccgacatcactgaggaagaaatgaggaaactatttgagaaatatggaaaggcaggcgaagtcttcattcataaggataaaggatttggctttatccgcttggtgagcaactgttggcttttgaggcatgtgctctaaaggtggggaagctggagaataatagatgtgcaaaaataggcagtggaaataattctcagatgatgtgttccttgaaagcttgatgaaacagaaccacaaaaatggcacattttaatttttcctcataagttttgtttcaaggataacaagttttttgcctaggatactggagctaaagtatgccctttggaact

SEQ ID NO: 44034 - DNA, 2300 bp, Homo sapien
cctcaaaaaaataaataaaagactgggcaaaacagcggctcacgcctgtaatcccagcaatttgggaggccgaggcgggcagatcatgagttgaggagatcaagaccatcctggccaacatgctgaaagcccgtctctactaaaaatacaaataaataaaataaaaataccaaaattagcgcacatgtagtcccagcaacttgggaggctgaggcaggagaatcacttgaacctggaaggcagaggttgcagtgagccgagattgtgccattgcactccagcctggcgatagagcaagactctgtctcaaaaaaaaaaaaaaaaaaaagacttttggcccaggcgggacagatcaccaggtcaggagatcgagaccatcctggctaacacggtgaaaccccgtctctactaaaaaatacaacaaattagccgggtgtggtggcgggcgcctgttgtcccagctactctggaggctgaggcaggagaatggcgtgaacctgggaggtggagcttgcagtgagccgagattgcgccactgcactccagcctgggcaagagaacaagactccgtctccaaaaaaaaagacttttggtattagcctgggcatggtggctcatgcctgtaataccaacacttcaggaggctgaggcgggtgaatcacgaggtcctgagtttgagaccagcctggccaaggtggtgaaaccccgtctctactaaaaatacaaaaagtagctggacgcggtggtgggcgcctgtgatcccagctactcgggaggctgaggcaggagaatcacttgaacccgggaggcagaggttgcagtgagccgacattgcaccactgcactctagcctgggcgacagaggaagactccgtttccaaaaaaaaagacttttggtactaagctttctcgtatgatttttctgtaatcttatattaatagacgtgggatgacgattatgaaaaataactttttagtcattcggtaggttgtcatgtagtcagtgttaagtctctctttactttgaagatttagagttctgaaaagttgatttgtgcctgcagtatctcttagtgtttaccacaagtcatttctcagagtgtctgtagatgtttaggctgtacttaagtactgcacctacctacttggaatatctttttgagactgtattcagagatctaagtcctgatttcgtcctgtcaaccccagattttcttttttctttttcttttctttttttttttttttttgagacagtctcactctgtagcccgggctagagtggtgcagtggcacaatctcggctcatttcaacctctgtctcccgggtccaagtgattctcctgcctcagcctcccaagtagctgggattacagacgtccgtagagtcagggtttcaccatgttggccaggcttgtcttgaactcctgacctcatgattcacccgcctcgtcctcccaaagtgctgggattacaggcgtgagccaccacccccagcccaaccccaaattttttataatgtcattaggtataaaaacttcagaagcctccaatcctgagccctagctaattcattgtgccagtgacatgtgtagagaagaagcctggtggggtatgatttgattaacactgaactttgttctttcttccagatttcctcgtcctgtgactgtggagcccatggaccagttagatgatgaagagggacttccagagaagctggttataaaaaaccagcaatttcacaagtatgcagtcttgatagatttccctattaggtgtttccttcttaagaaagcttataaagggatatgtaaaagaggcaggtctttgctgcacatgttcactggcagccattatcttggtcctcacaaggaatgcaattcttagctggggtaattctggacaaagttagtaacctaggaaccttgcctatagggaacgagagcagccacccagatttgcacagcctggctcctttgagtatgaatatgccatgcgctggaaggcactcattgagatggagaagcagcagcaggaccaagtggaccgcaacatcaaggaggctcgtgagaagctggagatggagatggaagctgcacgccatgagcaccaggtcatgctaatgagacagggtgagtctaggcctgtaagtcttaaagctgaaaggacaaaatgacatttttaaatgggtttctttgtatcaattaacagaagggcctacatctctgcttttatacttagtttgcgttgattttggtagataaataggcttggagatgtggcagagatactggatt

SEQ ID NO: 44035 - DNA, 2300 bp, Homo sapien
caatcttggctccctgcaacctccgcctcccaggttcaagcgattctcctgcctcagcctcctgagtagctgggattacaggcatgcgccaccacttttggggttatccactagagttctaaacagacttagtcacccactcctacctaccatcaggagccttgaatagttgaatggaaatagcctccagtggagggactacagatgggtgggaagcttccaacaatggctctgttacagtgttgctctctttttctctttaagaccccaccaacaactgaacgctttggtcaggctgctacaatggaaggaattggggcaattggtggaactcctcctgcattcaaccgtgcagctcctggagctgaatttgccccaaacaaacgtcgccgatactaataagttgcagtgtctagtttctcaaaacccttaaaagaaggaccctttttggactagccagaattctaccctggaaaagtgttagggattccttccaatagttagatctaccctgcctgtactactctagggagtatgctggaggcagagggcaagggaggggtggtattaaacaagtcaattctgtgtggtatattgtttaatcagttctgtgtggtgcattcctgaagtctctaatgtgactgttgagggcctggggaaaccatggcaaagtggatccagttagagcccattaatcttgatcattccggttttttttttttttgtccatcttgtttcatttgcttgccccgcccccgagacggagtcttactctgtcgcccaggctggagtgtagtggcatgatctcggctcactgcaatctctgcctcccgggttcaagcttgtccaggttgatcttgaactcctgacctcgtgatctacccacctcggcctcccaaaatgctgggattacaggggtgagccaccgtgcccaacctcacttgcttcttatccttacactcccccagccccagagaaactgccacatacaccacaaaaaccaaacatcccccaatgaccttagccccattgctccattcactcccaggtgagaattcaggcaaacgtccacaaaggtcacaggcagcgtacatacggttctgttataccccatatattaccccttcatgtcctaaagaagacattttctcttagagattttcattttagtgtatctttaaaaaaaaatcttgtgttaacttgcctccatctttttcttgggtgaggacacccaggaatgacccttttgtgtctatgatgttgctgttcacagcttttcttgataggcctagtacaatcttgggaacagggttactgtatactgaaggtctgacagtagctcttagactcgcctatcttaggtagtcatgctgtgcattttttttttcattggtgtactgtgtttgatttgtctcatatatttggagtttttctgaaaaatggagcagtaatgcagcatcaacctattaaaatacattttaagccttttaattttctgtggtgtttttgaaggggaaaggagggaggggagttatcttaggagatgagcagtagactctataaaggtaatcctttatgacctttggattacagtattgatctagacaaacatggggaggaggtggggatgaggtgcatcaaatggctggaggggttggcaaggattagcgctattgatactacatggaagtaatgatggaggaaagctgcccctctgaaagaggaagaaaatgggcttaatcctcatcgagctgggggcgcggggggggtctcaaaattggtatttgtttcttagcagctgctgctgtgtccaaggcttggaattgctgtggtgaatctaaaactgtctcagtagtggtgagctgacctcacccaagttcaaagccctactctgcctgatccttttttcctgagcctcagagctaaaatgcccccgagctctttcctattggctggaaagacgaattgaagttcccttgcccatgttaggaggtgtacgcctcctgaactaaagatagaaacagctggcccttccaggcagctaaaagcctccagactaagaggtgttccccattcggcagccagactccttgaaataccctttcagtaatcattcaaccaacgcttccatgtctctactctgtcgtaacaaaggctgtgggcagcactttgaccctaataccaaccttcctggtgagtaaagaatcctgacctggccaggggctctgtgtgggtgttggggactggtcagctggggggcagtgtgtttgaggagcggggaaagaaactacctgccctag

SEQ ID NO: 44036 - DNA, 2300 bp, Homo sapien
aaagactgaaaaaaaaaaaagaatattcacacaatctctaagtacctgtggattacttagtaattacacagggttgtacctttgtgatggagcaatctggtggtgactactttatcaaggtgatgaaatttagcatcaccaatactaggacaacactgtatttgacagtgtaccttctgatggctgataaaatatttaacctgggccgggcgcggaggctcactcctgtaatttccagcacttgaggcgggcggatcacgaggtcaggagtttgagatcagtgtggccaatatggtgaaaccccggctctactaatcatacaaaaattagccaggggtggtggcgccgagatcgcaccacagcactttatcctgggagacagagcaagagactccgtctcaaaaaaagaaaaaaaaaaaaaggccgggcgtgtggtggctcacgcctgtaatcccagcattttgggaggccgaggtgggcggatcacgaggtcaggaaatcaagaccatcctggctaacacagtgaaaccccgtctccaccaaaaatacaaaaattagccgggcttggtggcgggcgcctgtagtcccagatacttgggaggctgaagcaggagaatggtgtgaacccaggaggtggagcttgcaatgagccgagatagcaccactgcactccaccctgggcaacagagcgagactacgtctcaaaaaaaaaaaggaaacaagagaaattcggatcatggaatgttttcaagacaacttgcctggattcttccaaatatttagtgtcatgaaaaacaaacaagaaggcaggtgattctggactaaaggaagatgaccaaatacaatgcatgaaacgtgaatggatcctagtattggaaaaaagggagaatgaggaagagtgctatgatgtggtaaagaaattatttcagtctatattatcataatatgtgaaaaaagcaaggtgaaagccggggtgttggctcatggctgcaatcccagcactttgggaggctgaaacgggcagattgcttgagcccaggagtctgagaccagcctgtgcaacatgacgaaaccccgtaaaatgttccaactaggacaactggggaaatttaagtgcggactcttccttaaataatattgacttacttcctaaagttgtgataaaggtactttggttccatagttaagatgcttatttttaggagtgaagaacaagatgcccataaatggtttagaaaaacaaaaatcctagcaaaatgttaaccattgtgagtctaggtgaggggtcagctgttcattttactaaactttcacattttccgaaataaaacgttgggggaacaagtattttttttgaggcgggctggagtgcagtggcccgatcacaggtcactgcagactccaactcctggctcccacctcagaccccccaacagctgggactacaggcactggccaccacatctggctaatttttttgattttgtgtatggatggagtctcgctttcttgtccaggctggcctcatactcgtgggctcaagcgatcctcccacctcggcctctcaaagtgctggaattacaggcgtaagccaccgcgtccggtcaaaaaatcaatttctagggaaaaatgtcaactcaaaacaagtaacctgcatagctcgggaatgcctgtataatttacgtcaagtctctccttgggacggaccggtgaaattgcacgcagcacaaagaccggctcttacccttacttccgggtattgtggtacaggaacccgaggttgcctgcgcgtaagccacgtgactcgagcagctccttctgattggaggaagagccactgctctaattcggtgccgtgagaaagctcgcgcgcggagcagtgggagcgggcgggactgaatattttctttgaccaaccgctttccacatatccatcctcctgatcccgtagcgtcgaatcaaaagccgttagtaaagtagttacttctttctcttaggatagccggtctttccgggttttcccccccttccccctcccctctccccacttccccctccctttcccctctgttttgagcttccggtagaggctggtagggtaagggagctcagtaagtcacttctgggcgactgttgttttatttccggtctatgggacccggctgcgatttgctgctgcggacagcagctaccatcactgctgccgccatcatgtcagacacggacagcgacgaagattccgctggaggcggcccattttctttagcgggtttccttttcggcaacatcaatggagccgg

SEQ ID NO: 44037 - DNA, 2300 bp, Homo sapien
gaggaggcagccctcaccaacaaactaacatgctggctccttgatcttggacttcccagccttcagaactgtaagaatacaaattcctgttctttaaaaattacccaatttcaggtattccgttatagcagcacaaaacaaagacagaaatcatgtcaggaaatgaaatagacaggtgactatatttgaaggatcctgtctgttatactaaggaattggatttttttttttttgagacggagtctctctctgtcgcccaggctggagtgcagtggcgcgatctcggctcactgcaagctccgcctcccgggttcatgccattctcccgcttcagcctcccaaggaattgaatattttcttaaaggcagttgagaaagtcaagaaattgacaaattatactacaaagctatggtaaccaaaactacatagtactggcattaaaaacagacacatagaccaatggaacagaatagagaacccagaaacaaatccatgcatctacaacgaacttcattttctctttttttttttttttgagacagagtctcactctttcaccaggctggaatgcagtggcacgatctcagttcactgcaacctctgcctcccgggttcaagtgattctcctgcctcagcctgccgagtagctgggaatacaggcatgtgccaccatttttgtatttttagtagagatggggtttcgccatgttcgccaggctggtctcgatcccctgaactcaagtgatctgcctgcctcggcctcccaaaggactgggattataggcgtgagccaccaagctgggtttttttgttgttgttgttgttgttgttgtttttttttttttttttttttttttagattagtcaagtgaagcagtgagagtggagaaggaacaaagaaatctgtagctggttgtgatcaattagttgtaaacaccactgcactccgatcagccagcccatctttttcataggcagaatgcgacagaagaagcctggagcaggctgtggggaagcgggagcctcgggagagagcccaatccagttaaggcaggaggtagaagggaaagttcagtgaagaaagccaggatgtacgggagtttgtttctcactgagcaggggttccagtggttatagtggaaagggctccaagaaaagcaaacagtgggaaaaacaggttcaggtgtgtgtggaggaaagggaagcatctggggctctgacattagttctgacctcttttccaatcttgtgaaggtggcagcacctcctgtattgtcattatttctttaacggcattctttttaaactgtttaattcaaacctatatttgtagtttctaaaatgttgataacagaccattttgttgttacacatgtctgccaacgaaaacaaaaggcaaagagaatcactcccatccctataaaaggaatggctccttttctaacattctttttttttttttttttttgagatggagtctcgctctgtcgcccaggctggagtgcagtggcgcgaccttggctcactgcaagctccacctcccaggttcatgccattctcctgcctcagcctcccgaatagctgggactacaggcgcccgccaccacgcccagctaattttttttttgaatttttagtagagacggggtttcaccgtgttagccaggatggtctcgatctcctgacctcgtgatccgaccgcctcggcctcccaaagtgctgggattacaggcgtgagccaccgcgcccggcctctaacaacattctttaaaaatatacattttacacttcctgcacctcagcaaaggtggcaatgtaatcaacacactggcttattttgttctcctcactattagacgcatgtccccaaactacctgttataagccctgttttttttctggacttctcaagggctttgcccatcgttctttccccggcatctggaacagtaccacttgcgctttggtttatggttgagactcacacacgagaagcggaaccactcgatggggcattcgttgtcgcagcggatcatctcccagtaggagggctcgctggggtcgatggggaggtctgcgggggacgcctgccgctacgccttggccatggagctctgcttcttcttagaggtctgggctttcttctccttgggcgtgcccgaggtgacgtcgtcgtggtcgcggttgctggacgcgttctcacggttctagttgttgcgctgccgccgagaacgctttgctgttggacttctccgcctgcgcgtccgcctcgcccctgggcctgtccgggccgaccttgc

SEQ ID NO: 44038 - DNA, 2300 bp, Homo sapien
ttttttcagcagcagtgcaacagcagccaccagcccgggtctcatccagcgctggtgctactgctgtgaaatgtgtgttgttctgagcagctgtatttgtgatactttgttacacagcagcaaaaaaagtaatgcaacatcagtggtgttactgggtgacaaagtttgggattggggttgaagacccagctgatttaattataattggttctaaatttaaaattgcacataaaaaaaacccagaaatcaatgtgaacaacaataaaaaacatacaaaagcacttccttcaatgtctagatcaaggcttctttctcaccccctccaaccttacctgtttcctccctagatattcatagagagtaatatattttatcatctaaatagtcttctgtattgctctctagtagctttttgtgtctacctaactaggcttcagattccttgagggcgaggatttctgttcatttttgtgccccccacagtgccttgcacatagagactctagtaaatgttacttattggctgaagaattaggaacatgacctgcatttaacaacaaaaagagtttttgttaattagctagcacccgctcatcagcaaggcctaaacatctgccagtggaatctgagaagtctcttctaaaagttgaaaagctgagtttactcattacagatagggaacttgtagtaggtgtgtgtgtgcgggggggaggttttaccagttaaatcaaattacaagaggttggtgctcaattttcaggagagtttgtgtagtgatttttgtctttttcactgcatgatgtgactcttgattatgggatggaagaaattagcattatgaattttctctgtgccatttccataattaattgtttgttgactgttttgaagaaatttaagcagaatttgaggacttagttttaaaaaatgtagtgaaggggctaggtagcaaaaactttttgaagaaattcattgacctgctttcttagatcaaggactttttgaaataaaaaggctctcagagatccaacttgtagcctccagtggcttgtaatactttcttgctgatgtggcaagctaccttaagtcgtttctagaacaagaggtgaagtataaataccaatgtgacaaaatgtctgaacagtagacttgaaactgcaggaagatcgtaagaaccgatttgttcaaggaagtagaggcaattcatgactcaatctagacgtgtggtttaggcagatggcaagtgaattcatttatcattgttgatctgctttgagctcagtggaatcgccgactgtgacaatgtgcagagctagctggtggaaatgaagtcacaactcgaggagagtcatggattttgacgaacgtgaatcacctttaacatttttatggctgccttcggagtgcaaacgcccagcatgtccctgagttattaaacatttgccctatcaccgtgggcaggagtattctgaataccaaaacgattttgaaatttcaggctatacggccaacattgaaggtgtctgcattcaactggccctgtgaaagcttcagtctttttcatcgaagtgctgaaatcgatggccgagtcacaatgaagacgggctcaaatcggaaccctctcgctcctcgttttgagcagctgtctttgagaggcaatcttctgaattgactggctcagaattgatccgtgagagtcgtaaccatccgtttttgtacgaatacagttgataaacttttttagacgcctttggcatttatgtttaaaacgacaccacctgctaagtaacaaacactcttcttaatcgcggtggcaaaaacgtatccgtcccgtgtgtgtttgtttttacccttccgctacactcttaagaaacttggccgcttccgccccagagagtgccctaaccacgagtcgggttgacagggctgctcgcatgcgcggtctccaccgtggtgtttgtcgcaatgggcgctgcgcggaggactacatggaatctcgactttgcagcttgaagtcattttgttggcggcgctggttaccggctacctccgcgcgggcacttgattgtaacagaaagtagttccggcccatgttgtttcggccgaggagccgtcgccgccatttcaagaccgtactaggtagatggtcaattagagttcccagggtttgaagcctgtaactgctgccgccgctcaagccctccagagcattgctacggctgctgcccttgtactactacctccaaatacgttcttgctggtagtggcggcagcaggaccaattacctcttttttgctct

SEQ ID NO: 44039 - DNA, 2300 bp, Homo sapien
gcagaggttgcagtgagctgagatcgtgccattgcattccagcctggacaacagagtgagatgtcatctcaaaaaaaaaaaaagacaaagcctgtgatccccaacacacccattcatgcttgctcctcttttgcttgtgacctctctgctttcatttacccttgtagtctcggttttcatgtggaccattcttttcttggctcttgggggcaaaattattttccttcctgctctgtatagtggtcgaactctgccacaagcatcagggaggaagatatcaattcatgattgatatcatgaattgatatcatggcaaatgctgtttgccagttttctcagatatgagagggaagatttttttcagtaaaattttgcatgatttaattcccaacttcttaaagccctcatgtggattggtgtttgtttcctaaaagattattatgggaagaaagcctactcaaaagtttttactcccattcgcttctcttgaaaaatctacattatttccagtctacttcagctcctcctgccttcaatctaaaggagttgcttgcacaccttgagtaaatgtgtgtaatttctgaactgcccattttaagatttgattccaaacctatcccattcttttacttgaagcatatgcctctcaattatagctaacatcctggttctttgcccaagcctctgaggcacagttatgtaatccccattcttataaagaggcttgtagaggttaatttgcaacttcattgtagagagagagagtaatcagccccctttatccaatttttttatcaactgagaaagtatctgtatttaggtaggcaatctggtgcttaagagcaggttttggaactagagttggagtttgaatctcagctctgccacttttttttttttttttgagatggagtctcgccctgtccccatgctggagtgcaatggcacgatctcggctcactgcaacctccgcctcccaggttccagcgattctcctgcctcagcctcccgagtagctgggattacaggcgcgggccaccacacgcggctatttttttttttttatctttagtagagacggggtttcaccatgttgaccaggctggtctcaagctcctgacttcgtgatccacccgcctcagcctcccaaagtgctggggttacaggcgtgagccactgtgcccggccagctctgccactttctagctgtgtgatctctaaaatgagagtgctaacagttgcctactttttaaagtgttgtatgaattaagtcgtaagacacttggaataatgcttagcacaaaatagtatcaaacgcagggacattttatgtgtgttctgttacccaaaggcatacattacgaaatatatagatgctcgctggagaaactggcacaatctagaaagcgctgttttccccgtttgtttttcttggtgtgtatggagtgagtgccaaaaagcctcaagtaacctttttttatctccagggtttggagggttctggaagtaaacatcatagttcgccgttgccaggcgctgttgagttgctgccttgctcttatctaggggtctagatggccttccctgcaacccccgcccccctgcgctcccgcgtccccccgcgccccgccctcccctcggtgttcccgtccacgcccctgctcccgcgccttcgctccagttctcgtgcccccgcccctccccccgcgccctttcccagtggttgcaataacggacttagaggtctggacaattcaagtaaggaacaaggctcgcttatccaagttctcgcaggataaaagtttgttatgaacgatttcacatggtttctctttatcagaaagttgttagggacttttaatcgcagaattggcctcgggtgcccacgctctagtattgaaatggcggttttgggacaaataagcaacatccgtgggagtggaaagcgacagacctgatcccggaagcgttacagctaggcgccaagttcacaggcgcgaagttcaaatttgtcttgtgaccactgtgataggtgggtacaggggagcgcgggcgagcacacgtgaattactgctaccgccccctaggtccgggcactataaaggggcctgcgcctggcgttgttcatcgcagttgctccggatctttgcacacactccacgggcagttggaggtgagctgctgccggccacgccagaggctgcaacaccaggtaggtgaccggctggtcggactgagatgggtgctgaagtggtccagaggttaatcctaattgagtgacttaattaaaatcaggacca

SEQ ID NO: 44040 - DNA, 2300 bp, Homo sapien
ctcgggtgcccacgctctagtattgaaatggcggttttgggacaaataagcaacatccgtgggagtggaaagcgacagacctgatcccggaagcgttacagctaggcgccaagttcacaggcgcgaagttcaaatttgtcttgtgaccactgtgataggtgggtacaggggagcgcgggcgagcacacgtgaattactgctaccgccccctaggtccgggcactataaaggggcctgcgcctggcgttgttcatcgcagttgctccggatctttgcacacactccacgggcagttggaggtgagctgctgccggccacgccagaggctgcaacaccaggtaggtgaccggctggtcggactgagatgggtgctgaagtggtccagaggttaatcctaattgagtgacttaattaaaatcaggaccactgtataccttggactctggttgcccgtgtaggcctgaggtgggagtagaggaagtggcagcgaggggagaagtggaggcgccagtggtagcattgggggaggtgggggcgcccatggtggtgtaggaaacatatggtggcgccagtggcggcattgggaggggtgggggcgccggtggcggcgtaggagcagctggtagtgccagtggcggcgtggggagaaggggcgctggtggcgtcattgcagatagtggggggcctggtggtggcgtagaaggaggtgttggtgccagtggcgggtggagagaagtaggggcaccagtggcggcgttgggggaagtgggggtgcctgtggcagtgtcggggaagtgggggtgctggtggtggtgtaggagcatgtggtagcaccagtgacggtgtggggagaagtaggggcaccattggcggccttgggggaagtgggagcgctggtggtggcgtaggagcgtgtggtggcgccagtggctatgtaggaatacgtggcgccggtggcggcgcggggagaagtgagggcgctggttgcggcactggggggaggtgggggccccagtggtggtgtaggaacaggtggtgtccctagtggcgggtggggagaagtagggatgccagtggcagcgtggggggaggtgggggtgccagttgcggcctaggagtacttggtggcgttggtggcataggagcacatagtagcgctggcggtgtggggagaagtggaggcgccggtggccgcattgaaggtgggggtgccaatgggggcgttgagggaagtggggggttctggtggcggcgtaggaacacttggtggtggtggaagtggcctaggagcacgtggtggtgctggtgggcgtggggagaagtgaggatgctggtggtggcattggaggtgggggtgccagtggctgtggggagaagtgggggtgcccgttgcagcattggggggaggtgggagctagtggttgtgggtaggggtgtgtgtgtgggggttgaggtctctttggctgaggactgagtggtggtgggagacaggagtggggtagggcagaagttggatagaagtgtgggggagtggaagcctgcttggaaaaccggttgggagcagttgaaggtggctggaggtggttggaggtgcgagtgtgggggaagggtggtggggttgaggcctgattggtggaagactgaggtgagaatggtgggggtagggtccagacctgataggaggaaggagttggggaggggtcaaggcctgtttggtcgaagattggctagaggctggaggcaggaataggaagcgtggagggggtggccggattcatataagaccagtgagaagccagagtggcgggaggtaagggggcagtggaggttggacagaaggaagaaggtgatgagggggcggtggtagcctattctgggtaagattgacagagtggggagtaaagaggtaggggaagggggagaggttgacacccggtaggtgggagacttccttggggcaggagtagggggactgaaggttgtagggaggtggagggccagtgggatgtgggggcggtcgagccctgatacgtggaagactggcaagttgaggtgggagtggagggagtgggaagtgggggcgggtgcagggtgggaagagattggggtggtagaggcctgagtgggaaaagtttgcaacaaaacaaatttaaatccttttcattttgcagagcaaagtttcggctttaaggtggggaagatacccaaagataaatgcagaatgtaaatgtagagatgtctctgcttttgagttctggctttcttttttttttctttttattttattttctttttctttt

SEQ ID NO: 44041 - DNA, 2300 bp, Homo sapien
catcatttcataaagaaaaggcccttttgataccaaaaaaaggggacaaataacatgattgctgaatataagacagacctttaaatggaacaaatgtggctttccatggtcaattttctcatttgcagaagcccatggaactcaaacctcttcacaggtcagcactgggagactgtggtcccagctcccaacccttttccacccccataggtagctactggccaagtcctgctcatcctaactggcctggtttctggaatccttcctgctccctccactggcactgctcctgacctctgccaggccctcagttccctctggcctgaaccctgcaggtgacaagctgtttagagcaaggagagtcacatctgtccacaggaggggaagggccttgatgccttgcaagtatgcctcatgtgggtgtaaatttaattccaggccctagcctggaggctttggtggggcagtctggctgaaaactggccccaagaccatgggctagcacttgcttttctctctctctctcttctctcttctctcttctttctctctctccctccacccctgctttccaactaggggagagagagaaagaggaaactgcttgggagaagcaaattacgggcagccttgcccactggtaatgagaagagggcgacagggaggggagaagagggcaaaggggagagctgagggcaggtggggagaggaattgttcaccattctctgccataaagtgactgatgtgctgtaccaaggctgccttacagcttttccttaagatcaagaagttcctatggcctcctccccaaccccatcctccttcttgcccgagaagcaactgcttttatgaatttgtggtatctcctgtccctgttttaaacctcgagaaccaacagtgttatccaaaacaacatggtattgattttgtggtggtttttagagtttatgtaagtggcatcaaactatacatggcattctgtaacttgcttcttctaccatgtgatcgttggcttttctagatgcatccatgttcaaatgtgtagctttagttcatttgtttttaactgcatgaatatatcatagcttattcacttaaaagaaactgaagacagtgttcatgagtaggaaaaggagaatcagacagccgtgggatcaatcctcacgcccacctttaattgccgtgtctggcgaaggcctgtcccctttctgaatcatccatgcagataaccccgcacgtcacaagtgagttgtgtggttgaaataaggcagtgtcggagaaagcacctaaagcaatgtctatcacatagcaagttcattactggtagttccctttctttttccccactgattagcagggagaggtggtggtaaaaagctagatttagtgtaacggctttttaaaaaaatattttaattccctttttaagagacagggcctcactctgtcaccaggctggagtgcagtggtacaattatatctcaaggcagacttgaactcccgggctcaagcaatcctcctgtctcaggcttccaagtagttaggactacaggcacatgccaccatgcccggctggctttttttatttttggtagagatggagcctcgctatgctgcccaggctggtctcaaactcttggccttaagtgatcctcttgcctcagcctccccagtagctgggattacaggaatgagccactgcacctagctgaaatttttaagaaggtggatctcctctgcagacttatttctctacccagcctttacaatcatgcaaagatcaactcaaggccaggacagatgagttccaatctatggagcactgaccctaccagtgcaggcagtagggttgcccttcacttctcagctgcattgcttcctcttcagacctctcttctcaaaggacctgcccccagccagtcatcctctgcccagcttttctggtcccaagcttgtagccagctcctccagagaggtttcacccagtcacggaaactctgtggcctgaggtttagggaggtctggtagaggtaactccctggaagaggctgctgctgagaactgcctgaaactcccacttcctctgtgactgcaggtttccaaccacaagcaccaaagcagaggggcaggcagcacaccacccagcagccagagcaccagcccagccatggtccttgaggtaagtgctgctgcccagccaggccaggccagaattcgaagtggaaaacccggggcatcaggggaatgccagggctggcccacagcccagggtcaccacagggttgggtgagtagctgga

SEQ ID NO: 44042 - DNA, 2300 bp, Homo sapien
gaacctgtctcaaaaaaaaaaaaaaaaaaaaaaaaaaaaaggaataatttgtaatgttcaatagcagagtaggatgactacagttaacagcaatgtattgcatatttcaaaatagaagagaggacttgaaatacccccaatactaggaatcaaaaatattccaggtgatggttaccccaaatatcctgaactgatcattacacactctatgcacgtgacaaaatatcacatgtacatcataaatatgtgcaaatcttatgtatccattaaacttaaaattaaaaacttatccatagcactatcatttgatttagtaatcccactactggatagatggccaaagaaaatgaaatgagtatgtcaaaaatatctgcacttgcatatacattgcagcactgttcacaacagccaagacgtgaagtcaaaccaagagcccatcaacggatgaatgggtaaagcacatgtgtatatgtacacacaatagaatagtattgagcattttttaaaaaataaaaggaaatcctgtcatttgtggcaacatgagtgaatctggagtacattatgtcgagtgaaataaggcaggcacggcaagacaaatactgtatgatctcactggggtgtggaatcttaaaaaatcaaactttttagaaacagagaatagaatggtggttaccagggtctggggctgggaaggattggggagatattggtcagaggatacaaaacttcatttagacaagaagtctaagttcaagagatctattgtagacatggtgactatagttaataataatgtatccttgaaaattgttaagagggtagattttaagtgttctcaccacagaagatgaaaggtatgtgagttcatacatattgtagttagcctaatttagccattgcacaatgtatacgtatttcaaatcatcatgttgtacactacaaatgtatacgattgtgtcattacaaataaacaaaaacaaaatacaaagaaatgaaataaattccatttgttcaataaaactgatgtgatactggtgaagatgtgcagaaactggaacctttgtgcactgttggtgggaatgtaaaatggcacagctgctgtggaaaacagtatggcggttactcagaaaactaaaaagagaattaccatatgatccagtaattccattctgtgtctatatcgaaaaaatagaaatcagagtctcagagatatttgtacatccgtgctcatagcagcattattcatgagagccaagagatggaagcaacccaagtgtccactgatgggtgaatacagaaactaaatgtggtccactatttggcccttacaatgaattacgatttgacctgtaaaaggatggagttctgatacaggctacaacgtggataaaattttaggaccttatgctatgaaatgagccagtcacaaaaggacaaatactacatgattccgcctatatacgggatctaaaatattcaaactcagaaacggcaggtagaatggtggtttccagaggctgcggggcagggaaaaatgaggagttgtttaatgggtatacatttcagttttgcagttgaagacatgctggagattggctgcacagcaatgcaaatatacttaacactactgaacccaaaactgaaaaacacttaagatggtaaattttatgttacgtgtattttaacataactcaatagaaaagtggtgtaatttctgtctctggagtgggtgtcgggggtgcacggcaacatattcaagcttatgtacaaggcgtttgaggtcggggcatggaaacatactgaggcactgtgtgtatgttatttgtgcatgagaatgaaactccttgaccctgaaaacaggacggggagtggagtgtgtggtgtgataaggaacgctgaaaacagcctcccgagaatgcggtttgagtgcttttaccaggccacaggtgtctcatgacccgacctcaaaaaggccatctagtggatgtttgtggtctaacaagccctttcaatgaatacttggcggacagatgctggggcggagtctcttagaagagctgcccccggcccccctcagctggatttgtctgagaactcattcttggcgttcactgcaagctataagctctgcaagtggtgaccccgacgtgatcgccttgaagttacgcgtgaaggaggagagctcattacttttcggggaatcctggtaagggacagtcctgactcccatcaggaggacgggacccatgcgtaaactatcgcgggttgggttatcatgggtcaggaaatgaccaaagaac

SEQ ID NO: 44043 - DNA, 2300 bp, Homo sapien
tgagagcctgtctcaaaaaaaaaaaaaaaaaaaaaaaaaaggaataatttgtaatgttcaatagcagagtaggatgactacagttaacagcaatgtattgcatatttcaaaatagaagagaggacttgaaatacccccaatactaggaatcaaaaatattccaggtgatggttaccccaaatatcctgaactgatcattacacactctatgcacgtgacaaaatatcacatgtacatcataaatatgtgcaaatcttatgtatccattaaacttaaaattaaaaacttatccatagcactatcatttgatttagtaatcccactactggatagatggccaaagaaaatgaaatgagtatgtcaaaaatatctgcacttgcatatacattgcagcactgttcacaacagccaagacgtgaagtcaaaccaagagcccatcaacggatgaatgggtaaagcacatgtgtatatgtacacacaatagaatagtattgagcattttttaaaaaataaaaggaaatcctgtcatttgtggcaacatgagtgaatctggagtacattatgtcgagtgaaataaggcaggcacggcaagacaaatactgtatgatctcactggggtgtgggatcttaaaaaatcaaactttttagaaacagagaatagaatggtggttaccagggtctggggctgggaaggattggggagatattggtcagaggatacaaaacttcatttagacaagaagtctaagttcaagagatctattgtagacatggtgactatagttaataataatgtatccttgaaaattgttaagagggtagattttaagtgttctcaccacagaagatgaaaggtatgtgagttcatacatattgtagttagcctaatttagccattgcacaatgtatacgtatttcaaatcatcatgttgtacactacaaatgtatacgattgtgtcattacaaataaacaaaaacaaaatacaaagaaatgaaataaattccatttgttcaataaaactgatgtgatactggtgaagatgtgcagaaactggaacctttgtgcactgttggtgggaatgtaaaatggcacagctgctgtggaaaacagtatggcggttactcagaaaactaaaaagagaattaccatatgatccagtaattccattctgtgtctatatcgaaaaaatagaaatcagagtctcagagatatttgtacatccgtgctcatagcagcattattcatgagagccaagagatggaagcaacccaagtgtccactgatgggtgaatacagaaactaaatgtggtccactatttggcccttacaatgaattacgatttgacctgtaaaaggatggagttctgatacaggctacaacgtggataaaattttaggaccttatgctatgaaatgagccagtcacaaaaggacaaatactacatgattccgcctatatacgggatctaaaatattcaaactcagaaacggcaggtagaatggtggtttccagaggctgcggggcagggaaaaatgaggagttgtttaatgggtatacatttcagttttgcagttgaagacatgctggagattggctgcacagcaatgcaaatatacttaacactactgaacccaaaactgaaaaacacttaagatggtaaattttatgttacgtgtattttaacataactcaatagaaaagtggtgtaatttctgtctctggagtgggtgtcgggggtgcacggcaacatattcaagcttatgtacaaggcgtttgaggtcggggcatggaaacatactgaggcactgtgtgtatgttatttgtgcatgagaatgaaactccttgaccctgaaaacaggacggggagtggagtgtgtggtgtgataaggaacgctgaaaacagcctcccgagaatgcggtttgagtgcttttaccaggccacaggtgtctcatgacccgacctcaaaaaggccatctagtggatgtttgtggtctaacaagccctttcaatgaatacttggcggacagatgctggggcggagtctcttagaagagctgcccccggcccccctcagctggatttgtctgagaactcattcttggcgttcactgcaagctataagctctgcaagtggtgaccccgacgtgatcgccttgaagttacgcgtgaaggaggagagctcattacttttcggggaatcctggtaagggacagtcctgactcccatcaggaggacgggacccatgcgtaaactatcgcgggttgggttatcatgggtcaggaaatgaccaaagaac

SEQ ID NO: 44044 - DNA, 2300 bp, Homo sapien
gcccaggggccctggggctccgtggtggggaaaggggaactggaactacgggcggccggaggaggccgaaatgcggcggcggggctcgggagggaccgaagtgcggcagcggggcacgggccaggccgggccacacccaccggggcgagctcggagggcggcgctctgggcggagggcccggcggctcggcccagggcgcgttacctcgtcgccggggccggagagggcgggcggaggcacggggcccggaggcgccaggcggaggatgcgggcgacacggtggcggcggcgaccgcgcgaccgggcgggcgggcgggcaggggcgagcggagcgggagggagcggactgcggcaggatctgtcgaggaaaaatcttgcggccggcgattccccgccttttaagcgcagcctcgcactccccccaccccacgcaggggcgggccttggggaaccgcgggcgcccactggccgccgcgcgccgctcccctccagctcgcctgcgcctctcactgactctctccttccctagctgcagctaactcgggtcgggaaaatgcgacagcgactgcccactcgaggtcgtcatggcgacagccagtgaacgtgttcctctcctcgggcaggcccccgagtgtagaggagctgcttcgggaggcgcagctcaatctccagagcctgttgcaaggtaccgagagggaggggggctgcggccggagcccagaagcgagatgcgcagcggcaggagggaggcaaagaagaaagaggacagggaccagcaagataaagacagagagtttaaaaacaatcgacaaagcagtttccagctttcacctttcagcctaatgattctgaaagaggctatttccagggctgtttccccccatccccagccccttttttcagctcagtagcccatggggaaacaaggacagagactgaggcagggccataagttatgccattcaccgagagctgggtgggagactcccacaatgtgggcctacattccctccagcccccctcttgccacatcgcccatgcctttgggatcctggcaccagaagacaaagggggcatctgcaggatctcccactctgggcttcactcactctgctcttgcaataacccctggatagctactgcctcaccaaagtaagcccaatacacagcacccagaggtcacctattttgtcccccctaaccaagcctgagcttctcgatgtaaagaatcacatcttgctacccttaggtttccagaagcacctggcacaaggctggattccctccccacctgccaagaggtgctcagtggatgttgagcatgaaaagaggtcttgtcagcactcctttatctatactaataaaggttaactctaatggcgaatagaaaactgctgatgggccaccaacaggatgacagccataacccccaccccctaccagggcagtggtgaccttggaaaagcaagatgccaagggacaccatgagccttgtgttcagataacaaaggacttgccacacagaaaaagagtcgatgtgctctgtgttgctaccatggcagaattaggaccagtgggtggaaacccagaaggaggcacattccacctccagataaggaagaactttctgacacacctgacagccccaactgtccgtggaagaaatgagctgccttgggagggagggagctccccttccctgcaggtgtgtgcgctgaggctgaagaaacacctagaagggctgctgaggagggagtctgggcacagaatgaggcgttggaccaaagaaccccaagagcaaccccaaatctctgtgattctgagtctttgttcagtgtacatacagcatgaatgtcccttctctactctcactttcttcatgtattctcatcaaattcatcacttcaatcaaccctattcaaatcttgtgcatccttactcactgatgatgccgctgaacttctgcctcttttatgctgttacctcctccttccctctccttcaccttagccctcctagacctgacatcacttacagcgggactaaggtgcagggaacacggcccacaaaggctcaagtaaaagttcttgacatccaagaaagaactccagattggacttcctggtgtaaatctcttcttgcttcacacaggtcatttccttggtagggtcgcagaaaaccttaagagctgcagggcttcaaagagaggaacttgcagtccaaagtagcaaaaggtgtctgcattctgagcctcttttcgtaactgagcactcaaggtggggatcattgagataagggc

SEQ ID NO: 44045 - DNA, 2300 bp, Homo sapien
tagctgccaggcctgacttgcattttctttaggctatttccaggtgtttgagccactggatttggaaatggaaaagtgcttgcttcccaggaccatgaggatcgaggagaagagaaagtcaataaattcatgctgtggtggtttggggaccaagcccttatctcaatgatccccaccttgagtgctcagttacgaaaagaggctcagaatgcagacaccttttgctactttggactgcaagttcctctctttgaagccctgcagctcttaaggttttctgcgaccctaccaaggaaatgacctgtgtgaagcaagaagagatttacaccaggaagtccaatctggagttctttcttggatgtcaagaacttttacttgagcctttgtgggccgtgttccctgcaccttagtcccgctgtaagtgatgtcaggtctaggagggctaaggtgaaggagagggaaggaggaggtaacagcataaaagaggcagaagttcagcggcatcatcagtgagtaaggatgcacaagatttgaatagggttgattgaagtgatgaatttgatgagaatacatgaagaaagtgagagtagagaagggacattcatgctgtatgtacactgaacaaagactcagaatcacagagatttggggttgctcttggggttctttggtccaacgcctcattctgtgcccagactccctcctcagcagcccttctaggtgtttcttcagcctcagcgcacacacctgcagggaaggggagctccctccctcccaaggcagctcatttcttccacggacagttggggctgtcaggtgtgtcagaaagttcttccttatctggaggtggaatgtgcctccttctgggtttccacccactggtcctaattctgccatggtagcaacacagagcacatcgactctttttctgtgtggcaagtcctttgttatctgaacacaaggctcatggtgtcccttggcatcttgcttttccaaggtcaccactgccctggtagggggtgggggttatggctgtcatcctgttggtggcccatcagcagttttctattcgccattagagttaacctttattagtatagataaaggagtgctgacaagacctcttttcatgctcaacatccactgagcacctcttggcaggtggggagggaatccagccttgtgccaggtgcttctggaaacctaagggtagcaagatgtgattctttacatcgagaagctcaggcttggttaggggggacaaaataggtgacctctgggtgctgtgtattgggcttactttggtgaggcagtagctatccaggggttattgcaagagcagagtgagtgaagcccagagtgggagatcctgcagatgccccctttgtcttctggtgccaggatcccaaaggcatgggcgatgtggcaagaggggggctggagggaatgtaggcccacattgtgggagtctcccacccagctctcggtgaatggcataacttatggccctgcctcagtctctgtccttgtttccccatgggctactgagctgaaaaaaggggctggggatggggggaaacagccctggaaatagcctctttcagaatcattaggctgaaaggtgaaagctggaaactgctttgtcgattgtttttaaactctctgtctttatcttgctggtccctgtcctctttcttctttgcctccctcctgccgctgcgcatctcgcttctgggctccggccgcagcccccctccctctcggtaccttgcaacaggctctggagattgagctgcgcctcccgaagcagctcctctacactcgggggcctgcccgaggagaggaacacgttcactggctgtcgccatgacgacctcgagtgggcagtcgctgtcgcattttcccgacccgagttagctgcagctagggaaggagagagtcagtgagaggcgcaggcgagctggaggggagcggcgcgcggcggccagtgggcgcccgcggttccccaaggcccgcccctgcgtggggtggggggagtgcgaggctgcgcttaaaaggcggggaatcgccggccgcaagatttttcctcgacagatcctgccgcagtccgctccctcccgctccgctcgcccctgcccgcccgcccgcccggtcgcgcggtcgccgccgccaccgtgtcgcccgcatcctccgcctggcgcctccgggccccgtgcctccgcccgccctctccggccccggcgacgaggtaacgcgccctgggccgagccgccgggccctccgcccagagcgccgccctc

SEQ ID NO: 44046 - DNA, 2300 bp, Homo sapien
ttcctcctctgcaaaatggaggtattaaaaatctccaccctgctgccctcacagagttgctttcaccatcaaatgaaataacatatgagaatgtgctttgtcctatctactgtggtcaaagtcattccttttggttttttatgtctagggagttctgtggaaccaggcaccgaagaaaaaagtttaatcagtgataaaacagctgaatggattgcagaggatgatgatgacgtgtttgtggcttcacgcacaactgaagatttatttactgtgatacacaggtctgcaccaatttccttaattctaattgcaattgccttccctttttgtacttaaagaaaacctgctattccacattgaaatcctaattgtaaaagaaaaagaaaaaaattaaaaataagaaaaactgctacctttaagcagccattagaattgcacctggaggctaagttcagatacccacatatgtgagcgcagtccagggcctcgcatctcaaattcactgacatcgttgggtaaagtggaggaagggaggggagaggaggaccaggtgccgagtgagaggcccctcgtctcctagcaaccacttggcctattgtggctccatctgctctctcttagctctgtctatagtcagagacatttaacccttcacagaattccttgtatcaaaaaaatcccatcaagagttgaagtggggcaccaggcagcatatcaaaacaggaacttaggaaaagaggaaccagatggggaccagttattggacagggttacaaggcaggggttcagtgacaagaaaactgggaagagtttattattggagctagaccaccagtccagaacaggatcagtccccaggctgtcctgattcagagtcactgagctactagccttgactcctgaaattcgtccttggtcccagaacctgggcaggactgaggctacaggcacaggacaagtgactccagctgggggcattgaaaggaatatggggacgggagggcccaacaagggactctgaggatttagaggtgagagagagagaaagcaggtcaatacggctgcttgcagggctgccgcctggattgtgtcacaggcatgggggtctgtgaagcactggtaaatgtctgctgcattaactcactcagaccaaactttctcttatctaggtccaaaaggaagctgctcggctggaaggaacctggtgaggcctttgtgggtggcagaacgagttcccactcaccaataaagaacacagctgagtctccaatcagtgagtctaccgccactgcagggtcaggcagcagtgccaacctagatgctggcagaaatgacgatttcaaggccttgctacagaagaagggaagtaaggcaactccaaggtctcgtccctcagcagctgaacttctgaagaccactaacccactggctcggagaattattgcacaattttcaaaagactatgaaaccaccgataaccccagtacctaagccctgggctcaacaagcagggtttacttactaaacttgagtagagaagggggaagagaaagggtctttaaacagaaccatgggaacaacagagcctacatttcttttatattaactcacactctggacagcaggagagaggctacttcatctagagctaaaatcatctggcacttaatcatcttcagacatttttatgttttcatacttataagcttgtcatgactgactaccgagtttcttcttattttcccccagtggtgtgcactaactaagaagaaattttcagatgtcagggcacatgtgccactttttcaattcagtgacccggctgctccatccctggctcctgtcactgaggagtgcagtgtgagagcagattggaggctgccaaacttggggggcatagggtgccattgcttattattcactttcctagggaggctctgatggccctgtgtgcaaacacagaaagactctgatgcctcctcaaccacagtttagctttcccctgcgctcacaagaggtttgcagggtgcacttatttcggcatgaggttgattggatggcttttgtggtgcaaaatatgactgtgactctgtcctgaaacttaatgcctttttcagtttgattgtctacatggagatcagggtgataagtttcaataaacatatagacgcccccccacccacccccattagctagaaaagaccaggactgggttgctttaaatgaaccaagcttgaccaacaaacaagacagccatttgttcactcagatctagccgaggtaactcacaagtgcacctt

SEQ ID NO: 44047 - DNA, 2300 bp, Homo sapien
caggagcagcaacagcagcatccctggagagggagaaagagagagagagagagtgtatgtgtgtgtgtgtgtgtgtgtgtgtgtgtgtgtgtgtgtatgtgcattccagtgatgttactccttcaagcccctgaatcactatagccacgactctccaactgattccaacctttaccattattctggctctcatcataaggaccagtctctggccaagaggtgtatattgttatcttggtcaggcatatgtttgcttggttttaagaaattatcagattgaggagtctcatgttttatgggactccggtgcatatgctcgaaaaaaattaaaaagaacttatcatattggatcaacaaattgctcaacctgcaaaatctttgattagacttagccagcccatctggcctgctttgggtttaaaaaaaaaaaaaagattttttttaactcacaaatggaaaaaagggaaaggtgttaagtttgtttggtattgccagctcttaaatacctgtctttaccgtggtggctgttctccagtaaggctctggcagaagtatatttgattttaagatttttgcctaaatagtagaatttgatagcaacgaactccaaaacaaaatctgaactggaacaactagttaacccctctcagcctctttgtaatgccaagctttatagacatttattccttaggtggtcttgagctttttctaacatccaattttataaaatgttgtgcatgcaaacgcagcattgtgctcattgtacaagtcacctcaaactcattccttcccccatgtgtatcatggcgaagaaatatcaatatatgtatgtgctgaggtcttctgatgaattgtaaattacaaaccttttcattcatttttaaatgagatatatttaccctggctagtggttaaagttttattctttttattatatttcactgctacttttttctactgactccaaagcttactttgggctatatttcttatttctagattgttgtatttatcttatttctatatttatctgcagtcttggaatgttagagctgaaagggaccaacctctctcatttcacacatgaggaagctgaggcccagaaaggtcaaataacttatatacaaggtcacacagtgagtcagtggtggggcccagcctcaattccaggtctcctgcccttgggcccaatctggtttcatttaaagcactacaatttatagaagacccacagctggcttctacttttatgacacatgaatttcccaggtatttcaatgaactaatatatatgctttaagggaaaatgttcaagagttctttaattcattaatccaaagacaaattggattttcagtttataaacattagtttccctccaaattcaatatgtgcaccctacttagtacaatggatgttttccctaaaagttgtgtgaaaaatgagttttttagatatcaagtatcattttttagaggtaaacttcctatgtaagggaaccttctggtgacttctttttgaaaaaccgagattcctcttgtcattgtcccataatgtctctactttttttagtgcaaacttttgtatttggtgtttatttaaaagtagggtacaacccaaccaatattagctttcccagagtctactttagccttcccttcttaatctttatgagaaattttcagactgttaaatgctcatgagatatttagttgtgttctagaaatttcacctggcttgatattctgtcaatccctgggctcaaattccagctccatcttatcaaacaataacagaattccctaatcagtactaagctccgcatgcagtctcttttccagaacattctttgcctaatgttccttagtgtggctctctctttagttggggcctccttccttagtacatgcataccttactattctgtggaattgcaagccatgcatcttttagagccacactagtcaaattgattggcatttccatttattttccattgttcccttgtttctcctggacttcctctcgtttctcttttcgaggatgcttagaggcttctcaccagagattggtgaggtttcccccatcatctagatgggagattgacaaattctgtaaaggttaagacagtaactattttaggctttgtgggctacatgtggtctctgtagcacattcttctttgttgttgctgtttgttcattcgtttgttttgcaacctttggataatgtaaaccactctctttttttttgacagagtctctctctgtagccaggctggagggcaattgtacaatctc

SEQ ID NO: 44048 - DNA, 2300 bp, Homo sapien
cgggtctgtgtggatagaagtagacatgggagacttttcattttgttctgtactaagaaaaattcttctgccttgggatcctgttgatctgtgaccttatccccaaccctgtgctctctgaaacatgtgctgtgtccactcagggttaaatggattaagggcggtgcaagatgtgctttgttaaacagatgcttgaaggcagcatgctcgttaagagtcatcaccactccctaatcttaagtacccagggacacaaacactgcggaaggccgcagggtcctctgcctaggaaaaccagagacctttgttcacttgtttatctgctgaccttccctccactattgtcctatgaccctgccaaatccccctctgcgagaaacacccaagaatgatcaataaaaaaaaaaaataaaaaataaaaaataaaaaaaaaaaaaaaagaaagaaaaatcaaaagtaaatgttcctcttgggcctcttggccatagataacctgatgaacacaaggctacgctgtcatcgtcaacacccaatcccaactcccccgcccctccatctcgcagccgaacttggagaattagtacaggtgcgggatccacttcagaagtggcagagcaatgatcccctcaccactagatgtgtcctccgcagttgatcactcccaatccgaaaacaaggagtgcccaaaatgtgtccagaatttaaagcagccaaacataagagggctccatgttatgtcttgagtagggaatgagcacagtctcagaaacacctgattccctggtatgagcatgaagcatctccaggtccagcaaggctgcatccaaaaactaaactctgagctggaagacctctatattctggctggtagtggcaagctaggacagctctctcatggactggaggaaacgccctgacatatcatatacaaattattgatggtgggagggattgtaaggggagaaaaagtgtgtgggcacaaattcaaaaatcatttatcttaggcaaacattattaatatgagcaagccatcattttatgtgctttacagatatgaacttgtttaattctcttaacacctgataggataatagtaggtactattatcatcaactccatttcacagatgatgaaactgagccaaagagaggtgaagtaacttcctcaaggtcatggagctagtagacagatgtggagcagggatttgaaactgggcaatctggctccagaatccatgcttttactacactatgctgcaccattatggaaattttggaaaatacacagaaacaaacacgatgacctgtatgcactagcaccactggccacatcttgctctatagctttcctctcctttatattcatataacatacaatacattacatatacttcttttacaaggaatcatattctttatcttggtcttaaaaacatttcccctatctgtacacacagccttacaatcgttattttgaatgttgtataatatcttcttgtgtggctaaaacattatttaagcagtacccgactgaggagcactcagactgcttccaatgtttctccatgactgagctctgcaagacgcaaaaaggtgacaggcttttttaaaaactaccttttgaacctaattagctacaactgcagaataaaattaacaaacgaaaaactgccagggagggcagccctgtgtgtaggaggagacagcggaagttggccgccaccacagtactcctgcttccctttgtctggcggccccgcgggattggccagagctggcgccgagggactgcagagccacccacccccgtggctcctactgcgcacgcgtgaaaaaagccaggttgaggggaacgggggagcttcgggcgtagagtgtggggagtgggggatctggtgcaaattagggtgcgtgaaagaagtcacaaaaagcgcagaggccaggcttcccgccctaatccggcctttgtctccgcccctctgcctttgtttcggcccaagcgtcttattggtcagacatcttcagccccattggtccaagagccaaaggacggggtctgccccaagctgtgcctgcttccggagccgcaataagaacggtcaattgagatgcggctttcaggcatttgtttaggacatgcccatggcggggcttctaaaggggcttgtacggcaactggagcggttcagcgttcaacaacaagcttccaagatgccgcccaaaggaaaaagtggttctggaaaagcggggaaaggtagagcggccagagcgatcaaggagaatgggggcgggtgaggagcg

SEQ ID NO: 44049 - DNA, 2300 bp, Homo sapien
agtaaacaagttccttcataacctggccttcaactgcctcatcaacctcatttcccgccactgccctcttctttccagtgtgacacagcgaaacggcacagatttgtgtccatatggacctagtattgaattctggctctgctgcttcctagctcaggaagcttagatgaagtcaatttatctctctgagcctgtttccacatctgaaaaatgtggataatagtatactaaaaggcctcttaataaaggccttaaagtcatacaaaccaggaaaatagcccatgttctccaagatcccccacctccccccaacccttttcttttttttgagatggagtcttgctctgtcgcccaggctggagtgcaatggcacgatctcagctcactgcaacgtctgcctcctgggttcaagcgattcttccaccccagcctcccgagaagctgggattacaggcacccgccaccatgcccagctaatttttgtagagacgggggtttcaccatttggccaggctggtcttgaactcctgacctcaggtgatccgcccgcctcggcctcccaaagtgctgggattacaggttcagtgagccactgaacccggcctccaacattccttttaactcataacggtctataaattttatgaaaagcttaaaattctctggacatatgatgtatgactgggccaataggtgagttttccaatactgaatgctaaattagtgtcttgaggagtcatgtctgtgttcttaacagtatatgaacaaggacaatttttgttggcccacaacctcctatttagtgtcacccaagcaagccacttaaactcaatcacatttccttaagctctaggctctgccttctttttaggctctgcatttgaaaatgactgtatcttagttggtgcttctgaagaaatgatgaccacagcactacttctttttttttaaattatttttgtcttccttttattataccaagtatgtgaacctagttacttatttcttaaataagaactttaattttttttttttttttgagatggagtctttctctgtcacccaggctggagtgcagtggcatgatcttggctcactgcagcctccacctccagggtttgagattcttgaagacccttctctctttctctctctctttttaagaaaataaatacagcataacgccctgtggagaagaaaaaaattttttttaaagagacgggagtctcaccatgttgcccaggctggtctcgaactcctaagtgcaagtgatcctcccaccttagcctcccaaaaggctaggataacaggcgtgaggcactgcacccagccttttttttttttttttttttttttgagatggagtctcgctttgccacccaggctggagtgcagtggtgcaatcccggctcactgcaacctccacctcctgggtccaagcgattctcgtgcctcagccacccgagtagctgggactgcgggcgcccgccaccacgcccggctaattttttgtatttttagtagagacggggtgtcaccattttagccaggttggtctcgaactcctgacctcacgtgatccgcccgccccggtctcccaaagtgctgggattacaggcgtgaaccaccgcgtctggtcgcttcttcaatgttagtttaaatcacagggactatgcctcccagggtgtttgaattcaaagcacggtcagtgccaggtactggcgatcaaggaagggaagatatctgtggatgcggggcagggtatggttgggggacgcaggcgttggagatctccaggggtcgccgcaatgactgggatcatatcgggcagtctcctccactcacaatgatggcacacgcacgcgcgaacgaattggctgcagcatggtttgaattggattgaaacgcgagggatcacagactgaggcagcacactccgtgtctcgaaggcagagatcaccttctgcttcccggcgcgcgtaggcgcaggcgcccaccgtcatgggcggggctcaggcggaggcgtcgcagcgcgtggtcgcggattggccggccgcgaggccgtcggttggctgtgtccctctccacggcgcacagagcatgcgcggggcgggagtgagcgaaattcaagctccaaactctaagctccaagctccaagctccaagctccaagctccaaactcccgccggggtaactggaacccaatccgagggtcatggaggcatcccgaaggtttccggaagccgaggccttgagcccagagcaggctgctcattacctaaggtatgtctggaccgct

SEQ ID NO: 44050 - DNA, 2300 bp, Homo sapien
actagcttggtggggcttgagctttgaagtttgggattggggagagagagcaatggagccagataaagttcagacctgctcccttacggcaggaaacagagggccaagggcagtttcgaagcaggatcagatctacattttagttagatataaccagacgatttctaatatcctctctcctccctgagtctctataagtgccaaatgcgttgtacaggaagcaagggggaggatgtcagagttcaagcagagaagcaagagggggttaaaaacgttgttggctcttcccaactcagtatgggctgcctggctggctcaagggaacacaaaaaagggacagacaaaatacgtttaagaaataacattaaatatttattaaaatgtattctattgattatatacaagttctttgttttgttttgttttgttttgtttttgagacggagtctcgctctgtcgcccaggctggagtgcagtggcgcgatctcggctcactgcaagctccacctccggggttcacgccattctcctgcctcagcttcccgagtagctgggactacaggcgcccgccactatgcccggctaatttttttgtatttttttttagtatagacggggtttcactgtgttagccaggatggtctcgatctcctgacctcatgatccgcccgcctcggcctcccaaagtgctgggattacaggcgtagaatcatctgtacgtgagactggaagtaagctcactttgaactctccttgaggccagggatgttgtgtagctcatctttgtattcccagcacctagcacagaataaggcacacaagaggcgctcagcaaatatgggaggaggaagggcggaaaaaggggagggaggaaatcgcccttaggagacaccctctttccgcggcggttcctcaactcgggacttctgacctcccaccagcagatggcaagaaagagtcccggcgcgccagcaaagggctgagctgggcggagcagctgaaaatccggcgcgcgcagtctccagccccaatttctacgcgcaccggaagacggaggtcctctttccttgcctaacgcagccatggtaagccgtttagttagcgagctcttaggacgtatccgcctccatcctcccccggccggggctgcccgaggtttcgggattcctactggggatggccgggcagaggcgaagggatcacggcctccgtggtaggccgggacgggctccagggcgaagggcgaacgctggcctagggttggggaggcgcagatctggtgctgctgttgggaaggcctcggtttctgacccggccatacgtcctgatcccgggagaagctgcttttcctcccgggccggagccgcggctgggccaggagctcagactgcgagcccgaggttggtgggcgctgggggtgcccggcggagaaaggttttctttgtcattgcctttttggcacggcctgactttaccatacgtggccggtaagcatctggacacagcattaaaaaggcttccttactctttttaaagtaaaattggtgtcagcttttggctttagtgtacgaaggagcagcacatgtgtttgtgcggatgtcagaatcttgttccatacgtgtcaaaaacagacggtaataaattgtgaaaactttagaaacacaggtagactcctggctcatttctgttgctgtgcgtttcactagtatggtgttcttgaaagaccctaacctctaagcagatacagtttcaaacagtaacatggaaacactttagcaaggttctgaaagatagtaatcagtaaacgttctgaaacatagtaaccaagaatattctctgttacaataagaaggcttgttgcagcttatggatctcacggtgtttgttaaataactgtgtttgtttctgttttatcggaacactatactttaatattgtccacattttgctgaagatgaaactaaactaagagtttagtttcacactaggttttataagctgttctgaaacctgattaacagcattgcaatctaaaactttcaggctcgtggtcccaagaagcatctgaagcgggtggcagctccaaagcattggatgctggataaattgaccggtgtgtttgtaagtatcttatataaatatttccgtggccactgtttttaagtgtctcccaggactcatttggggaccaggctaggggaggaatatctattcttggcttcctctgcccttgaaggagctatactatctagctgtcctccacttccaatcgatttaatatttttgtgcctcatttattc

SEQ ID NO: 44051 - DNA, 2300 bp, Homo sapien
ttcccagtgctctcagattaaaaacctcagaaccaacttccattatctcatcaccttcaccttctctctactcctcacctccaattaatcgatcctttccaataatcacttataacatgctttattgtggattgtatcccagttttagacaaggaggagttcctgccctcttagttaatactgtctgcttggttaatactgtctgcttgagaagagccaacaatgtttccctctcttgctcctctgcagactgctgaggggtaaagtggatggtacagatagagacttgtgaaatggaacctcatgagttaggagcttgatctcatggtgggaagaattcaggcacaggctggatgctctcagggatagtacagtaggacttggcacaataagtgggatgctgactccgtttattcattcaacaagtatttatcaagtgctggacacagtgccgagctctctgttcagtggcaaggggcctgcccagatgaattagggcaggctccatcctggaggtgctcagtttggtggaggccaggtaactaaatttgtccttgctacctaatgtgctgtgtgccctcaccaagtttgaacacaagcctctggggcaagaatgagggatttaccctgactgaggggaccacgagcccacagaaccagagggacttgaactgtgcatttccaaggctgaggtgtgggattaggtggtacccaggaagggggtttggctgtttgtggcagttccaagctaaggaatcgagtccacaagcagtcttgaaagagctgactctagccaggcgcagtggctcaggcctgtaatcccagcactttgggaggtcgaggcgggcggatcgcttgagtccaggagtttgagaccagcctaggtaacatggcgaaaccccgtctctacaaaaaaataaaactacaaaaaattagttgggtgcagtggcgtgcgcctgttgtcccagctactcgtgggggctgaagtgagaggatcgcttgagcccgggctgtctgtcgaggctgcagtgagccatgcactacagcctgggtgacagagtgagaccctgtctcccaaacaaacaaacaaaaagagctgactccctcggaacaaactagcttggtggggcttgagctttgaagtttgggattggggagagagagcaatggagccagataaagttcagacctgctcccttacggcaggaaacagagggccaagggcagtttcgaagcaggatcagatctacattttagttagatataaccagacgatttctaatatcctctctcctccctgagtctctataagtgccaaatgcgttgtacaggaagcaagggggaggatgtcagagttcaagcagagaagcaagagggggttaaaaacgttgttggctcttcccaactcagtatgggctgcctggctggctcaagggaacacaaaaaagggacagacaaaatacgtttaagaaataacattaaatatttattaaaatgtattctattgattatatacaagttctttgttttgttttgttttgttttgtttttgagacggagtctcgctctgtcgcccaggctggagtgcagtggcgcgatctcggctcactgcaagctccacctccggggttcacgccattctcctgcctcagcttcccgagtagctgggactacaggcgcccgccactatgcccggctaatttttttgtatttttttttagtatagacggggtttcactgtgttagccaggatggtctcgatctcctgacctcatgatccgcccgcctcggcctcccaaagtgctgggattacaggcgtagaatcatctgtacgtgagactggaagtaagctcactttgaactctccttgaggccagggatgttgtgtagctcatctttgtattcccagcacctagcacagaataaggcacacaagaggcgctcagcaaatatgggaggaggaagggcggaaaaaggggagggaggaaatcgcccttaggagacaccctctttccgcggcggttcctcaactcgggacttctgacctcccaccagcagatggcaagaaagagtcccggcgcgccagcaaagggctgagctgggcggagcagctgaaaatccggcgcgcgcagtctccagccccaatttctacgcgcaccggaagacggaggtcctctttccttgcctaacgcagccatggtaagccgtttagttagcgagctcttaggacgtatccgcctccatcctcccccggccggggctgcccgaggtttcgggattcctactggggatggccgggc

SEQ ID NO: 44052 - DNA, 2300 bp, Homo sapien
taaaacaacctgacatcgtgggaaggcaggaggaatctccgcgaaccctggggcaagctcttcgtaccccgttgcctactgttggcttttcggcgagcctagtgagctgtacctggccccacggtccgggagagtagcatttctccgggtcgcatcctgccagcctcctgccctggatgaccacagaacagaaaccctcgaacccaaccccagctcagaacttctagaagagccaccgctgccatataggccccccatgcgactctgcccagaatctggcgactttaagaggaaaaggagcccccagcctcagctcttcaacgaatgagatagtacagcccccccaaaaggcagacaggctccaagacagccctgcagaaaactaatgaccattcccccgtctcgtgtgcgccccgctcttccaggtcactccttgagcccacagctctctcccaaaacccctgaagcccgttttggcccccgactagatttaggtcagaaaacagacactaacggctctcctttgcctcagtgaaattactaagtggaatttattgggcaagtccacgcagggcggtggggagagccggtgtcccgggccctggcccccgacagctttagaagccgggcactggccagggctccgggcgagggctgcccatagcccggactcgccagccccaccccgggagccttggccggtccacagggctgccggactcgcgtggccgcgtggactccgttccccagccggccctttgctttcacacgatccgcggtgactgcaccagctcgagcgcctttaaagggccacagacgccagccgctgctataaaaatgtgcccggcggcaaagctgcagaaggggcaccgctgagctgccgagaggaagctcgctctgcccggctgccctcttgtagtccgccggcgaggggcagttctcggtgaggaggaagagagcagcggacggcacagcacccgcgcgggccctccgtgagtatccagttcagattttgccaccaactcgcccacgagccaggacatgtgctaataatgccctaagccggttataaagacgtggaaattgaggggagaaaaaaaaagggaaaaaaagggtctgtccttcctgggattcctagccgaggccagtctgctgccgtgtgcgtgtgcgtcagggctctccgggcggcaatgggggcttgagagccgggtccccagcgccgggaagggagcgcggtggccgccaccgccaccgccccggagtccggcgccgaagctgcgggcgggcgggcgggcaccagctcggtcaggggctgcttggcgcggcactgtgcggtgcagcggcggcgcggcgcggtgcgggcttttcccaggcgccccggggtcgggtggccaacggcgcggccgcgggcgctgagcgcgaccggttcgcggtagcggtggcggcggcgtgcgtgccaggggctgggggctccgccgcctctcttgcggctcaccgagctccgcgcttccctctctccagggcaggcggcttctcagaggtaagccgggccgccgggctgggcgccgggctgggcggcggggccgaggactcccgtggagcgggtatggggagtgggcggccgccaggcgggccggagggttctggggagacttgctttctgttggaaagctgctctgctgggggcgaggggccgcccgcccgcccgcccgccagcgctcgggttcgcttgccagcgcgcccccctgccggccagcggggccgggtgcccgcttctcccggggagacggcagcaccttttctccctgcgcccgcgctttctccagcttggcttccaccgactttgctaatctcccggaccgcatctggacgctctggctccggagctgcacaaagctcagatttacttcggggaattgaggcaagagggggcttttcgggccgagttcagcggaattgcgggatggaagttagcgaatttgggcaacttgcctctactgcccagtcgacctcagccctcccctcccccgacacacgcccacacacacacacccacgcgcacacccctctccctataaacgcgggctggcgagccgcgcgccgagtccctgcttcgcagagcaccggacttggagtcagagagacctggctgcgaatcccggctccgccactttctagcgctgtgaccttgggcaagttaccgcacctctccgagcctctctcactcttctcctagcggggttttagcactgaccgcaggcggcttggctagggggtaggctcagcctgctgccgcgtcg

SEQ ID NO: 44053 - DNA, 2300 bp, Homo sapien
tggagggcggatccacacctcccggatccggagcctgcagcggagaagctgccgctgttgccagacctgctcccgagccaagccggggctgacggggagggtgggtcaggggttcaaattagtaacatgcaattcgaaagcctagagtcgctcattctccaccacttagttttcgcagaaacattttttttcatcccaggcaaacaccaagagaacttgagagtgtatttcacacgcggtttgcagtaaggctttagggtgccgacagatcccgccttttatcagagggagactaggcagggcccacaatctggcaagcaaagtgagaaagtgcagcgaagatgtgtggggtgtggatgctaccggggtttgtgttgggacagggtaagtgaaaagactggagctgtgcaaggcagccttgagggctggagaatgggtttacctggcgaccaagacactcgcccaagcttcctccagatgccgaggaagggccttgatccgtctctccatttgcttcccatctttgtgtcggtaagccggtcagtccgtcaacaaacagaactttgttagaagagcaaatgcagggcacttggggctactaaaaaaagaaaaagaaaagaaaaagagaacttcaggtcttcaaatccaattaagaagacagaacacatacatagtgaaaatgacttcgtgacattccctcccccccttttttaacatcaggaccttttcttaaagagtatgttttataaacagtgtaaactgagtcgctgttgctgaaaggcagcaaaaaaagagcggcggggccggggcggggtgggggggtgacagaggggtaatcccgatggcctccctgtaagtggtaaggtgggaatttcttggccacaaagaatccgaattgaggtgaaggagaagacccagacctctttccagtaaggatttgtaagacaacatctctacctaagaaagacgaactccaaatgcaaaacgttattcttgctagacgggaatgattatgtagttacaataaaacaacctgacatcgtgggaaggcaggaggaatctccgcgaaccctggggcaagctcttcgtaccccgttgcctactgttggcttttcggcgagcctagtgagctgtacctggccccacggtccgggagagtagcatttctccgggtcgcatcctgccagcctcctgccctggatgaccacagaacagaaaccctcgaacccaaccccagctcagaacttctagaagagccaccgctgccatataggccccccatgcgactctgcccagaatctggcgactttaagaggaaaaggagcccccagcctcagctcttcaacgaatgagatagtacagcccccccaaaaggcagacaggctccaagacagccctgcagaaaactaatgaccattcccccgtctcgtgtgcgccccgctcttccaggtcactccttgagcccacagctctctcccaaaacccctgaagcccgttttggcccccgactagatttaggtcagaaaacagacactaacggctctcctttgcctcagtgaaattactaagtggaatttattgggcaagtccacgcagggcggtggggagagccggtgtcccgggccctggcccccgacagctttagaagccgggcactggccagggctccgggcgagggctgcccatagcccggactcgccagccccaccccgggagccttggccggtccacagggctgccggactcgcgtggccgcgtggactccgttccccagccggccctttgctttcacacgatccgcggtgactgcaccagctcgagcgcctttaaagggccacagacgccagccgctgctataaaaatgtgcccggcggcaaagctgcagaaggggcaccgctgagctgccgagaggaagctcgctctgcccggctgccctcttgtagtccgccggcgaggggcagttctcggtgaggaggaagagagcagcggacggcacagcacccgcgcgggccctccgtgagtatccagttcagattttgccaccaactcgcccacgagccaggacatgtgctaataatgccctaagccggttataaagacgtggaaattgaggggagaaaaaaaaagggaaaaaaagggtctgtccttcctgggattcctagccgaggccagtctgctgccgtgtgcgtgtgcgtcagggctctccgggcggcaatgggggcttgagagccgggtccccagcgccgggaagggagcgcggtggccgccaccgccaccgccccggagtccggcgccgaagc

SEQ ID NO: 44054 - DNA, 2300 bp, Homo sapien
agcagtggagatgacaggaagtcaccaggggggagaccctttctggcatgtgggcacagagaaatgtggtggagggcgctcctttttctgcccttcaatggtccggatgggggagggggctggctgttgagcaactgctccggagacactccagaagccgagatgaacatatgcctctttctaacaattggcctgggagccatccaatagatggagggcggatccacacctcccggatccggagcctgcagcggagaagctgccgctgttgccagacctgctcccgagccaagccggggctgacggggagggtgggtcaggggttcaaattagtaacatgcaattcgaaagcctagagtcgctcattctccaccacttagttttcgcagaaacattttttttcatcccaggcaaacaccaagagaacttgagagtgtatttcacacgcggtttgcagtaaggctttagggtgccgacagatcccgccttttatcagagggagactaggcagggcccacaatctggcaagcaaagtgagaaagtgcagcgaagatgtgtggggtgtggatgctaccggggtttgtgttgggacagggtaagtgaaaagactggagctgtgcaaggcagccttgagggctggagaatgggtttacctggcgaccaagacactcgcccaagcttcctccagatgccgaggaagggccttgatccgtctctccatttgcttcccatctttgtgtcggtaagccggtcagtccgtcaacaaacagaactttgttagaagagcaaatgcagggcacttggggctactaaaaaaagaaaaagaaaagaaaaagagaacttcaggtcttcaaatccaattaagaagacagaacacatacatagtgaaaatgacttcgtgacattccctcccccccttttttaacatcaggaccttttcttaaagagtatgttttataaacagtgtaaactgagtcgctgttgctgaaaggcagcaaaaaaagagcggcggggccggggcggggtgggggggtgacagaggggtaatcccgatggcctccctgtaagtggtaaggtgggaatttcttggccacaaagaatccgaattgaggtgaaggagaagacccagacctctttccagtaaggatttgtaagacaacatctctacctaagaaagacgaactccaaatgcaaaacgttattcttgctagacgggaatgattatgtagttacaataaaacaacctgacatcgtgggaaggcaggaggaatctccgcgaaccctggggcaagctcttcgtaccccgttgcctactgttggcttttcggcgagcctagtgagctgtacctggccccacggtccgggagagtagcatttctccgggtcgcatcctgccagcctcctgccctggatgaccacagaacagaaaccctcgaacccaaccccagctcagaacttctagaagagccaccgctgccatataggccccccatgcgactctgcccagaatctggcgactttaagaggaaaaggagcccccagcctcagctcttcaacgaatgagatagtacagcccccccaaaaggcagacaggctccaagacagccctgcagaaaactaatgaccattcccccgtctcgtgtgcgccccgctcttccaggtcactccttgagcccacagctctctcccaaaacccctgaagcccgttttggcccccgactagatttaggtcagaaaacagacactaacggctctcctttgcctcagtgaaattactaagtggaatttattgggcaagtccacgcagggcggtggggagagccggtgtcccgggccctggcccccgacagctttagaagccgggcactggccagggctccgggcgagggctgcccatagcccggactcgccagccccaccccgggagccttggccggtccacagggctgccggactcgcgtggccgcgtggactccgttccccagccggccctttgctttcacacgatccgcggtgactgcaccagctcgagcgcctttaaagggccacagacgccagccgctgctataaaaatgtgcccggcggcaaagctgcagaaggggcaccgctgagctgccgagaggaagctcgctctgcccggctgccctcttgtagtccgccggcgaggggcagttctcggtgaggaggaagagagcagcggacggcacagcacccgcgcgggccctccgtgagtatccagttcagattttgccaccaactcgcccacgagccaggacatgtgctaataatgccctaagccg

SEQ ID NO: 44055 - DNA, 2300 bp, Homo sapien
tccttactatttctgtctaaatatgttttcccatttcccacagaatgtagtctattctctttagcctggtattcaatgttcttcatgatctggcccttttagctaaactcgactagaaattttcccttttgtgttactgtttatgctgttcattctagtcagcatgccctctcctggctcccatcttcaccaagcaaaatcttgcccacctcctaagaccctctcaaatgccatcaaagatgaattctagttaccatttattaaatgccagttatttagtacttaatgcttatttattaagtaggctaagcatcctacattcattgactctgcattgcctttggtttcttgtgtacttgccccatcttctgtataagaatgcaaattctggctgggcgcggtggctcacacttgtaatcccagcactttgggaggccgaggcgggcggatcacgaggtcaggagatagagaccacggtgaaaccccgtctctactaaaaataaaaaaattagctgggcgtggtggcgggcgcctgtagtcccagctacttggacaggctgaggcaggagaatggcatgaacccgggaggcggagcttgcagcgagaggagatcgcgccacggcactccagcctgggcgacagagcaagactcctctgtctcaaaaaaaaaaaaaaaaaaaaaaagaatgcaaattccttgagagcagagatcacatcataatttacctttgaatcctcagctgtactgtacacttaatatcagataaatgtttgatgaatgaatgactgcagagcttttaactagttactatgggaagacataaattaaagaaacataagatcttacattctagttacagagcacatcaccaaaacacccccaagattttcagaataagtattgaagggatacaaaatggagggtgaacaaagttatatcataacacaaagtcatcctggacgaatcaagtttatataataaagggaatgttcaaaggcttcagtgtcaggctgacctaattttgaattcctacttatctgcttgttaagtatgtgattttgaatgttgtttctctaaactgcatctgtaaaatgggtgtattgcaacctcctttataggactgttgcaaggatgaaatgagataatatggccaatgtgcatgtcacaatcttcaataaatgtttaaagtctaaaaagcaagccagactttaaatatagtaaggatattaggttgtcccagtggtgttagtcagtcagtttaggttgccatgagaattaagatcctgagcactggccagcttgtatcagatcataggggcctccaggaacctccaaatgctgatggtaattctaaaaccgcctcagatagtcttaaactggaccctcacaccaaacctaaaatatttccctaatctatgtttagctgcagaaacaagaggaggtaggaggagaagagctgcagtttccaaacaccactgcttgcaaccttcctaccacatgaatgttcaaggagttacatttgacatcattgcttgatcggaatctaccaagcaatttccactgcaccagccagtctcttgggaaagtactatcagatttgccagagtaaattattgagattgttaactctcatgtggacatggatagttaatgatgaaaagaaatgaactataaaattgcatcacagaatttactgtgtaaacttttcaaaccatttgtgccattaaatagcgcccccaccaaaaaaaaaaaaaaaaaaaaaaagcctatccttaggataggcagctgatgtagctggatggtgggggctctaggtggccacgttctatctgtgtttatatggttaaatggatgaaatggatgtgtttgcagattgaaacaattcataaagagttgaggctacttttttttttttttttttttggtcttagcgctgaaactaaaaatcgcggttattttagtgtttagccccggctcttccgttgctcaaacctccggaaactacatctcccagcatgctgtgaaactggtctgacttcatctcaaatggccccgtagggcaacaaggatggttagttttgaccctacttatttgtgccataaaaacaatcgatcctaattgacagctatttggacttttacatctgccaaacccttttccttgaactgtggtcactaaatgaggggagtctggtctgggaagtcccatccattccttcaataggatggggagcggtgatagtgtctccggcgatctcaagaataggagggaatgttgaccagggagcaccgctgcggc

SEQ ID NO: 44056 - DNA, 2300 bp, Homo sapien
aaagaaagcaaacgttcaacataaaccatagcgtttgtacagtttaggcatggtaagccactgttattagttctgggaatggtgagaactctcccagaatccaagtttctaagtttctaaatgccagccaagggccaaccttgtaagcaagcctttccaagaatagcagttctggcctactgtcttaactcttttctgcacaatgggcttaatttttgtgtgtggtataaggtagagttcaacttcattcttttgcatgtggatgtcactgttccagcaccatttgttgaaaaggctatttttccctcatttaattatcttggcgtccttgttgaaaattaattgaccaaaatataatggtttatttttgaactccctgttctattccatcgatctatatgtccatcctataccaatatgacacagttttgatagttttgtagttttgatagctttagagtaaattttgaaatcaggaagtgtgagctctccaacttcagtcttctttttaaatatgaatgttaggatcagcttgtcagtttctgcaaagatcccagctggtatgttgatagagattgtgttcagtctgtacatcagtttttgaaatattgccatcttaatgatgttaagtcttctgacccatgaatatggaactatatttcaatttatttaggtctttaatttttttcaacatgttttatagttttcagagtatttgttttggacttcttttgttaaatttattcctacatattttgttattcttaacgttattttttaatggaattgttttcttaattttattttaatattgttcattgctgctgtttacaaatacaactaatttttttattatagtaagacatttaacatgagatctatcctttaaaaaatttttaagtgtacaatatagtatcattaactataggcttgatgttgtacagtagatctctagaacgttttcatcttacataactgaaactttatacccattgaatagcaagttcccattttcccctctacccagcccctgacaactaccgttctactctctgcttctatgagtttggctgtttcagatacattacataactggaatcatacagaatttgttcttctgtgactggcttatttctcatagcatagtatcctgcaggttcatcgacactgtcatattttgcaaaatttccttcgtttttaaagtctgaataatattccattttatgtattaccagattttcttttgccattcagttgttaatatatatttaggttgttttcatatcttgactattgtgaataatgctgcatttgaacatgggcatgcaaatatctcttcaagattctgacttcaattcttttggataaatatccagaagtgggattgctgaatcatatggtagttctatttttaatttttgaggaacctccataatgtgttccatagcggctgcagcattttacattcccagcaacagtgtacaagggtcctaatgtcttcacattctcaccaatacctgttatctttgggtgtttttttaaccacggtcatcctaacaggtgtgaggtgatagctcattgtggtttgatccgcatttccatgatgattagtgatgttgagcatctttacatgtgtgtggtggctatttgtatatcatctttggtgaaatgtctactcaagtaaaatttaattgatttttgttattgatcttatatcatgaaacttcactgaactcatttattagttgtagttgcttgttagtgaattccttagaatttctatatacaagatcatgtcatctgcaaatagtttttacctcttcttttccaatctggatgccttttatttcttttcttacttaatctccctggttcaggccccccataaaatgttgaatacaagtgataagagtggacattcttgtcttgttctgatcttcggggggaagccttcagtcttcaaccactcattatgatgttagctgtgggttgttgtaggaaaaaaatctaaacttttattagattgaggaggttcccttctgttcctagtttgttgagtgtttttatcatgaaggtgtgtcgaattttgttatgtgtttttttctgtatctattaagatgatgcgttttttatcttttattctgttgatgtagtgtattacattaattgatgttcagatgttaaaacagccttgaatttctggaatcagtcccacttcatgttgtataatccttttagtatatcactgaatttggttttctagtatttcctggaggattttcgcatctatattcataaag

SEQ ID NO: 44057 - DNA, 2300 bp, Homo sapien
gattttgaagtggcttgttatttgccagtcattgcatttgcgtggcgaatcactgcaatggaaagcatctccttgagaactctaagtgtgtcacgatatctaactatatcactggctgttgaacctgaaagtcccatatttgagttcttaaacattccctccttcctcatcatcattaccaaattactagtcatctcctaggtgcctgcctctatgctaaattgggcggaggttttggggtggaatggagggagcttatgaggagagaaataaaaagataaacgaaaatgcaaagtcaccgtggcctggatgaggtggctaaggaaggtttagaacttgaagtcaatcggtctaattttcttatcccgcgattcagggaataggtggtacttaagcagagccttgaaaggtttgcaaggtttgaataagcagagagcaacaggtgggggatggagggaggagccggagatgaacggagcaaaggcactggggtccaagccgggccgccccaagggttgcagactgattccacgaggccagtaagcagcgttatctgcaagctgctgccttttttttttctttttttgaaacggagtttcgctcttgtctcccaggctggagtgcagtgacgcgatcttggctcactgcaacctccacttccagggttcaagcgattatcctgcctcagcttcccgagtagctgggactacaggagcgccccaccacgcccggctaatttttgtatttgtatcggcggcgggggaagcgggggggggggtttcctccatgttggccaggctggtcttgaactcctgacctcaagtgatccgcccacttcaggctcccaaagtgctgggattacaggcgtgagccaccgcacccggccactacaagctgcttttattattttatttttattttattttttttgagacggagtcttactctgtcgcctgggctagagtgcagtggcacgatcttggctcactgcaacctctgcctcctgggttcaagcgattttcccgcctcagcctcccgagtagctgggattacaggcgcgcgccaccatgccgggctaattttgtatttttagtagagatggggttccgccatgttggccaggctggtctcggactcttgacttcaggtgatctgccctcctcagcctcccaaagtgctgggattacaggagtgagccaccgcgcccggcctccaagcttcttacgcagccttccttctccactttattttcagctgaatatttgttgcctcagccttgtgacctacgtgcgcacgagggagccatccaaagcagttataggatctcttccagctcgagtcctgccaacgccgccttctggggctgccagctcccagctgttccccgcactggcttcctcagagtgcaccactgcctcctccctcccaagcccgcagactcgccagttactaaggagtaaagtaccctagggagttcctgtttggttggtctggctggaagtgaggcgtgtaatctgagcttttaaagtcaaaatctaaaatacaataaagacccagaaatccaagtcttcagacctggaacacaagcgtgtctttcagttttgaagttcactgtaggttcctttataaaactagtcctgtagaacgaaggagagcctccccaacatcctgtgtgcacagcaagtgtggaaaactgaaatagtgatctgaggtgtttcgaaaataaacctcggaaagcacattgcctacggtgacacattctcggccccggggcgggcgagccccggggtcgcagcgcgcagctgccagaaccagtcgcgcccgccccgcctcccgctcgcgtctcccgcaaggtggaggcggcgcagcggtcgttgacctgttggcggcggccgggcgggaggctgtgggccgcggcggtctcccggggttgaggggaggatgcaggagtcacacgcggaggccggactggactaagggggcaggagcggcgcctggggcgctgcggcggggctctagaccgcgggaagccagtgctagcgctggcgcgtggtgggcccctgaggccgccggagtccggagaggtacgcggaatccgcggcgccaggcctgagcggtgggagggctctgcggggcctggtgttcaggcgtcccaccacgagggtggagcagcgttggatacttgttccttagggaccgaaggctccggtggcacccgggctatttctcagaggacaattagtaacgtgtcgccatgaggagccggagtaactccggggtccggctggacggctacgctc

SEQ ID NO: 44058 - DNA, 2300 bp, Homo sapien
gaacaaggacaacaaaaaagtttcacatcaccgctattagctaacagggtaccacggtcctagtcaatgtaataagaaaagggaaaatgaatactgtattaataatatgcagagactgtgattgcctacctagaaaacgcgcgagaatccactgaaaaagcattctaattaaggagaggggatattaagatggccgtatgccccaaagtatacaaaaccagtaggcttcctatatgtcagaaataagtaattagaagacataatgggaaatacacaattcatagcagcaatgaaactaaaaagactgccatggacaaacttaagaattatgcaaaagctatataaagcaaactaaaaggtgattgaagtaccctgattaaagagcagaatcaatggaagaacatgaagaacatgctatattttgtggctgaggaccctccatcttctcatgttaatgagatgttaattattctcatagtaaactataagtcctaagaaattctagttaaaattcaagccagggaattttttttaacttgaaaactttgattttgaagttcttacagatgacgacattttccaaaatattttgaagaaattttgtaaaagaagaatagtgaggggggagttagttctactcacacaaaaacaatttctaaatctttatagcagaattagcaacaacagaatttagatcaatggaagaaatttgaagtgcaagcgtggacattatatggaaatttagtacgtgttatttcgaggtataacaattgctgtataaaagtcgaccgtaatcccagcactttgggaggccgatgagggcgggcctgaggtcaggagttcaagaccagcgtggccaacatggcaaaaccccgtctctactaaaagtacaaatattagccgggcgtggtggcgggcgcctgtaatcccagctactcaggaggctgaggcaggagaagcttgaacccaggaggcggaggttgcagtgagccaagatcgcaccactgcactccagcctgggtgacaagagcgagactccgtctcaatagcagcaataacaacaacaacaacaacgacgacgacgacgtcgaccgttttgttatgtgtgaggaggctatactggttactgtctagaaaggttaggatgaaagaaaggaatgctaagttgtaccacgatacaataagagaatgcacttgctagggtggaggagtcttcttgctatttatttgcaggcttcctaggggctgacctcaaagcaggagtcgatttaaggtccccgaatcgcagatgagaggtgaaatgggagagagcgctctgtagagaaaggatgaggcgcagtgacatgagagtaagagaggcaagaagaggatgtcattatgggaatggtggtttgcaaagttagattacaattaacaataactttccagactgtgtaggagagaaagaatacgcaagagaactgatgttgtgcaccccagatccactgatcataaagaaaaggaaacacatcttcagttctccatggaggtcacttgtttcccgggtccttcctccacatctagatgaccacacagggtgcaagcaatgtagatgcgatgtacactataataatgaaacgaacgcaaaggaaaactcactaagtgcttactctaggccaggcactgagcaaagcaacttcaggtagatgatctgaagaggaagctgcagaggcagccgctggacagaaatgcctacgctcttaggagccttctccacaggagagaaggagggatacgaagataatccagaatgatcggattcatcacaacaacaggtaacagttattaagcgcttacactgggcctggcttttaggcttatggtctctttcaagcctcacatgagcagccccacctctgggagcagcgcccccgcatccctcaggctgtagcctgcggtactgttttctgccagaagaggcactgcggggcggcgcccgcccattcccacagctccgggaagacccgggcggcggaggcttagccccctcccctcccgcttcttcctcctcctcctcctcctcctcctcctcctcctcctcctcctcctcctcctgctcctcctcctcctgctcctcctcctcctcctcctcctcctcctccttctcctcctcctcccggtctgagggcggcggtctccgactcaagaccctggggctccgggtcttcttagcagccgccgcagcagccgcggcgacgtcactgtcctctcggcctggcacacagcgctccggccgccgaatgcccgtggacgcgcatctc

SEQ ID NO: 44059 - DNA, 2300 bp, Homo sapien
gtgagccaagatcacgacactgcacttcagcagcctgggtgacagagtgaggggctgcttttttgtttcttctttgtttacaaatcaaataaagaaagcagcccaaggaaggaaggaaggaaggaaggaaggaagggtgggagggagggaaggagggagggaggaaggaaggaaggagaaagagaaagagagagagaaagggagaaagaaagggtaagaaagaaagaaaggaaaagaaagaaagagatagaaaactgattaagatatacatttatgattttttaaccttttggattataagttaaacttggctgaaggttttggaaaaaacctgggaagttacctaggctgggtattctagagataatggattctcccataactgatccatagattcagtgaaaatgcagtccaaatctgttacaaccgagtttttgggaaacttgaaattgcatgctaatttatgcagaaggacaaaaggcctaagacattcgggggtggaggtggtgtggtgtagggagagaggaagaagaaaggaaggaaggaaggaggaaaggaaagaacggaaaggaaaggaagggaagggaagggaagggaagggaagggaaaggaaagcaaagaaaaggaaacgaaaagttaaggaaaacacaaggaaacaatattaatatggaaatgctggcagcattccttttaaaatccggaacaacccaaagaagcccaattttgctgtcgctattagatctggtactaaatttcctagccagcgctgttaaaaaacaaacagccaaccaaccaaaaaaaaaaaaaaaaaaacaaacaaacaaaaaacccccataacttcaattctatttctactatgcataaactcacagataatcccagaacgcctactatagagtttagcatgttgacagactttaagatcaagtcacgtttttaaaagttaaaggcatttctgtaaattcgatccaaatagaaattgtccttttaaacagacatcaagtacaagaacagcaacaatctacagtatcttggaataaatacaataaatgatgtgcaagatctaaatatacaaaagatgaaactaaaaactgaactgaaagattaaaacattaaggacgcacataagtggagacatcccaagttggtgaacaggaaggctgagtattctacagatagtagattctccccctaactgatccatagattcagtgaaaatgcaatccaaagctgttacgactgagtctggggagacttgacattgcatactaattcgtgcggaaggacaagaaggcaaagaatggcaaagaatagcaaagatgtgtttggagatgatgaacaccatgcagggacttgccctagcagatgtcaagatgtattgcgaagtgaaaaaatttaagacaatttagtagtggtacaggaatagacacatttatctgtggaacataacagggagttcataaacagagacacacaaatatggacgaaagtgtctccaagcattgttccctgggggttgcaaagtcaccactgattgggaatccgcggcatggaaatatggatggatctttaatcacatgctgaatttttaaaaggtaaattacaaaataccaagtacatgagttataaatgcatgcacaccaaatatttcacacccaaagggagactaatctgggaaacaagccctggggagcataaagctcaacgatcacttcacgatttcttgactgacctagtacagggagcgggagaagctacggggaggtgatgggggcgtggcctcagaacgtgagcgtcaagagatctcgaggttcattggtcgccagccacagcggcgggaggtcgaaggcagcgcaagagctcattggcctttgtggcaagagcgggaagggaagcagaagctggatcttccctcagaccgtctgactggttctgacttgccggaggctgaggcaaccacaggctgacatcagaattaggtcctcgttctccacgcctcttatttcctcccaccctcctgagccagattcccaaccccttcccctctctgctacctcagcagggaacccccaactgctcctgatgtcccatcgcgccctcagctctcccggaatccctttcgggaggactccttgctccagccccctgagccctggcctttggccaatgaggcagggctcatgggattgcttttgattcggaggtccgggagggagtggatgattgggcttcctgaggaagtggtgcgctccagggtggtgggactgcgtgtgtggggtggggtgggggtggggggaaat

SEQ ID NO: 44060 - DNA, 2300 bp, Homo sapien
acgacactgcacttcagcagcctgggtgacagagtgaggggctgcttttttgtttcttctttgtttacaaatcaaataaagaaagcagcccaaggaaggaaggaaggaaggaaggaaggaaggaagggtgggagggagggaaggagggagggaggaaggaaggaaggagaaagagaaagagagagagaaagggagaaagaaagggtaagaaagaaagaaagaaagaaaggaaaagaaagaaagagatagaaaactgattaagatatacatttatgattttttaaccttttggattataagttaaacttggctgaaggttttggaaaaaacctgggaagttacctaggctgggtattctagagataatggattctcccataactgatccatagattcagtgaaaatgcagtccaaatctgttacaaccgagtttttgggaaacttgaaattgcatgctaatttatgcagaaggacaaaaggcctaagacattcgggggtggaggtggtgtggtgtagggagagaggaagaagaaaggaaggaaggaaggaggaaaggaaagaacggaaaggaaaggaagggaagggaagggaagggaagggaagggaagggaaaggaaagcaaagaaaaggaaacgaaaagttaaggaaaacacaaggaaacaatattaatatggaaatgctggcagcattccttttaaaatccggaacaacccaaagaagcccaattttgctgtcgctattagatctggtactaaatttcctagccagcgctgttaaaaaacaaacagccaaccaaccaaaaaaaaaaaaaaaaaaacaaacaaaaaacccccataacttcaattctatttctactatgcataaactcacagataatcccagaacgcctactatagagtttagcatgttgacagactttaagatcaagtcacgtttttaaaagttaaaggcatttctgtaaattcgatccaaatagaaattgtccttttaaacagacatcaagtacaagaacagcaacaatctacagtatcttggaataaatacaataaatgatgtgcaagatctaaatatacaaaagatgaaactaaaaactgaactgaaagattaaaacattaaggacgcacataagtggagacatcccaagttggtgaacaggaaggctgagtattctacagatagtagattctccccctaactgatccatagattcagtgaaaatgcaatccaaagctgttacgactgagtctggggagacttgacattgcatactaattcgtgcggaaggacaagaaggcaaagaatggcaaagaatagcaaagatgtgtttggagatgatgaacaccatgcagggacttgccctagcagatgtcaagatgtattgcgaagtgaaaaaatttaagacaatttagtagtggtacaggaatagacacatttatctgtggaacataacagggagttcataaacagagacacacaaatatggacgaaagtgtctccaagcattgttccctgggggttgcaaagtcaccactgattgggaatccgcggcatggaaatatggatcgatctttaatcacatgctgaatttttaaaaggtaaattacaaaataccaagtacatgagttataaatgcatgcacaccaaatatttcacacccaaagggagactaatctgggaaacaagccctggggagcataaagctcaacgatcacttcacgatttcttgactgacctagtacagggagcgggagaagctacggggaggtgatgggggcgtggcctcagaacgtgagcatcaagagatctcgaggttcattggtcgccagccacagcggcgggaggtcgaaggcagcgcaagagctcattggcctttgtggcaagagcgggaagggaagcagaagctggatcttccctcagaccgtctgactggttctgacttgccggaggctgaggcaaccacaggctgacatcagaattaggtcctcgttctccacgcctcttatttcctcccaccctcctgagccagattcccaaccccttcccctctctgctacctcagcagggaacccccaactgctcctgatgtcccatcgcgccctcagctctcccggaatccctttcgggaggactccttgctccagccccctgagccctggcctttggccaatgaggcagggctcatgggattgcttttgattcggaggtccgggagggagtggatgattgggcttcctgaggaagtggtgcgctccagggtggtgggactgcgtgtgtggggtggggtgggggtggggggaaat

SEQ ID NO: 44061 - DNA, 2300 bp, Homo sapien
ggacaacaaaaaagtttcacatcaccgctattagctaacagggtaccacggtcctagtcaatgtaataagaaaagggaaaatgaatactgtattaataatatgcagagactgtgattgcctacctagaaaacgcgcgagaatccactgaaaaagcattctaattaaggagaggggatattaagatggccgtatgccccaaagtatacaaaaccagtaggcttcctatatgtcagaaataagtaattagaagacataatgggaaatacacaattcatagcagcaatgaaactaaaaagactgccatggacaaacttaagaattatgcaaaagctatataaagcaaactaaaaggtgattgaagtaccctgattaaagagcagaatcaatggaagaacatgaagaacatgctatattttgtggctgaggaccctccatcttctcatgttaatgagatgttaattattctcatagtaaactataagtcctaagaaattctagttaaaattcaagccagggaattttttttaacttgaaaactttgattttgaagttcttacagatgacgacattttccaaaatattttgaagaaattttgtaaaagaagaatagtgaggggggagttagttctactcacacaaaaacaatttctaaatctttatagcagaattagcaacaacagaatttagatcaatggaagaaatttgaagtgcaagcgtggacattatatggaaatttagtacgtgttatttcgaggtataacaattgctgtataaaagtcgaccgtaatcccagcactttgggaggccgatgagggcgggcctgaggtcaggagttcaagaccagcgtggccaacatggcaaaaccccgtctctactaaaagtacaaatattagccgggcgtggtggcgggcgcctgtaatcccagctactcaggaggctgaggcaggagaagcttgaacccaggaggcggaggttgcagtgagccaagatcgcaccactgcactccagcctgggtgacaagagcgagactccgtctcaatagcagcaataacaacaacaacaacaacgacgacgacgacgtcgaccgttttgttatgtgtgaggaggctatactggttactgtctagaaaggttaggatgaaagaaaggaatgctaagttgtaccacgatacaataagagaatgcacttgctagggtggaggagtcttcttgctatttatttgcaggcttcctaggggctgacctcaaagcaggagtcgatttaaggtccccgaatcgcagatgagaggtgaaatgggagagagcgctctgtagagaaaggatgaggcgcagtgacatgagagtaagagaggcaagaagaggatgtcattatgggaatggtggtttgcaaagttagattacaattaacaataactttccagactgtgtaggagagaaagaatacgcaagagaactgatgttgtgcaccccagatccactgatcataaagaaaaggaaacacatcttcagttctccatggaggtcacttgtttcccgggtccttcctccacatctagatgaccacacagggtgcaagcaatgtagatgcgatgtacactataataatgaaacgaacgcaaaggaaaactcactaagtgcttactctaggccaggcactgagcaaagcaacttcaggtagatgatctgaagaggaagctgcagaggcagccgctggacagaaatgcctacgctcttaggagccttctccacaggagagaaggagggatacgaagataatccagaatgatcggattcatcacaacaacaggtaacagttattaagcgcttacactgggcctggcttttaggcttatggtctctttcaagcctcacatgagcagccccacctctgggagcagcgcccccgcatccctcaggctgtagcctgcggtactgttttctgccagaagaggcactgcggggcggcgcccgcccattcccacagctccgggaagacccgggcggcggaggcttagccccctcccctcccgcttcttcctcctcctcctcctcctcctcctcctcctcctcctcctcctcctcctcctcctcctcctcctcctgctcctcctcctcctcctcctcctcctcctcctcctccttctcctcctcctcccggtctgagggcggcggtctccgactcaagaccctggggctccgggtcttcttagcagccgccgcagcagccgcggcgacgtcactgtcctctcggcctggcacacagcgctccggccgccgaatgcccgtggacgcgcatctc

SEQ ID NO: 44062 - DNA, 2300 bp, Homo sapien
ctgataaatgttgtgtgtgttctgactgctccaccatctatcctctctctttgggactccttattccctgagagacaatattattgaaattaagcctactaataaccctacaatgacctttaattgttcaagtgaaagaaagatttccattcctctaaatgtaaatcaaaagttaaaaatgagcttagtggggaaggcatataaaaatccaggagaagccaaaagctaggtcttttatgccaaatggttagccaagttgtgaatgtaaaagatcaattcttaaaaaaaaaataaaagtgctactctagtgagcacatgaataaaaaagcaaaacagcagtattgctgttatgaagaaagttttagtggtctggatagaagatcaaaccagccacaacattcccttaagccaaagccttatctagagcaaggtcctaactcttttcaattctatgaaggttgagagagataaggaggctgccgaagaaattttggaagctagcagagtttggttcatgaggtttaaggaaataagccatctgcataacataaaagtacgaaatgaaggagcaagtgctggtgtagaagctacagcaaattatccagacaatctagctaaaattattgatgaaggtggctacactaaacagattttcaatttaggcaaaagagccttatatttgaagaagatggcacctattacttttatagctagagaggcgaggttaatgcctagtttcaaaacttcagtgaacaggctaagtgtcttgttagaagctaatgcagctggtgacttcatgttgaaattaatgctgaaatttggaattgatcattatcattccaaaaatcctaaggccttgacttagtgtgatttctgttgcttttaacagaacactggaaactgggtaatttataaagaaaaggaatttatttcttacagttatggagtctgagaagtccaaggtcaaggagccatatctggtgagggccttctggttgttggagactctctgcagagtcccaaggcagcatagggcatcacagggtgaggggactgagtgtactggctcaagtctatgttttcttataaagccatcattcccatgcctatgataacccattaatctattaacatattagttcatcagggctcaaccctcatgaccctgtcacctcttaaaggccccatctctcgatattcccacattggagattaaattccatgggtcatatgtcaaaacttattcagttgtttactttatatgtatctattgttgtacgtcagttatacctcaataaagcttcaaacatgaaagaaacaataatggaataaaactcactgacctgtaggccaatattgagttactaaacctacatgtaattagtgtttctgaagaaaaagggagtagggcgtggggaatggaaaaatatttgaagaaataatggttaaaaaatgttacaaatatgaagcaaaatgatgataaactcacagctgcaagaagttctatgaactccaaacaggaagcaaaatgaagggctcaccaagacctacaataaacaaattgcctaacatacagaagtaaagaaaaattcttcaaagcaggctaataaaagaaacacattacagacagggaaaaatagtaagaatgactgaggtcttttatctgtaaaaataaaacatctgacacaatcagggaattgttacatgaggtccagtttatttttaatgtggatgtttgtgcaaattttaatcaaaacaatttatctgatctatgtgtgttatccttttctgtgaatgtagaagttccagaaaaatgtaaagtgtttgatctcatttttgacaaaatggtaaaaaaaaaaaaacaacccaaaactcacacaggaaaatttcaatatatacaagcataccttgcagatatttcaggttttgttccagaccaccacagtaaagcaaatatcacaatgaagtgaatcacacaatttttttggtttcccagtccatataaaagttattatatctttatagtgtactgtagtctattaactgcgcaatataattatggctaaaaaacagtgtacaaggaggaggagccaagatggccgaataggaacagctccagtctacagctcccagcgtgagcgacgcagaagacgggtgatttctgcatttccatttgaggtaccgggttcatctcactagggagtgccagacagtgggcgcaggccagtgtgtgtgcgcaccgtgcgcgagccgaagcagggcgaggcattgcctcacctgggaagcgcaaggggtcaggg

SEQ ID NO: 44063 - DNA, 2300 bp, Homo sapien
gtatattgcttagttctccttggcaacatttcatttaacgtaatcacttttggtttgaagactgcttgtatgactataaaaagaaatttacaaattcgaattcatctaaatgaacctatcctttattttttattcatttattatttattaaactaagtcacttaactatcaataaataatattttacataataattttgaagaccatttattgacataggaagatgctcatgataggaacctaagagggcaggtatggaaaagtcaatacaatgatcttaattttttaagttgtgcatttgttgtacacacataaagaagaagaaaatgtactgatacgatcacactaattctctcaggatggtgagactgctagtggtttctgttattcactataaatccttcattttccaaatttttgaaagtaagcttgtattatatttattattagaaaaagaaaaaaggttttgtaattatagaatttaaaaaaagaaaacaaagcaatttaggacctatgactatggaactatgggactgaggcatgtacctgaacctttactgaaacttcacgtattatttgagttttctgctttcagtgtattttaaatgagatgtgttttaataaagcacacacagtacacacacacacacacacacacacaataggagtggttaaacattgataggatatttactgaggaaaacaacatcttttctttatattctatttaagctcttctgtccattctccacacaagacagccttcaggacctatcagttgcgactccctaacacgagcctttcagcctagtgggaagaatttcacccctgtcctctttctactcccatttcttctcttcccctcttctttgtcattatcatctaggggttttattaagtggaaatctggatctgctgaaagtggcaaaggcaccacatctaacataagaaaacaaccaatcaccagtccctagaaacccgtcatctaatagggtggccctgaggtagagtgagaaacactgaaccaataatacatttataattttctaaaactaacacacacacacacacatctaaaaacctggaaacaaatacactaaaaccctaactgtatttatgtgattgttacactaaactgttattttaaaaaacgctttatatctgtaatataataacaaaccctttttaaaaattgaaatctttaaattataggtgatctatattgaaatatcaccaaaaaataaaaacctgttttccctagtataggtaattttaatgtcacatggtattccctgttctgaataaatcatattatgtctttcatctattctctagtgctgggtcatcaagtatttccaatttattcagaatttcaagacaaatggtttgcttttcagtaacatcacttgacatatgagcatcctttccattttgcctccaaaagagccagcattgagaaagggtaattggcaattcagcagcagtgctctgggttattgataacccagatgtcaagtgtgaacttgtcatacatatgactgtgggcactggtcaccataagccttcctttccctccattgccatgccatctcatccccctgcaccccagtaaatactaacagggttgaaccaatctaaagtgaatgcacgcccttcatagagattttgaaaagccaaaattagaaaataaaaggttaatggggagtcacatcatctaaagctcttcacggctaatattttgatgtttttcccccttttcttttttgttcgcgtatttaaatataaggctttgagtcacgtttctggcctataaaaacacctctcgcctcatttctttgctcttctacattaaagttttctcaggcttaaaacagtttccgaccgcttctccccgaccagatgatttgcagtaagcccctcccgtctagaaactttgggagctgctaccgccaggaaggtgagtggcactagtaatgtgatggatctaatcatttattggacgacggtttgtcaatcacagctactcagcaaatagggtgagctcttaagcaaaaaagagtttagagagtcatcttctgcgcaatcggattgtggaacctcctccttttgccatggcagctagtggggaaagccctttagcccgctactcttgccttccacggcttccgccaccccaggccagcttccacagcagctgtagctgcttcgttccgcctccgtcttagcacccccaggtgccggcggcccgggccaagccatcgcctacagttcggtgagtgtttccctgccaaaaagctaat

SEQ ID NO: 44064 - DNA, 2300 bp, Homo sapien
cagtgtgatgcctccagctttgtcctttttgctcaggatcattttggctatttgggatcttttgtagtttcataaaagttttaggatattgttttctgtttctgtgaagaatgtcattggtattttgatagagattgcattgaatatgtagatttctttgggtagtataaacattttaacaatattgattcttctaatccataagcataggatatctttccattttggggttctcttcatctctttcattagtgtttttatagtttttattgcgtagatctttcacttctttggttaaatttattcctagatgtattattttcttgtagctattgtaaatgggattgttttcttgattttttcaaattgtctgctgctggtgtacagaaatgctactaatttatgtgtgttgattttgcttcatgcaaacttacttaatttgttagttctaacagtttttttgtggagtctttaggtttttctaaatataagatcatgtcttctttgaacaaggatataaattagcaacttcctttccaatatgtatgtcctttatttttttctcttgcaaaattgctctgggtaggacttccagtactatattgaatatggtctttaaaatatttttctctacactttatattatgataaaatatacataacataatatttaccattttacctatttttaaatctacatttcaggagcattaagtacaatcacactgctgtgaaccatcatcaccatacatctccagaatattttctttttcttgaactgaaactccatacacattgaacaataacttcctttcctccctaccccaagcctctgaaaaccatgtttctactttctgtctctgtgaatttgactgctctagatacctaattaaagtagaatcatacaatatttgttcttttgtatctggtattttcacttaaaggaaaaatttatctataaactgacagaatttagaaataaatacaacaatatgtaaacagttttaatatctgtgatagtaacaaattctttaaatctggaaaataatagtcacttaaaattttaaaaaattgttcaattaataaatgatccaagttagaaatatgaacaaaataaacctcaccaataattactatagagaggaaattttaattactgcaaagctttccatcctataaatacattatcaaatagtttaaccatttctttaatgctgagatttagattatttccaattaactcaaaagcatcaagcaaatgttatgatttctaagaataaacataactttccattttggcttttgtatatatgtatatttctaacggctgttaaagccagcattaagaaggagaagcagaaagtcagtattgggactggggttatttataagccaggcaactggttaattgtggttaattgtctggtatgtttactagtcacgtagttgtatacaccatactagtttttcatcacaggccctcattcgcccccactgccatcggacttcctcctcctcccctcacaggaaatgtttcgagaatttttcaacctaaaatcatatagcttgtgaaaaataccgacaaacataatatagaatatttaaataactgacacgccacctaaagaccatcagtgctaattcctggtgtttttaatctttgaagcgtttgtttatcagctcttccaccatccacctctcccctccccaggtccccgatctaaaatcaaagagattgatttaggatgggtgggtgccttgtcttctctcattgttcgacattttagttacgttttctctgagctctctggaaagcataaaagtataatatctgttaaaagttggatgaatgaactaatgaacgcaatgggattccagaaaactctgcgggagatgggctagaggacgaggaggaggtggatgaatcagccatgttagagagcctgggaaggtgagcagagttgaaaacttgatagatctaataatttactggctctgggtttgtcagtcactacattgcagcaaatgagattagagcatagttgtgggagggaaggaggtgacgcagcaatctatttgcacctagaaattttaggcaagtgatagctgcgtaatcatactgcggcaccgtttttttcttgcagcagtagctgcttgcggaggaggtctgcccactgcagctctctgcagtctccggctctctcctgcaggatcggtcaacgcagccgtcgccgccctctgcacccagcccaggtcgccactgcttcagtccggttctcaaagcctcagcaccatctttt

SEQ ID NO: 44065 - DNA, 2300 bp, Homo sapien
ttcttctctgaaacaagtttcaaaatatataccgaatccaaccacttatctccacccacactgccattcacctgtattattgcaatagtcttttttttaaatctgcctgattctgtctacttacagtctatttttgatccaatggccagagagagccactcaaaatttaactcaaatcatgtcactcctctgctctaaaccctacaatgtctccctatctcaaagcaaaaactagaatttttgcaatggcctatttcccttcagcttttagacctcatctagtctttagctacactgtcttccttgcactttctccaacagaaaatgaacattctgttttcacttgtttctttcttctgaatcctctgtcctcttacctcactccattaactctttcatattttagttaaatgtcaattatctgtgaagtcatcctagactatcacatttaaaattgtgacgtccacctcccagcattccgtatattccttccctgcttttttttttctccatagagttgattactgtctgatataccataaaatttaattacttatcagtgtttctccccactatgatatatgcttaataaagccggaggctttatctgctcaccactgatgtctccatacatagaacagcactaagtactcaataaatatttgctgagtgaatacagtggtcccatactgtgtgccaagcactaagttaagcagtttgcttgcattatctgaggaaatcctgcttgtaaggtagataccattaggttctctatttttaaaagggaaaacccgtgaaactcagagaggttaagtgactttcccaaagccatagatggattagctaaaagggggtgggggtgccaggttatgttggattttgtgtaggagcacatttcctgagtaggaagcagcctggagtaaaggctgtggtaggtcttgggggtgctgggtggagaggaggaacacaagaggagacctggtttcttgaggcaagatactgatttcattggcatctactagcaagtctatgtctttttcaacaattggagttttacaaagaaaacttttttagtttgctgcagctgccatggatttgagactgcaagagttctggccccttgaggcactggatttcagacagaagccatacctggcagaaggagacacctgagagtagtggattgacatgaaaataggaaagtttattatccacatggttctctctctctcctaccattttgcataacctacgttactcatctttctttaatttgtgcatatttgtaaacaacgttctattaattcagcctgccatccactacagtgtaatcttaggaaggcagagcaagaatttttgtcttttattcactgctgtatccccatgcctacacagtacctggcacacagtagacgctcaacagagagttgtgaaatgaatctttgcccttggaaacaaaggcgtcctcttgatggagggagtaaggagagtaagggaaagctcttttcattggcatcctgggccagtgccatgcagtaaacccctgcgagggaattgggcagaaggagactgcagatgcaggttggacgcgggaagatcggtgaaagggaggaggccgcggtgtaaggactgaatcctagagagcggaactttgcccggtttctgcaggtctctatctgactttgaggggagctggtcagaaatccctggaggagttcctgtccccaaaagcacaatactgacgctatggggaccagatggacagaatcaagaaagatgagacagaaaggcctgggagcttggggagtgggtgaacaagttcctgtgaaagtgaaatggcccttcatttgaatgcaaatgctatgtaaaagcctgaagccccttgacgtcagcccagccattggtggcctatctatacagggctgctagtcacctggataccctcgtaagaaacgtgggatggagtagcctgaggggtgcaaaagagcttgcggcacaactacgtactgataagtttattctctgctgcttctcaaagtcgagttggggccttacagggacttcaggatggcttagggagcgccttctacccaagacacgatgtacggaagctgtcttttggagaaagaagcaggcatgtacccgggcactctcatgagccctgggggcgacggcacagctgggacaggcggcacagggggcggtgggagtccgatgccagcctccaatttcgctgcggcaccggctttctcgcactatatggggtatcctcatatgcccagcatggatcctcactggcc

SEQ ID NO: 44066 - DNA, 2300 bp, Homo sapien
atttaagcagtagtcagtgaaatacttttccctctagacacagacttagtggaccttcgtggataagatatttggaaaaattttaaatgtcatttacagttttttttttttgcctcttgaaagagaagaactgttgcaaagtattaattttgatcttaactctgacacatttattaacaccccaaaaaagcaaagatatatatgtcttgccagaaggctatacaaaatattttaaggttctatcttctataattcctggctagtagatacagttatctaaactacaaaaagttataatttgttgcttattgataatgttatgacttttttttttttttttttgagacggagtctcgctctgtcgcccaggcgggactgcggactgcagtggcgcaatctcggctcactgcaagctccgcttcccgggttcacgccattctcctgcctcagcctcccgagtagctgggactacaggcgcccgccaccgcgcccggctaattttttttgtatttttagtagagacggggtttcaccttgttagccaggatggtctcgatctccgacttatttttaaagttccctaaataaaccaacttttgaataaaaatgggcttttcattttaataacacatactccttgatgataatggtttgattcatttctcttacagaactaatttcttcctacttcacacacattaaatgctttgtttatactgataatgtcgtgctcatcctaaattaaagtttgactatgtctgtttccccagagacacaccatctgattgggatgcagccgtagagtagcagaaagagcagtgaagctggtattagaatgcctggattacagtgtttgttctgttacttagcagctgtgtgactttactgtcttaatgatatggatttttgtgctgctgccaagtatgaaacagtttggcacactatttagatacgcaaaatatgtgatccccacaacattttagtgagtgtaaagaagataggatagaccatttaaaatggaaaattttgaacaaaaggtcaccatagacttgaataaattacttaaacttctgagacccacttttgtcatgtaataaaatagatataatgatacttacctctcaggattaagggttaactgaaatattgtatgtgagggtctagctcagtgtctggaaaatggatgatgttaattaaggtttccttaggttggaatgctcctttcaccccctccatccgccccctcccccaaaaaacactccaaaattcaaacatgcatattctgattcatcttttaaggaagagcccaagaggcaccattctacaaaatctttccaaacaacttcaggcagtacagccctttggttaagagtactgggcttctggaatcagaagagaccaccaaatttaaaaccaggtctcccatttagtagctccctgacactggacaaattacttattttctctgcacctagatttcccatctgtaatataaaatcatcatgatacatacctcatagggttgcagaggattaaatgagatatacatacagagcacttagcacagtccctgagttaataagtcctccgttaagtattacataggagaagtagtaaaaagtttcctcttaagtaaaatgctaataaaagtgcttaccctgcctcccaagattgtggcaaagttatgacgcaaggcttttaaactgtaatgctgaacaaacgtaagggattggtatataccttgagatattttggacaaagttctaaccttacttttatacaatatgctttctctcacccgcctgcagttgggttaataatgcccagcattaattaataagcaataaaatcagaagataccccgaatacaagtagctgacgctcagagagcagtattaaggcgagcacccgcagaccggacctggataactccttggagttcacctctagcggccccctccccttggagctgcgcaagcgtacactgactttgctcctctctagtgcccccgcctccagcagccgcccccccacccccccgtctgcccaacacgcaggcgcgtctcctcaaatcctgtccctacacccctcctctttctcttcatttcgttccccctcctcttgcagcacctcggcaggttcaaactcttctccgggagcgtggcggcgatcgcgaggtcacgtgatgagcatcctgctgcccaacatggcggagttcgacaccatctcggaactggaggaggaggaggaagaagaagcggcaacgtcgtcgtcgtcgccgtcgtcgtcgtcgtcggtat

SEQ ID NO: 44067 - DNA, 2300 bp, Homo sapien
tgagtaataaattgtctccctagtgacaaaaggaatggaagtaaaaccgtgcaataagttggcatctgaatattgtaggctatctgcaaaattcttggaccaagaaaaattgtcttaaaatttcctaatcaaaaagcagctctaaaaccctcccccaacacttccccaatttcaaaatatttgttaatatatttgatgcaaagattacgaaagtatattacaattaaaatactcaacatatcacgcctgtagtcccagctactcaggaggctgaggcaggagaattgcttgaacctgggaggcagaggctgcagtgagccaagattgcgccactgcactccagcctgggcaaaagagtgagactctgtctcaaaaaaaaaaaaaaaaaaaaaaactcaacatgttaaaaattgaagctaatataagggaggtagcatatatatgatttaatgtaacatgaactcaattgaaagtcaaagggactaggtgagccattatcaaaaccagaggcagcatgacataacaacaaaaggcaacctattttgaaaatgcagtaaaagatagcatagttcagaggatgaacatgacacagtactcaaacttccaaatagttatggtccaagcaaataaaaatgaggaagcactctttaaatcccggagaatcatcaacatttttgccttgtagctgttatgaagtccctccccattttattttctgaaatattcaatttttcctcaagatttcaattttttaaaaaaccaccctggataaattttaaagaaattatgctcagctcccaaagtattaatttccatatatatttaatgcctgtatatttcatacttgggcatacaaaatcccttggaggtaaattatctcagaactgaaaagctttagaaaccatctactccaaacccttcattttagagatgaagaaatcaaggcgcagaaatgagaaaaagcaacctgaccaaggtcacagggccagtaagaagcaaaaccgggaccagcgtctaagagccctgactcaatccatttctttttctactttccatagctgcctctcatcctgaacctctaatcgagtgatatataaggaaggattcgataggaagaatggatggatgaatacgtgggtgaatgaacattctattattattcacaaaatatatcatgtttctgttttgaagaatgcaagcctagttcttgtcacatgtcacagcaattgctgtttcccacaaagtatcaatcttgtcagcaaaaaaccctctggtacatcctgcagtttagagactgttcacttgccagcatacatacaagaaaggagactcacccctactccaatcgctctggctcccaaacccctaacttccctctcctatactcactctttacctggcattggtgcatcatatttacattctcctcacttccttcacacgtatccacccatggtttccccatttagaccaggtgtcctttcctaagtgtacgcctcagtcaatcagtcaaccctcccccactccacaggcccctcgatcacttctcattcctctgttgccaaatctcaggcatttcaagtcccaagaccccctctcgcttacacagtgatgtggccggcaccccgcactaatacagggtcgggagcatatctccgcagatgctcctcgctcactacccgaggcgggggcggcgcttcctcctcctcttcctcctcctcctcttcttcctcctcctcctcttcctcctcttcctcctcatcctcctcgtcatcgtcgggcccagataccgacgacgacgacgacggcgacgacgacgacgttgccgcttcttcttcctcctcctcctccagttccgagatggtgtcgaactccgccatgttgggcagcaggatgctcatcacgtgacctcgcgatcgccgccacgctcccggagaagagtttgaacctgccgaggtgctgcaagaggagggggaacgaaatgaagagaaagaggaggggtgtagggacaggatttgaggagacgcgcctgcgtgttgggcagacgggggggtgggggggcggctgctggaggcgggggcactagagaggagcaaagtcagtgtacgcttgcgcagctccaaggggagggggccgctagaggtgaactccaaggagttatccaggtccggtctgcgggtgctcgccttaatactgctctctgagcgtcagctacttgtattcggggtatcttctgattttattgcttattaattaatgctgggcattattaacccaactgcaggcgggtgagagaaagc

SEQ ID NO: 44068 - DNA, 2300 bp, Homo sapien
taaagcacttgtattctactgtgataagcgttgtggatacaaagaaaggagcaagcataaaaaagtgctctttcaaaaggatatagtactatgcagacacaaggaattgtttgataaatgaataaattatatgtatatttgaggccaatttgtgtttgctgctctggtaattttgagtaaaaatgcagtattccaggtatcagaaacgaaaacacatggaaactgcttttaaactttaaaatatactgaaaacataagggactaagcttgttgtggtcacctataatgtgccagataccatgctgggtgctagagctaccaaagggggaaaagtattctcatagaacaaaaaatttcagaaaggtgcatattaaagtgctttgtaaactaaagcatgatacaaatgtcaatgggctacatatttatgaatgaatgaatggatgaatgaatattaagtgcctcttacataccagctattttgggtactgtaaaatacaagattaattctcctatgtaataagaggaaagtttatcctctatactattcagatgtaaggaatgatatattgcttaattttaaacaatcaagactttactggtgaggttaagttaaattattactgatacatttttccaggtaaccaggaaagagctagtatgaggaaatgaagtaatagatgtgagatccagaccgaaagtcacttaattcagcttgcgaatgtgctttctaaattataaagcacttgtaaatgaaaaatttgatgctttctgtatgaataaaactttctgtaagctaggtattgtctctacaaaattctcattgtatagttaaaccacagtgagaagggttctataagtagttatacaaaccaagggtttaaatacctgttaaatagatcaattttgattgcctactatgtgaactcactgttaaaggcactgaaaatttatcatatttcatttagccacagccaaaaataaggcaatacctatgttagcattttgtgaactctaaggcaccatataaatgtaactgttgattttctcacttggtgctgggtactaggtttataaaattgtatgatagttattatattgtgcaaataaagtaggaaaatttgaataacaatgattatcttttgaatacgcatacgcaagggattggttgtctgaagaatgccactatagtagttatctattgtgtgccaatctcattgctaggcattggggatgcaaagataaaccatctttattgtgtcttgggtagcagaagaaaatatgtgtaaaatcaatttataatttgtaaactgccacccatatataagctatatctgctgaatgatcattgattactcttatccttagagataacaactgggggcacaaacatttattatcattattgaacctacaacagagatctatgtgtagatttacaaagcctacagttctatacagataggaatgaactattggcttactgaatggtgattactttctgtggggctcggaactacatgccctaggatataaaaatgatgttatcattatagagtgctcacagaaggaaatgaagtaatataggtgtgagatccagaccaaaagtcatttaacaagtttattcagtgatgaaaacatgggacaaatggactaatataaggcagtgtactaagctgagtagagagataaagtcctgtccagaagatacatgcttcctggcctgattgaggagatggaaaatttttgcaaaaaacaaggtgttgtggtcttccatccagtttcttaagtgctgatgataaaagtgaattagacccaccttgacctggcctacagaagtaaaggagtaaaaataaatgcctcaggcgtgctttttgattcatttgataaacaaagcatcttttatgtggaatataccattctgggtcctgaggataagagagatgagggcattagatcactgacagctgaagatagaagaacatctttggtttgattgtttaaataatatttcaatgcctattctctgcaaggtactatgtttcgtaaattaaataggtctggcccagaagacccactcaattgcctttgagattaaaaaaaaaaaaaaaaagaaagaaaaatgcaagtttctttcaaaataaagagacatttttcctagtttcaggaatcccccaaatcacttcctcattggcttagtttaaagccaggagactgataaaagggctcagggtttgttctttaattcattaactaaacattctgcttttattacagttaaatggttcaagatgtaacaacta

SEQ ID NO: 44069 - DNA, 2300 bp, Homo sapien
tggacaatcaaggtgcacaattgtaagtgagcataggcactcaccttggacatgaatgtgcataactgcacatggcccatcccatctgaataaggtcctactctcagaccctttttgcagtacagcaggggtgctgatcaccaaggccccttttcctggcctgttatgtgtgtgattatatttgttccagttcctgtgtaatagacatggaagcctcccctgccacactccacccccaatcttcctttcccttctggcaggaagtacccgctccataagacccttacatttggacagtcaaggtgcacaattgtatgtgaccacaaccatgcaccttggacataaatgtgtgtaactgcacatggcccatcccatctgaataaggtcctactctcagaccccttttgcagtacagtaggtgtgctgataaccaaggcccctcttcctggcctgttaacgtatgtgattatatttgtctgggttccagtgtataagacatggaagcctcccctgccccaccccaccctcaatcttcctttcccttctggcagggagtgccagctccataagaaccttacatttggacagtcaaggtgcacaattctaagtgaccgcagccatgcaccttggtcaataatgtgtgtaactgcacacggcctatctcatctgaataaggccttactctcagaccccttttgcagtacagcaggggtgctgataaccaaggcccattttcctggcctgttatgtgtgtgattatatttgtccaggtttctgtgtactagacaaggaagcctcctctgccccatcccatctacgcataatctttcttttcctcccagcagggagtgctcactccataagacccttacatttggacaatcaaggtgcacaattgtaagtgaccacaaccatgcatcttggaaatttatgtgcataactgcacatggcttatcctatttgaataaagtcctactctcagaccccctttgcagtatagctggggtgctgatcactgaggcctctttgcttggcttgtctatattcttgtgtactagataagggcaccttctcatggactccctttgcttttcaacaaggagtacccactactttttaagattcttatatttgtccaaagtacatggttttaattgaccacaacaatgtcccttggacattaatgtatgtaatcaccacatggttcatcctaattaaacaaagttctaccttctcaccctccatttgcagtataccagggttgctgaccccctaagtccccttttcttggcttgttgacatgcataattgcatttatgttggttcttgtgccctagacaaggatgccccacctcttttcaatagtgggtgcccactccttatgatctttacatttgaacagttaatgtgaataattgcagttgtccacaaccctatcacttctaggaccattatacctcttttgcattactgtggggtatactgtttccctccaaggccccttctggtggactatcaacatataattgaaattttcttttgtctttgtcagtagattaaggtcataccccatcacctttcctttgtagtacaacagggtgtcctgatcaaccaaagtcctgttgttttggactgttaatatgtgcaattacatttgctcctgatctgtgcactagataaggatcctacctactttcttagtgtttttagcaggtagtgcccactactcaagactgtcacttggaatgttcatgtgcacaaactcaattctctaagcatgttcctgtaccacctttgctttagagcagggggatgatattcactaagtgccccttcttttggacttaatatgcattaatgcaattgtccacctcttcttttagactaagagttgatctccacatattccccttgcatcaggggcatgttaattatgaatgaacccttttcttttaatattaatgtcataattgtatttgtggacctgtgtaggagaaaaagaccctatgttcctcccattaccctttggattgctgctgagaagtgttaactactcataatctcagctcttggacaattaatagcattaataacaattatcaagggcactgatcattagataagactcctgcttcctcgttgcttacatcgggggtactgacccactaaggccccttgtactgttaatgtgaatatttgcaattatatatgtctccttctggtagagtgggatattatgccctagtatcccctttgcattactgcaggggctgctgactactcaaaacttctcctgggac

SEQ ID NO: 44070 - DNA, 2300 bp, Homo sapien
aatgggattgctgggtcaaatggtatttctagttctggatccttgaggaattgccacgctgttttccacaatggttgaactaatttgcagtcccaccagcattgtaaaagcattcctatttctccacatcctctccagaatctgttgtttcctgactttttaatgagcgccattctaactggtgtgagatggtatctcattgtgtttgatttgcatttctctaataaacagtgatgatgagctttttttcatatgttcattggctgcataatgtcttcttttgagaagtgtctgttcatttccttcacccacttttttatgggattgtttgtttgtttcttgtaaatttgtttaagttctttgtagattctggatattagccctttgtcagatggatagattgcaaaaattttctcccattctgtaggttgcctgttcactctgatgatagtatgcacacatatgtttattgcagcactgttcacaatagcaaagatttggaaccaacccgaatgcccatcaatgatagactggataaagaaaatgtggcacatatacaccatggaatattatgcagccataaaaaaggatgagttaatgtcctttgcagggacatggatgaagctggaaaccatcattttcagcaaactatcacaagaacagaaaaccaaacaccgcatgttctcattcataagtgggagttgaacaatgagaacacatggacacagggaggggaatatcacacaccagggcctgttgaggggtgaggggctaggggagggctagcattaggagaaatacctaatgtagatgatgggttgatgggtgcagcaaaccaccatggcacgtgtatacctatgtaacaaacctgcacattctgcccatgtaccccagaacttaaagtataatttaaaaaaaatttaggctgagcgtggtggctcacccctgtaatcctagcactttgggaggccgaggccagcagatcatctgaggtcaggagttcaagaccagcctggtcaacatggtgaaaccctgtctctactaaaaatacaaaaattagtccctctccctctccctctccctctccctctccccggtctccctctgatgccatcaaagttgtgaaagctgaggctcgactgtactgccaccatctcggctcactgcaacctccctgcctgattctcctgcctcagcttgcagagtgcctgggattgcaggcgcgcgccgccacacctgactggtttttgcattttttggtggagacggggtttcgccatgttggccgggctggtctccagctcctgaccacgagtgatctgcctgcctcagcctcctgaggtgccaggattgcagatggagtctcgctcactcagtgctcaatgttgcccaggctggagtgcagtagcgtgatctcggctcgctacaacctccacctcccagccgcctgccttggcctcccaaagtgccaagattgcagcctctgcccggccgccaccccgtctgggaagtgaggagcatctctgcctggccacccatcgtctgggatgtgaggagcccctctgcccggctgtccagtctgggaagtgaggagcgcctcttcccggccgccatcccgtctaggaagtgaggagcgtctctgcccggccgcccatcgtctgagatgtggggagcgcctctgccccaccacctcgtctgggatgtgaggagcacctctgcccggccttgaccccatctgggaactaaggagtgtctctgcccgaccgccaccccgtctgggaggtgaggagcgtctctgcccggccgccccgtctgagaagtgaggagcccctccgcctcacagccgccccatctgggaagtgaggagcccctccgcctcacagccgccccatctgggaagtgaggagcccctccgcccggccagccgcccaatccgggagggaggtggggggcgcctccgcctggccactgccccatctgggaggtggggggcgcctctgcccggccaccccgtctgggaagtgaggagcccctctgcccagctgccactccatctgggaggtgtacccaacagctcattgagaacgggccatgatgacaatggcagttttgtcaaatagaaaagggggaaatgtggggaaaagaaagagagatcagattgttactgtgtctgtgtagaaagaagtggacataggagactccattttgttctgtactaagaaaaattcttctgccttgggaaaaaaaaaaaattagccaggtgtggtggcacatgcctgtaatcctagctacttgggagg

SEQ ID NO: 44071 - DNA, 2300 bp, Homo sapien
ccaccgtgcccggcaggtttcactcatttttatccccctttctacttaccattaaattactacagagggatgttttgtacctgccccaaaataaatgcatggtgtgctactgccaaaagaaaatatgacagaatttacagtcatatttgcctcctctgcaacattcagacttgatccttcttttaccctacattgtctatctgattccctactcttttagtactagttctttcttaggagctcaacagttccttttgcaattggtttttggtgcctgtcctacaaatttccaagatgtgctcaaatatgcctaaaccctaggagatgaaacagtttaagcttagagacctctccacctctattactgacctttgaacacgtaactggttttatgtggtgtttttggtgttttactccaaaatgtccatatgtcaatgcccagatgttttatacaactgtgtatcattaccttccttttgagggtgacgatatcaaaataaagacagaaaagtaatgatgcaaatgaatagaataagaggtgttctatgtgggggtctcgtagaaaaccagagacaacattagtgcatagagagaaactatagctttggaaagggattaggacctctaaagtgtcttttccttaccggtgaagcacaagccttcccccagaaacctgcaccactcacacataatgcttcacaaacaagttttggcctcggttttttcatacttttggggctggtatccagctagtgtattttccctcatggagcgggaacaacagagataaaggttttgataaatatagaggcctcttagaagtgtcaggactgaatctaaaagagctgaatctaaaagaagagggaggctgggtgcggtggctcacgcctataataccagcactttgggaggctgaggcgggtggatcacttgaggtcaggagtgcaagaccagcctggccatgatggtgagacccccgtctctagtaaaaattagctggacatggtggcagatgcctgtaatcccagctacttaggaggctgaggctggagaatcgcttgaacccaggaggcggaggtagcaccgagccaagatcgcgccactgcactccagcctgggcgacagagcaagactccgtctcaaaaaaataaaacaaaaataaataaaagaagagggaagatggaaggacttttaggctcaagagcagcatctcaactctttttttttttttttttttttgagacggagtctggcacggtcgcccaggctggaatgcagcagcacgatctcagctcactgcaacctccgcctcccgggttcaagcgattctcccacctcagcctcccaagtagctgggattacactgagattacaggcaagcgccaccacacctggctaccaactcttttatgaagactcttttgtttacagaattaaaggaagcaccttgttctgaatccagttttgccattgacggactcactgtatgactaggccaaaaccctctggtttctgttttcccattagttggttgaagtacatacaccctcatctatcggaacacggggcttagtaaagtgaaaagaagtaggttctagctcattctagcacttttggaaaattgggtcacctctttgggccttaatttcgtcatctataaaacaggaaaaaatcagtcctcagcttacctgatgttgcaatgacttagtgagataacagaagtgaatggcagctttgtctatcatacttgtgaggtaaagttaatgagagtgagagatctggaaatagggaagaaagaaaggagtcgaggcaaagctaaaagaaatttgggttgggaaaggaaaaaagaaatgaagagaaagaaaaaggaaaagggaatttcaaaagagataaaggctgtgagaggaagtgcaacaggtcaggaaactgggggagggtccacggcaacggctgcggcacggcaacggctgcggcacggcaacggctggggcacggcaacggctggtgcatgttgccggcggaggcatttaggtagtgcacgacggctgggcgccgggcctgtttggctgtgacgcccacccccggctttcatccgcctatgccctagggctagtggaagacttaagatggcggcgtttgcacggagtgcaatcactgcgtccttacgggggttgcaaggcgtccgaagtatgagtccactaacaaaagtccagaaactcgccagttaatagtattgtggtgagtgatgagcctcacgttggctagagaagtggccgttagcgaggctacacactttggga

SEQ ID NO: 44072 - DNA, 2300 bp, Homo sapien
tctgcacttaacacaattatcacagggtcctgaggcgacatacgtcctcctcggcttacgagatgacaggattaagagattaaaacaggcataggaaatcacaagggtattgattggggaagtgataagtgtccatgaaatcttcacaatttatgtttagagattgcagtaaagacaggcataagaaattataaaagtattaatttggggaactaataaatgtccatgaaatcttcacgatccacgttcttccgccatggcttcagccagtccctccgtttggggtccctgacttcccgcaacagacaacttgagttgcatcaaactaaaaagcatctgcactgcaaagggtacagttaacagaatgaagacacgggttttgagaaaccattttcaaatcatatatctgataaggggctaatatccaaaatgtattaagaaacccaagcccaatagcaagaaaacaactgtctttaaaagggggaaaaggacctcaacttaaatttttcagaggaagacatgagtggccaattgattgatacatgaaaaaaatgctcaacatctctaatcattagtgagttgcaaatcaaaactgcaagatattaccttacaccttttagaatggctattattaaaaggatgaaagacaggtgctggcaaggatgtggataaaaggaagtcccaacattctgttagtgggaatataaattagtatagccaatttaggaaactatatggtggttccttaagaaactaaaagtacaattactatatgatctagcaatctctacttaggtatatatccaaaggaattgaagcagtatgttgagatcttgcactcccttattttgaaattatttacaaagctaataaatggaaaagacttaagttttcataacagatgaatggacatagaagatgtgttgtatatacatattggaatattttttatccttggaaaagaaggaaaattgtcatttgtgacaacatggatgaatctgtagtatactatgctaagtgttgtaagacaggcacagagaggcaaatactacattatatttgtatgtggaatctaagaaaggctaactcatacaagtagaaagttggatgttatggtttccaggatgtgggtgttggagagatgggcaaaggcaagacgttggtcaaagagtaccaattttctgttaggaggaataagttttagacatatttcacagcatggtgaccattgtcactgactgtatattttaaaattgttataagtagatattaaagttgtcacaacaaaagtaggtgaagttatggatatgttaatgtgcttgatttagttattacactatgtatacatacaaaaacatcagatagttccctggaattatatacaattattacttgtcaattataaaaaaaagccctactgcaaccactaaaaaggattttcatataatagagggaaaaatcgttaaagataataatacattattttagaaaatattaacttataaaaagtagtataggagggattctgtaaaagaagatagacatagaattttaaaatgtataatggaaaatttaaatccagctgtactgatggatcaagcaatccaaaccagtctgattgaccaagtggatatttaaaaaacaatcaaactataaggtgtctgttgtaggcagtttataaaatacaaaagtgttgaaagaaataggatggaaatagaaatatccaagtagcaaccacaaaaaaactggaatgtctgcactaacatcatacaaaacaaaccaaatgaaggttaaaaatattgaaattatacaaaatatgttctatgactaaaatttaatgaaattagaaataacacagagataggaactatacatatttgtgcaaatttaaaaagttatgctgagtgtggtggctcacacctgtaatcccagcactttgggaggccggggagggtggatcacttgaagtcaggagttggagaccagcctggccaacatggtgaaaccctgtctctactaaaaatacagaaaattagccagatgtggtggtgtgcgcctgtagtcccagctactcgggtggctgaggcactagaatcacttgagcctaggaggcagaggtggcagtgagccgagatcacaccactgcactgcagcctgggcgacaaagactgtcaaaaaaaaaaaaaaaaaaaaaaagttacgtaaccaacaagtcaaaggagaatttataaggaaatcagaaaatactttgaggtgaatgaaaatacagaaacaacatatcaaattctgtgagatgtgtg

SEQ ID NO: 44073 - DNA, 2300 bp, Homo sapien
acattccttggccgactccttcccagatctcctcggcttagcagctgaatgtcgatgctgcctgatcgcctcagaagccccctggaccatcacggatgccgagctttgggtaactcttacagtggatggtaagtccataacctgtttaatcgatacgggagctaccccctccacattaccttcttttcaagggcctgtttcccttgcccccgtaactgttgtgggtattgacggccaggcttctagaccccttaaaagtccccaactctggtgccaacttggataacattcttttatgcactcttttttagttatccccacctgcccagttcccttattaggccgagacattttaactaaattatctgcttcccttgcttccctgactattcctggactacagtcacacctcattgctgcccttttacctgattcaaggcctcctttgaatcctcctctcatgtctccctaccttaatccacaagtatgggatacctctactccctccttggtgactgatcaggtaccccttaccatcccattaaaacctagtcactcttaccccgctcaatgccagtaccccatcccacaacaggctttaagaggactaaagcctgttatcactcacctgttacagcatggctttttagagcctataaattctccttacaactcccctatcctaccagtccagaagctggacaaatcttacatgttggttcaggatcttcaccttattacccaaattgtcttacctgtccatactgtggtgccaaacccatatactctcctatcctcaatacctccctccacaactcattattccatcctcgacctcaaagatgctttcttcactattcctttgtacccctcatcctaaccttttttcgctttcacatggactgaccctgacacccaccaatctcagcaactcacctggactgtactgccacaaggtttcagagacagcccccattactttagtcaagctctttctcatgatctactttctttccatccatctgtttctcaccttattcaatatatggacgaccttctcctctgcagctcctcttatttatttattttttttgagatggagtcttgctctgttgcccaggctggagtgcagtggcaagatctcggctcactgcaagctccacctcccaggttcaggccattctcctgccgcagcctcccgagtagctgggactacaggtgcccgccaccatgcccggctactttttttgtatttttagtagagacagggtttcaccatgttagccaggatggtctcgatctcctgaccttgtgatctgcctgtctcggcctcccaaagtgctgggattacaggcgtgagccaccacgcctggcctgcagcccttcttatgaatcttcccaaaaagataccctcctgcttcttcaacatatattctcaaaggggtgtcatatatccccctctaaagcccaaatttcttccccatccattacctatcttggcagagtccttcatcaaagcacacatactctccctgctaactgtgtacagctaatctccaaaaactccaaccccttctacaaagcaacaactcctttccttcctaggcatggttggatactttcgcctttggataccaggttttgccatcctaactaaaccactatataaactcacaaagggaaacctgactgaccccatagacctaagtcctttccccactcttcttttcattccttaaagacaaccctagaaacagtccccacattagcactccctaactcgtcccaatccttcttattacatatagctgaaatacaaggctgtgcgttcagagtttttacacaggatccaggcccatgacctgtagccttcctgtccaaacaacttaacctcacagttctaggctggccctcatgtctacgtgcagcagcagctgccgcttcaatacttctggaggacctcaagctcacaaaccatgccccacttactctctacagctctcataactttcaacatctattttcctactcacacttggtgtatatactttccaccccctaactcctccaactctactcacaattcattgaaactcccacaattaccattgttcctggcacagacttcaccccatcctctcaccttatacccagcaccaaacctgaatctcatgattgtatctccctaatccatgtggcatcctccccatttccccatatttccctctttcctgttcctaatccagaccacacttggtttattgatggtagttcttcaaggcccaatcatcagtcaccag

SEQ ID NO: 44074 - DNA, 2300 bp, Homo sapien
gagcatcttttcatgtgcttcttggccactagtatatcttctttgaagaaatgtctattcaagtctttggcagtttctaaatgagttattgtctttttgttgttaggttgtaagagttataatctggataacagatccttattagatatgtaatttgcacatattttctcccattttgtgggttgtcttttgtcttttttattttttattgcttgtgttttggtatcattattgataattcattgttaaattaaaggtcatgaagagttactcttactttttcttctataatttttagttttagctcttgtattcatgtctgtaatcaattgaagttaatttttaatatagtatgtgttaggagtccagcttcattgttttgcatgtatctatgcaattgacccaaagtgatttgttgaaaaatattattttctgatggtatggtcctgacacccttgtagaaattcaattgaagatatatgtatgagtttacttctgcagtctcaattctattctattggtctaaatgtttatctttatgccagtaccagcctgttttggttattttagttttgtaataaaatagacaaacatttggccgattaatcaagacaaaaagaaaagtatatagaaataatattatgaaagaaaagggggagcatattgaaaaacaccataaagattaaaaagattaagggacagtgttaacaatttatgccaatagggtttgaaagtttagagaaaatagacaaattcctagcaaaatataaattatcaaaacctactcaagaaaaaatagaaatcttatatagtcacaaggtattaaatattcaattcttcctagagacccaaatatatgctttctacccgtaactcactgtaaataaaaagaaagggataatatattgtgcaaactctagtcaaaaaaaagttggaatgacaatattaatataaacaaaagtggacttcaaaagaagcaatattatcagagagaaagagggcactgcttggtgaattgccccctgataaagacataacaataccggaagtaaaaattgacataactgcaaggggaaattgacaaatccacaattatatttgggatttaaatgctttactcttaataattaataaaagttagctaaaaaattaattttagctaaataaattagctaaaaagttaacaaggatagatctgaacaacactaggataaacttgtcctaatggacatttatagaccactataaccaaaagtggtagaattcacaatttttgcaagtacacatggaatattcaccaaaataaaccatatcctgatttataaaataaactaacaaactggcttctctcacttagcaatatgaatttaaatttcccccatatctcttcatggctttatacctcatttccttttattgctgaataatgtttcattttatggatgggccataaaatgtttatctatgcacctatagagggacatcttggttgcttccaagttttggccaatattaataaagctgttataaacattcatttgcaggtttttgtgttatcatgaatttccactcatttggttaaatacctaggaatataattgctagatagtatagcaattctgtttagttttgtaggaaactgcaaactgtcttccaaagtggctgtatcattttgcatttccactaacagtgactgggagttccttatgctaaacatcctctacagtatttggtgtggtcagtgttatagattttggctattctttcaggtgcatagtggcatcttattgttgttttaatttgcaattccctgatgatgtatgaggggacttcaaaaatttatggaaaaattgaactaaaaggtaaaagtaaaaaatataaacttcttaacataagctccatcgagttcaagatactttgtaagcaatgataccagccatttggttcatccctaaggaactgagggttctgagaatttaatcaggtcaatgaagtcttttttacgttatgaactgaagaaaaatgtgtgcaatttaaaggtttgttaagactttgaaacaaaaagaagtcagaaggagccaaatcaggactgtaaggtggatgaatgcctaatgatttcccatcaaagctctcacaaaattgcccttgtttgatgagaggaataagcagaagcattgtgatggggaaggactctctaatgaagctttcccaggtgtttttctgctaaagctttggctttctcaaaacactttcataataagcagatgttgttgttctttggccctccagaaaaccaacta

SEQ ID NO: 44075 - DNA, 2300 bp, Homo sapien
acaaggaaggtaaagcttaggagaagagagtctataaaacctctgacatggcatgcagacatttttcttttgagtacattttactggggagaggatccatgtcttttatattctccaaatgactcaatattccaaaagaagtttaagaactactgtgttaaagtgatcaggccctcagacaacccatcccctcttgtaggggctgctttgtatttattcctcaggaggagctggtagaagacttaatgtgagggagaagaaaaggaaagaagtagcgggggatgactacaacctctcttcatctcagcttcacaaagcatcattcaacaaatggatcactattaagatcctctccagatcacaggttgctattttcaaatgcatgcttagatttctcttttctcttgtcgcatttcagaagttactgtactcaccgatatgtgtatatgaatagttacttcccatacagctccccatgtttacgggaaaaaaaattcttaaaacatggtagagtacttgctctgtttggccttcaataatgttgtggatccccactgctggaatataggccaccagagatgggtttggatttcagcaataaatgacccagcttcatagaaggagagtagtcagctgatttgaaagtaaacccaatccttgtgctcatatttgtttactttttccttaagccttataagtaagacatatcactgatgagatcaaacaaaagccataactttctccttccactggcacttttctttcccacgtatatgcctttgggagccaccctcttctttcatttgcactttcgtcccatcacttaagacccagagaggcatgaatgctaaggttgaggttgaatttgtcatagttatggctggagttgaaaaatactcaaattgattactctgatgcccacgccttacctgatctcatatcagccattggagatgtagtcaaggccagcaactctgcgaactccagccccaggatttatgcctgatgtctcaactgatcatgaaatactggtaggagggctttccccatcccaggtcccccttctgatttggtcatcagatatgtccttgttttaggacatacagatatgaacagaaacaatatcaggagtcctggttagtttttgtctctcgaggatgggcaggataggttataagggaagtggaaattcttgtgtgtttcaaatacattccttctttgtggcggggagatggagtcttgctctgtcgcccaagctggagtgtagtggcgccatcttgtcatcttggctcactgcaacctctgcctcctgagttcaagcaattctactgcctcagtctctcaagtagctgggactataagcacatggcaccacacccagctaatttttgtatttttagtagagatggggtttcaccatgttggccaggctggtcttgaactcctgacctcaagtgatctgcctgccttcggcctcccaaagtgctgggattacaggcgttagccactgtgcctgagtcaaatacattcctaatgaatccccaggagacctttgctcacatcttctgtcaccttatcctggctcttgcctcatttttcttttctagagtcatcctagggaatttcttgccctcactgaccttcctccatttctttccccaccttgatgagtttcagtaggtcttttttgctttctctcgtcctaagccatttgtctctaacaagtccccatctgaaagttttattgtgaatgagtgaatgaaaccttagagagtgttgcgagttacattcatgttgcccttggatataaaaagagaggcagatgcatttgcttttggggtcttagtcgtgaatcctttgcctaggccaatgtccagaaaagtttttcctggttatactgtagaaatgtcatggtttcgggtcttagatttaagtcattgttctattttgagttgatttttgtataaggtaagagagatggattcagtttcattcttctacatgtgggctatctacttttcccagcaccatttattaagtaggatgttgtttccccagtttatatttttgtgtgcttagttaacgatcagttggttgtaaatagttggctgtatttctgggttctctattctgttccattggtctatgtgtctacttttataccagtaccacgggtacactaaaatctcagacttcaccactatacaattcatccatgtaaccaaaaaccacttttaccccaaaagttactgaaataagtatttttaaagattttaaaaaatagagaggaaagaggaggc

SEQ ID NO: 44076 - DNA, 2300 bp, Homo sapien
tgcgcgcatgcgcgcgtgttttgcatttctattctttgttttctagtttcatccctatgctaggacatggctgtgttcgtttctctttcactagatttttttaatgactgtaaggttattctacgcttgtaatctgcttttgcagtacttttccatcaaaaacaactgtgttacttctcatttaaatatttatttatttatttttgagacagggtttcgctctgtcacccaggctggagtgcagtgtcgtgatcttggctcactgcggcctctgtctcctgggttcaagcaattctcctgccccagcttcccgagtagctgggactacaggtggacaccaccactcctggctaatttttgtatttttagtagggacggggtttcaccatgttgaccaggctggtctccaactcctgacctcaagtgatctgcctgcctcagcctcccaaagtgctgggggattataggaataagccactatgcccggcctcatttaaatatctcttaatcatcttttacctgtttttccattctaagcagtgcattcttttttttatagcagtcttttgataacaatagctaagaggccaggcacggtggctcatgcctgtaattccagcactttgggaggctgaggcaggcggatcacctgaggttgagagttcgagaccagcctgggccaacatggtgaaaccccgtctctacttaaaaaaaaaaaaaaagaattagctgggtgtagtggtgcatgcatgtcatcccagctactctggaagctgaggcatgagaattgcttgaacccaggaggtggaggttgcagtgagccaagatcgcgccactgcactccagactgggtgacagactaagagagtctgtctcaaaaaaaaaacaaaaaacaagcaaacaaaaacctcccaagagttaacattaactgagcatacattaaatggtaagtgtcacacactgttctatgtatgcatagctcagtttttaacttaggaagtaaattctaataatattccttatttttttctgatggggtaattgagggcagctactctcagtaacattgaacccgatagcacatagtgaagactcattatctttatcaatgatgtgtcagttggaggtaaaaattaggtccttttcaatatccagtggtgactgtgctcctaggaagatcagccaaggatacacagtccgaaaagtttatagcttaggtaggtaggattaagtgcagtgcctctctagtacacacctggatgtgactcttgtgtccacatgtttttcaaacctggcaggaacaataaccccattcagaaatgacttctaaaaaggctatttttgcgggcttgcaggcatgcacttgtagccctagctactcaggagggtgaggagggaggattgcttgatcccaggaattctgagctgtagtgagctatgccgattggattcctgcactaaatttggcatcaatatggtgacctcccgggcacgggggatcaccaggttgcctgaggaggggtgaaccagcccaggtcgggaatggagcgggtcaaaactcccatgatgatcagtagtgagatcatgcctgtgaatagccattacacttcagcctgggcaacatagcaagaatcaatctcgctctctctctttttttttttttttaaagagccaaccttaggaagaaatgcctttttttttttctttttaaaggacatttcttctaaggttggcttgttttagggatagccaaacctacaggttgttctaattgatatactcatctcaccaacactaatgttactattgtttttattacatttcaaagaggtcatcaaatcaataaaagttcagaacttggcaagaatggctagccagtaaattctagactttctctttgaacccccatgtcttacaatgcaagaatgtaacctcttaattgctctatttgtattacattgtcatctttggactttcctggatacccttgatctctctggtatttcctgttatggtgagtctgtcctaacagccttatttatagacatgtttttgcacattaaccacactccatggaagaagccctttaacatgagacttgttcctaagtactccactggcttaccaagtataggattaccctttgattactttatctggctaccaggacagagagattcttgggagccaaccagccatcaggtcaactattttgctacagatactgctttctgggtttagtcccctgtactttcaggtcttcagcctcagtttgacttcctggcttcttcagtgaggat

SEQ ID NO: 44077 - DNA, 2300 bp, Homo sapien
ctaagcaaccctttgtgaggtcacagatactttttgtttgttactggttataggcattattggttctcatcactcagtattctttcccttttcccttacaccagatcataatatagtattctctctctctttttttttttttttggaaacagggtcttgctctgttgcccaggctggagtgccgtggtgcaatcttggctcactgcaacctccgcctcccggctcaagtgattctctcacctcagcctcccaagtagctgggaatacaggcgtgtgctaccatgcccagctcatttttgtattttttgtagagatagggtttcactatgttacccaggctgttctcaaactcctgagctcaaagcgatctgcctgcctcagcctcccaaagtgctgggactataagcatgagccaccatgcctggcccataatatagtattctgacttgacaacttagctaagtttattaggaatgtctttatttaattaatttggtaaattactaggaatgtagtagtttacattactgctatgaactcccttcttgctacatactcacttcctcatttctattctttatcccattgctaatggatagtttctgcttatttatttatttatttatttattttttaactaatagagacagggtcacgctgtgttgcccaggttattattgaactcctggcctcaagtgatcttcctgccttaacctcccaaagtgctaagattacaggcatgagccaccatgcctggccagtttttgcttatttatagcttctgactcctgtgcctattcctcacaagttgatcttatttaaatctttcatgcttcttacgtagctgtggtatgttcttttaccatgtatccattcacttcagctgagtttctgttcttctgtttttcccaattgcaaatttaatctaattttctcacgtcatccttgtttggggagggctttcatgttacaagtcataggctgttgatcagcgtgtagacatatgcctttgagtctgagctttactttcccttggtctgatcaactttggatttggaggaggggtagttggtcataagaatgctttcttagcaggcttgtttgcctggctaaggaagtttttctttagaaagattttgggtgtgggtaacactatgacacattcactctatctggtttagctctttaaagctgcttgattgcagcatctaccaagtctcttaaagactcaccttcccctgggtaaaagttctaaaagttccatgatatcacaagctggtttgcacaacatcatcaaaacaaagaggattctcttcaggttcgtagccagcttcctaaactgcattcctcttagggggctgttctgcttcttactattggttaggcacttgtgattgctagaaacagattctctgttgagctcacataatgacaggttatttgcaggccacctgtggggaaataatggtgacttggatcacatgcagtttcacatacaggtgatcttttgtgtctgtgtgtttcacatctgtggattcagccatctgtggatcaaaaatatttggctaaaaaatatggatggttgtgtctgtactgaacatatacagactttttttagttgttattccccaaacaatagagtataaccactatttacatagcatttatatcgtattaggtattataagtaatctagagatgatttaaagtatatgagaggatgtgtataggctgtatgcatttactagaatattttatataaaagatttgaatatctgcgggggattctggaaccagttcctctgtggataccaagggacacctgtttagggggaccttaatgtgattatgcctgttagggatgggaactggattcagagaagctctagaaaactcagcagccagagcttgtacatctttccattagcattgcgccatttatttaactgagctactttgtctctctgcgtatctttttttttttctttgagatggagttttgctcttgttgcccaggctggagtgcaatggcacaatctcgcctcaccacaacctctgcctcctgggttcaagcgattctcctgcttcagcctctcaagcagctgggattacgggcacccgccaccacgcctggctaattttgtatttttagtagagacggggtttctccctgtcttgaactcctgacctcaggtgatccgcctgcctcagcctcccaaagtactgggattataggtgtgagccactgtacccggcctctctgcttatctttggtgtcttataatttctgctttttaaat

SEQ ID NO: 44078 - DNA, 2300 bp, Homo sapien
ctatctatggtgggagaactttctgcctgggtctcatggtcactagtagattagaggacagatactttcttgctggtggtaggtaaaacagttaaaaatgagtcctgggtaactgctccttgggacttccaggggtttgagttgagggttgccctcatctcactgagtaacaggacacttagcagtattggcttgtgctgccagcatataataataacagtaacctgggctttgggccattgctgaattgccagatttctgggttacttttcatgctaagcagctagggactgagaaacttacaggcaataggctgcttccttagaaagaaaggaccctttggccgggcagcgtggctcacacctgtaatcccagcactttgggaggctgaggtgggtggatcacctgaggtcaggagtttgagaccatcctggccaagatggtgaaaccccatctgctaaaaatacaaaaattagccgggcgcggtggcaggtgcctgtaatcccagctactctcacaccactgcactctagcctgggcgacagagcaagacactgtctcaaaaaaagaaagaaagaaaggactccttgatggtctttggcttgtatctcatgactcgagcctgttactccagtggttgattcttggagttaggggcatagccactggtctgcctagctttttgtggtcctattgataacccagacagctgggtgagggagcagataatgttcaattccttttcacttaaggtaaggtgagtcgtggtgggagttgagattgtaaatgatagggtcttggtccaagagcccagagttttgtaaccttttcctatcagtgtgaaaaccagatgccatctgatgactagatgaaggtttcattcaccttttgcaggctgttttgatcaggactaaagaatgtaggttcattaactaccagacacagaagggccactaaggggtcaagtttgcccacttattcaaagcgatattgaagtctaaagaggggaagaacttgaaggaaactatgaagataagcactggagttcacatctgggtactaacactttggtgtagtcattggtacctctgtacccaggttctctcgtttaaaataagggcaggaatccttactaacaattgtagaccttgcaactgcctttgccagaaaatataattgtgatgctaagtgtgaatgcttagcaagagtaaaatctgagatccatggtgtggctggctggataacttgactaaggtataaaaataaaattaaagctggatctcaaaccttgactgttccatcttacgtttgtttcttttcttctccctgtcctataggtgatgccacactcaatcagaaactatgctactgctgaagaggtatattgagccctgcctggttaacctccagtgaggttattagagaattgggagaggctcaaatcagcatcctgcacctagttatcaaaccattgtgaagtcttggtaagtggccagtggctttggtgggcttgcccagttagtgggatggggtagggtaagagtgcttaataggcactaagcaattactggatattttcacattatgatatgaaaaaaaagtcttaaaatattcaggctgtactacagaataaagagtctaacctcttttttccctattctcccatttttatagatgggggaattagaaattgcccaagattatatgagaccacagtagatggcacaaattgcccaagattatagctagttggcatagaaaatggatttgagtccaagccagtactgtgtcttctactcagtgcttcatctaggttctatcaaatccaaggaagccatgtgagacaaaaatgtttttatttcacagtaaaagatttttttttctttttcttttttttaaattagagatgggggtcttaaactatgttgcccaggctgttcttgaacacctgggctcaagtgatccacacaccttggactcatttcacactaaaagattctgtaatagctcctgagattttactcctctgatgttggaaatttccatagtgtgaagttttgttatgcataaaatcacctggggtgcttgttaaacatgcagattcctggatggccagaaaacttgtcattggtcaagagcaacattaagatctgcctgttactcatactgatgcttcctgcccagcaagttcatcagagggcgaggatgaattacggttgccatgaatgtccttgtgaggcagttgggaagccttggtaagttgtcagtggctttggtggggttccccagttggtggtaga

SEQ ID NO: 44079 - DNA, 2300 bp, Homo sapien
ccaaagtaaaacataataaagagaaacaaaatattattttgtattctttctagttcacacccaaagagggatctatttcagagcctcttaagtaaataatgccatttccctcaaaattaatatttgagttcttacagaagacaagaacaggccttgtagtaagcagtgaaggacattgaatctcatttttaatgtccagacaataccagggttgtgaatagaaagaaaagagctttccatgttggtggtctactgcctcttacccccaaattgattgaacacttttgcagtttttgttctggttccctgtctctggatcttccctgtgggtcatcatcaaaaaggtgttctctttgcccaagacaggctggttgagctcaccctgagagctgctttggagaggatgtgtggaaatattttttttctttttttgagatggggtctcactctgttgcccaggctggcaacatcatagctggcacaatcatagctcactgtagcctcgacttcctgggctcgagtgattcttccacctcagccttctgaatagctgggagtacaggtgcgcaccaccacgcccggctaatttttgtatttatttgtagagacggggtttcgccatgtcacccgagctggtctcgaactcctgaactcaagggttccgtccacctcggcctcccaaagtgctgggattacaggtgtgagccaccgcgcccgggctacaattatttaaaaaaaaatttttgcggtaatttttacaaatttcaacatcaggcataggaggagaggagtaagaggcccaagagggctgcagactggcagggaaagtgaagaattgaagggtagaccactaacgatagcagaggaaataaaggtagatggtgggctaagaataatgggagagggattgacgaaagaagtatgggctgagggagggatgatggtggaggccagtgtgaccgaggggaggggaaaggtggaagaagcagagtgggatagcgtcctgggaaagaagtgaaggaggtcggtggaccgctaagggttagactcctagaggctggagagcggcgcgtgggggaggcggggcgcggagggggggttaaggggcgttagcagcgcatgcgctggaagcacactgcggcgattctggagaggttgtccttttctggcatcagcgttgcggctcgaggcaaagctggtcctgtgcctgctgtccattgccgctaaggcctgctgctgccattcaggcgtgtctctctctctctctctctttcatgccgctctctccaccccatcttgggacggccagctctaagaattcctgctacgacactgaattcaaccaggaggtaaaggaacgatgtaggggaagaacagaacatggagggcggcggagggaacttgggccaggaagatccttaatttgtgcatttttccagttcacgggaggaaaaaatggaatacgttacaggccccagttttccaaaaggatgttgagcatttgcttcccattgtgaaaggaatgcgggttcctttcctctaactagagtcaaggcacctgagcatcggtgttttccataatgttccctgtttaaaacatttgtggttcgtcatttgtagcagatgtatttaaagggcgaggccttaggattatgttcatccgatggtttgtgaaagttttccttgcctttgttcaggttgaccggtcttatgtgaatcctggggtactctagccccctcccttggagttgggaccgattccatctagatctgggattcactctgatcacctgcaacgccttctttccccgattcaacttccctagtttatcgcatctactcgcattagggaaggctggtaatggctctccttgggcactggggcagaattgtggcgagaaacacgtccagatagcatcaggcatgcatactgtatacaaatgggagcaagaagagagaggactatcgcggtgcgcagggtatttgagaggctggatgaggaggcgcggcgccgaggggcggcgctcaagcttacagtatttgagaagacctgagttaaggggacgggctccagtggggcgggggtggggagagggaggcacgcatgcgcaaggcttgaatggcgtcggggttggagggttggaaggtcgggaagtgaaggactcgcaggcatatttaacaacgcaaagttgctaggagttggtaccagcgtttgggaggtagaggtggcgctcatgcatatttgagacaacatctggatggttggggagaacggtaaggaggaagcggcgcgcatgcgt

SEQ ID NO: 44080 - DNA, 2300 bp, Homo sapien
caagagcatgaaataaaaggcatccagattagaaaggaagaatataaactatccttacttatagatgacataatcttgtctatagaaaatcctaaggaatccactaaaaaactactggaactattaaatcagttcagcaaggttgcaagatacaagatcaacatacagaaataattgtatttctatacaataacaataaacaattgaaaaatgataagaaaataattctatttaagataacatcaaaaatgatgaaatactttaaaaatttaacaaaagatgtgcaagacttgtatactgaaaactacaaaatatcagagaatgaaaataaaagcctaaataagtgaaacaataacttgtgctcatgtatttaattattcaattttttttttttttttttttttgagacagagtctttctctgtcacccaggctggagtgcagtggcgcgatcttggctcactgcaacctccacctcccaagttcaagccattctcctgcctcagtctcttgagtagctgggattacaggcatgcgccaccatgcctggccaatttttgtatttttaatagtggcagggtttcaccatgttggtcaggctggtcttgaactcctgacctcatgatctgcccacctcggcctcccaaagtgctgggattacaggcgtgagccaccgcgcccggccagactcaatatttttaagataacaatggtctccaaaatgatctacagattccataatccatatcaaacacccgtttgcctttttttgcagaaattgacaagctgatcctaaaattcatatgaaaatgcaaggaactcagaatagtcacatcaaaagagcaaagttggaggccttactcctcccaatttcaaagtataatgcaaagctacagtaatcaagattatgtggtactggtataaagataaacacacagatatagctattaaatagtatttaggtaaatatatgagaaactaaagaaataaagaatgacaataactaactccagagaacataaaaaccatgcaggtaatgaagtgatcagagtactctccaaatggctcaggcatgagtatcatttacatacttataattataaaaacattgaatattgtcccaaccaatattaagtgaagggaggcatagttggaatgaggagtttggactgtgcaagtgcatagggtgggtggtaaaagaagactaaatgttcatcctccaaaatggaaagacacagataatgtctaaaattgaaacatcaaaaagtcatagtagccagcatatgattgtggttccagctactcaggaggctgattgctcaagcccaagagtttgagacctgtctgggcaacatagcaagactcctcctgtctaaaataaataaataaataactcgtaatataaagatatgtttacacatatgcctctaaatagtatgcttcaaactatgagttccaattatttagtgaattaagaaacccaggggacagagcaagatcatgggatagaagtcgacacaatttgtccccctcacctccactggaacaccaaattttttttttttttttttttttttgagacagagtttccctctgtcgcccaggttggaatgcaatggcgcgatcttggctcactgcaacctctgcctccctggttcaactgcctcagctgggattacaggagcccgccaccatgcccggctaatttttgtatttttagtagagacggggtttcaacatgttggccaggatggtctcaatctcttgacctcgtgatcctcccgccttggccttcccgaagagctgggattacaggcatgagccaccgcacccggccgactaagtcttaaattatgaaaacttctacaagtctaattttctaaataggaaaggattcaaactcaatgattcaagtgttgaaacaaacaaaaacggaaaacaacactactcagttaacagattattgtgcttttggcttcttgagtaggaggaaagtcgggcgggaagggcgtcaggaatgtccgtgacacgtgaatggggccgtgtgcaaaccttgtatgacatcactgagacacctagcggaaaacagctaattctttctaagccgcccaaagcggggttgcgccggggcctccggggccgaggtgggcctgctcattggaagatcgcatcgcagccatgagcagtaaggatttcttcgcgtgtggacactctggccattgggctcggggatgccctagaggaggagctggagggcgaagaggtggaggccatggcagaggttctcaatgtggttccacc

SEQ ID NO: 44081 - DNA, 2300 bp, Homo sapien
agcatgctctgatgtaggggaccaccttcccctacccttggccttttaaaatcctactcaacattccaggccttgcaggaacggtggctcatgcctgtaatcccaacactttgggaggccgaggcgggtggatcatttgaggtcaggagtttgaaaccagcctggccaacatggtgaaaccccatctctactaaaaatacaaaacttagcgggtgtggtggcgcacgactgtaatcccagctactcgggaggctgaggcagaagaatcgcttgaaccagggatcggaggttgcagtgagccgagatggcgccactgtactccagcctgggctacagagcgagactgtctcaaaaagaaaaaaaaaattccaggcccatcttgaacaccacctcttccagaagcccactgtgatagtgcagtcagatcctgccttccctcctctgtctcctcccagggagcctcaaatcctagactcttttggtgaaacacagggagcatgaagcttctcgttatatggagacctgccttgaattctagcttgtccttgacttggcccatgatcttaggctaataaatgccttgacctcgttgagcctcagttttcgtgcaaaaaagcaggtaataataaaccttagggcaataagggacgtgctctgttcgggcaatgccttccctgctgagtggcgtggccctgtgatttttgaatttggctgattcctctcatatggcagcgcaagcccctcaggacgtctatatccttccacccagctccgccagccctcaggtgcttaatgactgtatttacaggcatctagcgcagccacgcagccccggagctgcatcacctctggctatgcagtctttcacttatcaggagggttaatgagatgcagggtagaaaggtcttgccactcgcccgcccgctcgtggaagccgagtagcttggtaacgacaccacgacttcacgtttagtgcattagacgcgtagacccttaggggaggcagagcttcccggtatcgccgagcgggccctgagggctgaggctgggcacccctgcgcacccctgctgagtgcccggccaccagaaagacagatcccccacctttccttctccctgacccggcgcgcttcctggggaacaaactctcccttaccctcagtggggctggggcctcagtctgcgacatacagtgggactcccatgtctgcatgcctgaggtgggcggaagggggcggtgggtgctgggaagacatccgtccgcttgcagctccgctgagtctccagcacctgaaaagccgcggccgaggcctgagggaccagcccagccgagatatcgggggcggggcagcccaatcccaaactggcggctggacccgactccaactcgttcctcctaagtccgggacagattgtcgggaggagcttgaactgagcttcggctcccgactgggcctgggcccggcccccactggtgccacctccctcccttcctggcccggctcctggcccacactcggccctggcccggccctggcccggcccagacccggcccggccctggcccggcccagacccggccctctgaggctcctccgggctccaggttggcgcaaacaaagccctgattgactgcccggaggggcgggcctcgctgcatggccgcctcctcccctcccaggccgccagggatttgccgggaagagcgggggcagggggagactcccgggggtgcgcaggaccgcggggggccgagtcctcgggctcgagaagattgtgtccacccgctgtccgaggcccaggctgtcccctcaggtcgtcctcctcaagtccaaggagggacatgggagctcctgagggcagggtggggttcctcgcgggccagctgtcgtcctagggtccccggtgccacctcagttgcgggctgcttgtgaggaaggagggtatgggagcaaaaaataggaggggtcttcccgaggctcggggttgatcagtgtcggttctagagcctgcggggaaaagagggcaggagaacaggatagtttgtgcttccttttttccattttaacttttcctctaacgggcatccgggcaagaacagggttcagtagtttgggaagggagctgggggaggcagtggcggctggagtaggtaggcgagtaaaaggaggaggaagggctggggagaagagcgaggctgtagcggctgcctgttgagggaggaagaggtggggggtgtggaggagggggaggagagagagatgacatggggagaggaggaggggggttggacgtgggag

SEQ ID NO: 44082 - DNA, 2300 bp, Homo sapien
agaagtcatatagtagtgggattaagagcacaaggaagatgactgcatcaaagatgattgcaaataatctgctacttactatgtgacctgggcaaattaccaaacatctgtatctcagctgcattacctataaaatgggtggtatactttcacctcacagtcactgtgatgattaaataatttatatagaatacttaatacaatgcctgacagcaaccagaaaagtttagctaatttaattatagttagtaatccatgcaaggccttatagttaaatcttgtctaaattcaaagacctcaaagaaactggacccttgctttcttattttttaaaatgaccattaagagttcagtttataatccacccagatttatcgaatcctttcttctaggtatctgggggtttttttgagacaaggttttgctctgtaacccaggctggagtgcatcagcatgatcatggctcactgcagccttgacctcccgggctcaagtgattctaccacctcagcctcccaagtagctgggaccacagctgtgtaccaccacacctggctaatttatgtctggatccttttcactgacctaagatgcctgtgctttggcttcattgtctagagcactaactttttgatggtggtattgagtttcaaataataaaatcatgaatgacactaaacttaaaaccttgggaaggtcatgagttgaagagctgactacatcaaaactatcctgagaaaccgagttatgatgccaatgacagatagctctgcaggcaccagaggaaatgaaactataatacaatacaccaggtgtcacaatgtgacgatttacttgaaacaaggacatcttagtggcttaagcaatatgtttaagagattaagatagaaatggaagacagaagtacaagcacacgtgcacacctacaagtttttgtatatatacagggcaagcaagggagtggtcagagcaatggcgagaatacaagaaacagcaaagatgcgcctacttaaaatgtcattcacataaatctttccaggattcttgtattggaatataatcttttattttaccactcaacgattaagccattcaactacacaacacagataaaacggaagttataacatataaaccagtacctgcccacactcatagcagtgaggggaataaaaatcaaggttgcactgtaattccatgactctaaaaatcaagtctatttgacattggtttgaagcaacagaacctttatagcagattcccctttttaaagaaaaacccaaggagagatgatcaagcacaaatgatcacttcatgcattttattgatagtctatattttaaatctgcagtatgacatcttacatagggaaaaaagcttcttcctaaaagataactattaataatcaaaccagctttaatatgattgacctttcaaggtcttgttttgctttaaacaagttaacttttagcagttgtaaagcactgtacaaaagaaaactgtgtacattctcaaaatttaatacagggcttcccaaccaggagtctgctggataggtatcggagaagggtgttatgttcaggtttaaattgaaagaaaatgagaaaccagataaagcaagccaaccaaattaacttcactttgtgctcctctctgcttttttgagtctctcccgaaggtcaggaagccctggtataacaatcactttagtctttacagaacatacatctatgtgctttgtgaccaaagacataaaggcagcctttgttactgttccccctccaaaccccttcaggttcttataagcttcagaaagctttccaagattgctgccctgttctttgtatgaatccaagtaaacaactataccaaagcagctcttcctgggagaagataaaacaggcacagatacatcaccaggccaactgcgtacctactcaacttgatacctgatcacatggccctacatccttaaaagcagcaccagggacaaatggagctatcaagaggtaaaatccaaacactggacagttaaaacacatacaaaccagttaaaagaacattagtaatggggcactaaatagagttaaggctggacagctggttcaaccataccttggtattgaaataattctgcaagatgaggaacttacagaggaaccttgaaagaggcaccatgatatgacagggttcactttcactgcatgtctttaagatatctactactcagcccaactgaccataaagcagctcgtggaactttaataaacaaatcctaataaaaataaataatttttaga

SEQ ID NO: 44083 - DNA, 2300 bp, Homo sapien
ttaagatctgaactctcagctatgtagctgatatagtgatgggcaaacaggaatcacttgcttttatgtccactttttgagtggtacttaaatgtaaagtaacaacctgaattgagtcattgctttctgaaggaatcattgtcctttctccagtttttgttccagaataaaaggaaatattttaaaagccacgttataggacctaaaaatctgatttccgtaccagttaaattggtagcatcactgttactgataatttatcatatacacttgtcaatttttcctttgttatcttaaaagatctgccttagcaatggctcctttttcatgttgatctttaaattttcccacaccataagagaggagcaaaggaaattaccagtttagactaagttacagtatgtgtttcataagtgattaaagctatatcattcccagttattagttaacacaaattcagccacattctgagtattgtttgttcacctttcagacttggtgatactggacatgtcagtgtaaataacactaaggttaggatcttctaagtgtataactgtctcctaagcccatcactgtggcacactgtagagtgagcttatagtttaattgagatatttatcttgtggaaatattaaaaagcctatgcttgtgtaagtgaaaaaaaatcacattcatttgtttaaaaatgtaaagctattttgtagaggctcagtacttttccaatgcactgttgtatgaatgcattaaaaattgtaaagtaccatgcttagaactgagaaaactgctttttgtgagccaacatagtaacaaacacaccaaacaaagtacaaagctgcttttgtaagtgtgtagatgtcaagagcagaacatatctataatatttaatgtgtgaacagctactgtgacatgcaaaggaaaggacagtgcagaattaaaccgtgttgaagaccagtggaaattgtataatttaacttggatttaggcaggaagtgaaatatgggaggagtaaagaaaactgaagaatttaaagttttcctgaagacagtaataatgcagacacaaactggtttcatatggtgagagcagccacagcagcagcttgacctggtattctacctgagtagatgaagcagaagatcagcaagtttggcagagttttggtttaagaaaaacaaaccactactacctagcacaagttaaatttacaagtctgctcctcaaaaatgaaaaaatggaggaaagagactataaaaccacttttagcatatgaattgcagttggtacacatgtgtgtgttaataggaaagtctcgaatttgtgttgtttttgagatttgtcatttaaggtaccagtgcacacttgatcatatttcattactatctctaacacagtcctaacatctcaaatttaaagaccagttgaagattaagggatttttatcctttgttgaaagtcatgttgggttatttgaaattcaaattttaattgtgctgcccatatatgaaaatgagactgctgactcgctatctatggacatgcactttatgttggtttcttagtagtaagagtaacttcatgataaccccagtcttcttgcctaatttcttttttgagactagctggggttaggattagaatgactatggagcagatatttgttcttctgggaaaagctttaacaggccaaaatagggattgaacttgtccttggcctttatcaaagcaagctagctacccagacgtagtcaaatactctacaaaataaacaagtctgctttaggaattgtctgggtaccttcactgttaccaacttagctgtaaagattatttcaaagctcactcttccatgatttcttctggctttcaatcctatctaagtatcaaggaaattaacttgtaaatatggtagttgtttactaaggatatgtactgctcttgcaaggaaataatgtccaaacaaagcttcacttattttttttaatataagcagatttcactgtttatggcgcttatgtaatacattttatctttttaaaaatttgtccgtgtaaaagtcaggattcctttatatttgtgagcctccttttctcctttcctaaggatgtaatctacagttttcagatctgcagggtagtcttgattggctaaaaacaaatcaattttcttcttggcataaagtgtttcattattataggggtgttcattttaaatagtttaaaaacaattgcagcacattctaagcataagagaaagttattgacaacaggtaccttcctaatctcccaagacgtacttac

SEQ ID NO: 44084 - DNA, 2300 bp, Homo sapien
catcaaaaaaaaaaaagaaagaaagaaggaaggaaggaaggaaggaaggaaggaaggaaggaaggaaggaaggaagaaaggacagaaatagtaacctgtattttcttccacttcttttatgattttatattttagattaagccacataagcctcaagaatacgttaaggagtggctaatgttattgccataatcagaatatcaggcttaatggcaattgcaggctactgaagaattccttttacacgttctaggtaatcgttctagtacatgattatgtaaaataagacaaaaacctgagtagagacacagcgcctaaatcatgtatccctctgccaaaaatgacaatatcaatgagtcttctagggagttgggcaggtaagtatgagggatattgttttaactgcttggagtgaaatacttatattccaggctgatataacatccatcatggtgagggggtaattctcccaaagtattttgagggcttactatgtggtcgctggggacacaacagtgaacaaaacagagaggtttactgctcagaaagggtgaagtaaacaaacaaataaataacttactttcagattaagtgttttacaagaaaagtaagcaggtaaggagatgggagaagtcgttattacttttttctttttttttttttcctcagacctttttccgccttcaggaagaagttattttaggtagggtggtcagggaaggcttctctaggaagttaataattgcgaggcttggatgatgaaagcaaagatatgaaagtaaaatattccagcaaaggtaaagtagttgaagtaggaagaagttagctttgttggaaaaaccgtaacaaagccagcatagctggcatgctattggaaaacagaaaaattgggaaaaggaaaagaatctaaaaacttgggtaaggttttcctttaactgtgacaatgggagtggcatgctgtgtggcgagttccctcaattctttcaggcattactacctaagaaaggccttctttaactgcccttttacaaatcccaacgttatcagattttcccacccttttacaatcaccgccctttttcgaatactttagagttaatgcctcaaagttatcagtcttttaaacatcacgaatccgtttgtccctacaaggaactcttctgtcccccttccttgatttttctccttggcatttatcactaacatgatatgtatttatgtttgattttttctaaattattgtccctggcccctataaagactcaagagaactgggattttgatctgttttctttttttttttttttttttttttgagacacagccttgctctgtcacccaggctagagtgcagtggcgagatcccggctcactgcaatcttcgcctcctgggttcagctattctcctgcctcagcctcccgattagcagagattacaggcgcccgccaccacgcccggctaattttcgtatttttagtagagactgggtttcaccatgttggccaggctggtctcgaactcctgacctcaggtgatccgcccgcttcggcttcccaaagtgctgggattacaggcgtgagccaccgaacgtggcctgttttctttcttaattttggtctattttaatttcctaagcagctacaatggtgcttgacatgcagttggcactgtgtaaatacatgttgaataaaacgcaggctactttttgaactggtctgcacggattgtgtgaactgatgtgatgtcagggtagactaatatcacatttctctctctctgaaaatgtcttcaagcagtcagaccgtgacgtccttcagttttcaaaatgggaaagcgaaggttcccacaattctcagaacgcaaatttctcgccacaattcaaaatggcggaggagggtggggcctgtcacatggtgggcgtcataacagctttccttttccaaaccgccgcccgccttgccgcgtcgtctgccgtccccctcctcctcccgcggagccttttcgaggaatcgactgggattggctaataggctgggagtggggctgcggtgccgggacgcggcatcatcacttcctgttgtgggcagtcgtttcctgtcgctgcttggtaacaatggggaagataatggctgcctgagcaacgtctccgagcaggcgctgggctagaggcgggtctcaaccagctactcattggaggcgggcttgagagcggcggccagggaggtgcggagcagcctcggcggcggcggccgaaccaaccgagtcggatcctgaccctaaaacctagtaagtgaagact

SEQ ID NO: 44085 - DNA, 2300 bp, Homo sapien
ggaagtcgagaaaccaaggaattctctaccttcttcatccttagcagtcaaattttaaggcacagaaagagaaaatctgaatatgatgtatatgtgtgtatgtatatgaattgccttgtttttgaagagcatctgatcatttgaaatagaaatgaggcaaacaaaaataaagttaattgccacacacaaacacacatacaaacacaccttatctcaggttagtcttgtctttgctttgtgtccttcttaatcaggcaaccatgattaggttaaatgcattactatttggaggaagggatacgtttgtctgcttccttggatttcagttttgaataatattgtggcacagaggtgatagaaggatctaggatgtatgaatgagtgtgagtttccaaactgactttatgtggtaggtataaattgtgaaacaaaaacaatagcagtgatgaagtcaatctggaaacaggtaaatcccagtgagccttttaagacccctctagctgaaataacctataaaacacaaaataaaacaaatttaatgactgatattatatatttgaaatgtgcaggttggacagcatttggacttggaatgaaacaataagaggttatattcatggataaccaacaagataaggctattgttgcctcagccaacggagaaaacactctgattaatggggtcaaagaaaatggtaagggaatttaattatagtatattaatatctctcctggtagtcctctgttattactatggattttcagtacccacaaagttgggacaggttgagtccaggatgcctctgaaatgaatgttaattgtaaactttattccaccaaatatctaacttggctataagagtctctaagaggcattgaatctgaccactttgccctcccaaatcatatctgccagatgaagatcctcaaaattcctagtgaattagaaatatgctgtgatgtgaggcttagaacttctagagtggccgggcgcagtggctcatgcctgtaatcccagtactttgggaggccgaggtgggcagatcatttgaggtcaggagttcgagaccagactggccaacatggtgaaaccccatctctgccaaaaatataaaaaattagccgggtgtggtggcaggtgcctgtaatcccagctactcgggaggctgaggcatgagaatcacttgaacccaggagatggagattgcagggagccgagatcacgccactgcatttcagcctgggcaatagagcaagactcaaaaacaagaaagaaagagagagagggagagagggagagagagggaggagagagaagagagagagagagagagaggagagagagaagagagagagagagagagagagaaaagaaaagaaaaggaacttgtagagtcactaggagcttccagaacatggatctggaggacaggcctgagcctcgtagctcaaaagtattaatgttccatctgagcattttccccttgaaagccttgactttccaattgatcaagcagtccaattcttttctcatttctgaggagagctttgcctttttctgaggaagaaactcggcctaaataattattatttttcatttgcatgaatgttcaatataaaatcagcgttgttctttaacgttgtagtttttatttgtaaagatagagatgtgaaggcttagcttatataataagatcaagtaccagaaactgatcaagggaaagagagttaatgagtctggtctaagactcttaattttattcctgtcatttctttcccttttttctagactcagaggaccaggatgtggcaatgaagtcatttgcagctctagaagctgctgcacctatccagcctacaccggtggcacaaaaagagaccctgatgtatcccagaggtctcctgcctctaccctctaagaagccctgtatgcagagcccgccctctcctttgggcctgattgaagcacccgaacatgctgctaatagtgcttctgtgaatgccatctccctcacatctggcattgcaaaaggcctgaacacatggtcacttcccaatgaatgtgagaaagctccatttgccataatggagcctgcaggcatgtcagctctgaatggggactgtctcatgcagccaagtcggacttgcttaggctgcttcatggaatccaaggatgcagtagatcctgagccagggatcagtctgaaagttggtgatctaaatagggattatgaaacgtgtgcagtctctgatatagggattcagtgtattaatgctggagaaaatatgaaatatggaga

SEQ ID NO: 44086 - DNA, 2300 bp, Homo sapien
tatctccaagcagtcacattctggggtactgggaatagtcagagcttcaacatatgaatttttggggaaatgcaaatcagcccataacacccatggtgtgtgttctccctcactctaacaagtagtaaacccaaattgttcaactacagttgtgtttctggtagtttttggctggagggcattgacaaaaattataactggtaacaaataagcaactaactttataaaggaagaatagcatatgtagttaatacaggtgaaaacaatgtgctttccgacaacggaaaaagagcaattcattctggatattgagatccagccaatagatgggtggcattttacatgtttaaccttttttgtttgtttgtttttgcttttgagaacagaggccaaattttgtcttcttatttattccagtgcctgaaagatgcaaatatatttgcacagtgtctcacaaatgcaagataaataacatatcatccctatcctcaggacacatatacctaacttccttgtgactcgattttctcatttgtaaaatggagatagtaaaattgtgtttgttgtgaagattaaataattcatgtaaattgcttagcacagtgtctggcacatagtaaggacccaataagtataattatttcaggatgagctattatttatggatgagtttcatagatataaaatgagagggagaaataacaagagtgtttcaagcaagtgggatgacagaaacaaaggcacagagatggggagttgtaaaagccatacagacagtttattgtccaggaatgaaagacccatggtagagcgcctcaaacttggtaaagtgacccagaccttattgtcaatgggatatctggaacatttatctcctgtactttgccagggaaaagaaaatatacccccgcctctgcactgtttctggggagggattgtgtgacaggtgatggtgagaagttgcacacatcagatctcaaagcctgagccctcgtagcaaaatgacgctgtagctgtggcagcaaagaaatctgaaatgaggccctgcctgactggagaagctgtgctttggcaatgatgttggagcaagtgcacacaaagtagctacttttaccccttctgttctagtaccaaccttttcatctcttgccttggctcctagtggtgacaaatctcccgaggctcaggcctcaaccttgcacccaggactccagaagtactaaatggtccctcctgagttgctctccaatcgttttgctgtttcctgttgagttcccaggacgtctgaaggaaaatgaccacctaagagatttttcaatgacagccatcaggcagatctgttttccttcctggccatattcagcttcccttctttcctttattccccaaacgtcactccccaattgtctgccttcatccaacccttcaaaaaggacccaccttcctgggggcccaggcccttaagttaagagtaggtaaaggttgaatggttagatgcttggtggatgaaaccattcaaatattcttccccaaacttcagagtgcccctctccgcacacacaactgccctaaaaggcatgggagagtggtgtccggttgcgtgtctgccaggggaagaacgcaccactggcgtagtggactggaagggcagcaggaacgcgagtggggggcggggtgggaatggggaaggggggtgcgcgccctttatgacaggtggccgcgcagtgcgcgctcccgggcgcccgaggggagggaaggacagacggacagagttgggggggcacataaggaagggaccatagagagggtaaggagagcgggagggaaagggagagctgtggtggggaagaagggtagaggggggaaggcgtccagcaagaacagccgtgttggaggaaacaatggcaggggcaacagcgatggtggcagcagaggcggccccactctgggcacctttctgaatgggcagagacagctccgggagaagaggggaccaggcagtgcctgcagaggctctgagaaaagcggcagagggaggagaagagggaggaggaagagaaggaggaggaggagtaggaggaggaggaggaagggggaggaggggggacgaggcaggggaagaacctgggaaggaaaaccagtagcatcagcagcagcagcagcagccgccgccgccaccaccgccgccacagcagtagcattagcggcagtagcagcatttagcaatagctttaacagctatagcgacagtagcagccgccctcctctctccctctcgcggacggccgcagccaccgcac

SEQ ID NO: 44087 - DNA, 2300 bp, Homo sapien
tttaattattgcatacataaagtgctatcatgtgatctgtggttgtagcagctatttatagcagcttttattgtgtatacctctgtctctttaatttatgtcagacagttatgtgtcaagttattacaggctgagttggcctttttgttgctgctcttccccagcagtgtgcaactcttattatgcctcacgttctatttctgggtgccctggaaattttcttcggcttatttggcaaataaatatttgcctcactttagctcatcatagagtaacaacttgggtatttcaatgttattcacactttttgatcaaaacagttggcttacaatgagcactacttttggaaaaaaataatttggctccattcaaagactttacaactgggtggtaagattcagtggcaatattcagccctaagagaaatcattagtagagtctagagtttctctaatgtatactgtagctgtctaacacagaatagatgctgaataaatatttgttgatgacaatatagtcattaatatgaagccattactgatctactgtcaacaatacaataataagctagaaacatccaattagtcactaagtcttgccaattccatctcctaattgccctgcaatcgatctactgccactgctactgctaggttgaggcctttattttatgactgaactattgcattaacttcatgacttcaatatgaactccgtccaatccaaccttctcacttaagccagagtagcttaatggacatataaatctgatcatgttactctcctgattaaaactcttcactggttataggataaagtattaacttcttagaatgaaatagaaggccctttaccatcaggtctctgttcactcaggttaacctcctactactttcccaaactccatagactcctgaacctgaaaatattttcttatgccttcttgcttttaacatgtcatcttctttacgtgtaattccagtcaacctcttcaacttgaattctatttttctttaaataactagctcaagcatccccttgaatgaatcccagaacaaaaaagctaactgcatgggctacagatttctgtttttctttatcagacttactagtccaaagtacctcttcataagaagtccataattatttgtctcttttgtgtgaaaagttggagaatgcagcagtgaatataaaattgcaactgcattattgtctccggggtttcaggtaacatttacaactggaaatgcagtttcctagataactgtaaacatattttgacattttgtttgataatagtggtgacaaaagaatataagcctgtctttaaacatggtcttctctccatacatttcactttaccacccttcagccaacctaagcgatttttcaagaattagggacgctgcaaaaaccaaagcgaagagctagaaagagtgacaaaattagtaaagatgtctgtagtctctctgtgtgtgtgtgtgtgtgtgtgtgtgtgagactgtcccacgagcaacagaccaaaggaaaactgccccaaggtttgcgcaacagagaacaatcagcaaagttaaagtccttacaggacagaaaagcagtaaatcttacagctgaagcctcctcccaggggaaattaacgtctgtagtttaatctttccttaattcagaagggagtgaagataagaatatgcatagggaaaatggagagaggggagcgtgacattgagttggaggaggtaagagagtattatgagagacaagatggggttgacagatttagcagatacaatatttgggacacacgcacgaagagatgattcgttgtttatgtaaaattgaaacttaactaggtaggcatcctgtatttcatctggcaactccaggaaaagagaaaaatacagtgttactccaatattcccggttgtgtaaggaaaacaatcaaagctcggccctaaggaaaaacaaataaaagaggctgtgcgaatgcatccgaatcttcaaacagaatccatttccggtctggggccctgggaaaacaagaagaggagagacaattaaggtagccgaattcagtccgccagtgtcccataatcctcttctctcggttcctctttcctcgctcaagatggcgctgctcgcgatgcattcttggcgctgggcggccgcggcggctgctttcgaaaagcgccggcactccgcgattctgatccggcctttagtctctgttagcggctcaggtccgcagtggaggccacatcaactcggcgccttgggaaccgctcgagcctaccaggtgagat

SEQ ID NO: 44088 - DNA, 2300 bp, Homo sapien
atagtagatgttggcatggatgtggcaaacagggaacactgctacactgctggtaggaatgtcaactaatggaaacagtgtggagattccttaaagaactaaaagtagaactaccatttcatccagcaatcccattactgggtatctacccagaggaaaagaagtcattatacagaaaagatagttgcacacgcatgtttatagcagcataattcgcaattgcaaaaacgtggaaccaacccaaatgtccatcaatcaatgagtggataaagaagctgtgagatatatatatatatacacatatatatgtgtatatatatgtgtatatatacatatatatgtatatatatatatacacatatatatatgtgtatatatatatatgtatatatatatggaatactactcagccataaaaaggaatgaattaatggcttttgcagcgacctggatgagattggagactaatattctaagtgaagtaactcaggaatggaaaaccaaacattgtatgttctcactcataagtgggagcttagctatgatggatacaaaggcatatgaatgatacaatgaactttggggtcttggaggaaaagggtgggaagggcttgagagataaaagactacaaatagggtacagtgtatactgctcgagtgatggatgcaccaaaatctctcaaatcaccactaaagaacttactcatctaaccaaacagcacctgttccccaataacctatggaaataaaaaaaaaattataaaaaaatctgtataggcatgttaaaaaaaggaaggacagaaataccattcaactcagcaatcccattactgggtatatacccaaaggaacataaattattgttttattaaagacacatgcacacatatgttaactccagcactatttacaataacaaagacatggaatcaacctaactacccattaatgatagaatggataaagaaaatgtggtacatatacaccatggaatactatgcaaccataaaaaataatgagatcatgtcctttgcagggacatggatggagctggagcctattatccttagcaaactaacacaagaacagaaaaccaaatgctgcatgttctcacttataagtgggagctaaatgatgagaacacatggacacatagtggggaacaacacacactggagcctactgcagagtgcatggtgtgagaagggagaggatcaggaaagacaactagtgggtactaggcttaatacctgggcgatgaaataatctttacaacaagcccccatgacagaagttaacctatgtaacaaacctgcacatatatccctgaacttaaaagttaaaaaaaaaaaaagattcttgtatcccatctcggatctacagaatcacaatctcaaaaatgagccgtaagaacctgcattttaacaagctctacaattattgtggtacatactgatgtttgaaaagtactgccctagacactcttacctcaggccgttatagtgagtccatacacttaaaaataagcgtctttccaagtactttaaagattcaaaatgatagtggatctgaaatgccgcctgagtccccatgacaacgtgtacactgtggggcccaaccaataaagataagaaaagctttggcggtcaagcatacttgggaagctgcagtttctagaacagtctagtagaggacagcctcttcagcagcctgctaggcatttttttacttcttccttctgttatgcagacaagctaactgaagatgcggttactgagatataatttctctgctaggtcacaaagtctgaaaacatgggccttacgtgtgtaactgtgtatcatcacctgccacccccagtttttcctggctctactaatcacccaaagttctgaatgcagaagccccaggggcccccggaagatccttcaagctggcatccttggcctcgctgcgggggcttagctacctgtgggaacccacgtagcaagggtgactcaaagggttaacaagcagtggcgccgcagagtggcggggagtgcagccaatagggtgtctaggcaggcagtacgtctggtgtgggcgggagtgagccaaagtgtgctaaaggaaaccaacagcggcctaggggtgaaaggacagccagggttagatgttctgaggaggcgggagcaaccgagagagcacgtgagcatctgtcctttctacccgttcctctttatctttagtgttcagtagcagcggggatagcccggggcccggtgtatggccacggagttacagtgtccggactccatgcc

SEQ ID NO: 44089 - DNA, 2300 bp, Homo sapien
tacagtgtatactgctcgagtgatggatgcaccaaaatctctcaaatcaccactaaagaacttactcatctaaccaaacagcacctgttccccaataacctatggaaataaaaaaaaaattataaaaaaatctgtataggcatgttaaaaaaaggaaggacagaaataccattcaactcagcaatcccattactgggtatatacccaaaggaacataaattattgttttattaaagacacatgcacacatatgttaactccagcactatttacaataacaaagacatggaatcaacctaactacccattaatgatagaatggataaagaaaatgtggtacatatacaccatggaatactatgcaaccataaaaaataatgagatcatgtcctttgcagggacatggatggagctggagcctattatccttagcaaactaacacaagaacagaaaaccaaatgctgcatgttctcacttataagtgggagctaaatgatgagaacacatggacacatagtggggaacaacacacactggagcctactgcagagtgcatggtgtgagaagggagaggatcaggaaagacaactagtgggtactaggcttaatacctgggcgatgaaataatctttacaacaagcccccatgacagaagttaacctatgtaacaaacctgcacatatatccctgaacttaaaagttaaaaaaaaaaaaagattcttgtatcccatctcggatctacagaatcacaatctcaaaaatgagccgtaagaacctgcattttaacaagctctacaattattgtggtacatactgatgtttgaaaagtactgccctagacactcttacctcaggccgttatagtgagtccatacacttaaaaataagcgtctttccaagtactttaaagattcaaaatgatagtggatctgaaatgccgcctgagtccccatgacaacgtgtacactgtggggcccaaccaataaagataagaaaagctttggcggtcaagcatacttgggaagctgcagtttctagaacagtctagtagaggacagcctcttcagcagcctgctaggcatttttttacttcttccttctgttatgcagacaagctaactgaagatgcggttactgagatataatttctctgctaggtcacaaagtctgaaaacatgggccttacgtgtgtaactgtgtatcatcacctgccacccccagtttttcctggctctactaatcacccaaagttctgaatgcagaagccccaggggcccccggaagatccttcaagctggcatccttggcctcgctgcgggggcttagctacctgtgggaacccacgtagcaagggtgactcaaagggttaacaagcagtggcgccgcagagtggcggggagtgcagccaatagggtgtctaggcaggcagtacgtctggtgtgggcgggagtgagccaaagtgtgctaaaggaaaccaacagcggcctaggggtgaaaggacagccagggttagatgttctgaggaggcgggagcaaccgagagagcacgtgagcatctgtcctttctacccgttcctctttatctttagtgttcagtagcagcggggatagcccggggcccggtgtatggccacggagttacagtgtccggactccatgccctgtcacaaccagcaagtaaactctgcctcaaccccaagtcccgagcagctgcgacctggcgatctgatcctggaccacgcagggggaaacagagcctccagggccaaggtgattctcctcacggggtacgcccattctagcctgccggccgagctggactctggggcctgcggcggctccagcctcaactcagagggcaacagtggtagtggtgacagtagcagctatgacgcaccagctggcaactccttcctagaggactgcgaactctcccggcagatcggggcgcagcttaagctgctgcctatgaatgatcagatacgggagctacagaccatcatccgtgacaagtaagccaagagcggaaggggaaagggaagtggagggtcttgcaggctgtgggcggggattggaagtaaaagggctaagagacagtgttcttggccttggcaaactttggagattggggtaagaccttttatttggtgtgtgtgtgtgtgtgtgtgtgtgtgtgtgtgtgtgtgtgtcgtgtaactcgaacgccaaccttctctttccaagttccggtgtctaacatcactttgggtggggaggaagactttaggtagcctctgggctctttgtctctcccaggaaa

SEQ ID NO: 44090 - DNA, 2300 bp, Homo sapien
gtagtattccatggtgttgtatatgtaccacatttttttttgagacagggtctcactctgttgtgcaggctggaatgcagtggcatgatcaggcctcactgcagccgctatcccccataaagtgatcatctcagcccctggagtagcatgcacctcacacctggctaatttttttttttattttttttggaattttagtagagatgaggtcttgctatgttgcctaggctagtcttgaactcctggactcaagtgatcctcccaccttggccttcaaaagtgctgggattacagacatgagccactgcacctagcctactacattttcttgatctactcattagtggatggacatttaggttggttccatagttttgcaattgtgaattttgctacaataaacatatacatacaagtgtatttttgatataattacttctttttctttgggtagatatgcagtagtgggatcacttcattgaatggtagatctactacttttagttctttaagaattatccatactattttccatacaggttgtactaatttacattgtcaccaacagtgtttaagcattccctcttcaccacatccacatcaacatctcttattttttaactttttaataatggcctttcttgtaggggtaaggtggtatcagattgtggttttaatttgcattttcctgatgattagtgatgttgagtattttttcatgttttttggccatttgtattttgtatatcttcttttgagaaatgtctgttcatgtcatttgcccacttattgatgggactttttttttttgctgatttgtttgagttccttgtatattctagatattggacctttgttggatgcatagtttgcaaatattttctttcattttattcattatctgtttactgtgattattacttttgctgtgcagaaactttttagtttaattaggtcccatttatttatttttgtttttgttgcatttgcttttgaggtcatatttgttgggaacaggccccaaaatctggctatgaactggcgccaaaactggccataaacaaaatctctgtagcactgtgacatgctcatggtgaccttgacacccacgctagaaggttgttggtttaccggaatgagggcaaggaacacctggcccacccagggcagaaaaccacttaaggcattcttaaaccacaaacaatagcatgagctatctgtgccttaaggacatgttcatgctgcagataactagccagagcccatccctttacctcggcccatccctttatttcccataaggaatacttttagttaacttataatctatagaaacaatgcttatcactggcttgctgtcaataaatatgttggtaaatctctgttcaaggctctgagctctgaaggctgtgagacccctgatttcccactccacaatctatatttctgtatgtgtgtctttaattcctttagtgccgctgggttagggtctccctgaccgagctggtcttggcaagtggtgcccatacatggggcttgaacccaggtcgaagggttgccagagcgacagttggagaatgtggaactaagctggaggacacatgagtactcttaaagcaatccccgcggtgagtaagaaagtgagcttggaagcatcaaggtaacaatgggacaagtgtgagctctggttctttccaccttggaaccttttcacactaatgatgaggaagaaggaaagtgtaatgagtaacagaagatgtgacagagcaggtttgtttgccagctaaagctatagcggcaaaggagggagaggttcatccctacccttctgtaccccctccttattttgaagaaaaagagtggcctggccctccagatctttcttttccagaggatactgggtgaaaagtagttgccccagtgactgttcgagcagagcctcaagcgaccgctctcagttctattcaggcaggaattcagcgagctagatgagagggtgatttagaggcttggcagttccctgttagaatacaccccccagatcaacagagaaatattatagctacatttgagcctcttccttttaaatttgggaaacccatgaggggcccgtccctggccccgttccaaaccgaggcatttctggctcaggccattccctcacgtctgtacaatgtctgtcccccaccacagccagtagtgctgcagtagatttttgctgcacaaaaactgtgagccttctgcctggggaactcccacaaaaagttccaacaggggtctgtggacccttgctagcgggg

SEQ ID NO: 44091 - DNA, 2300 bp, Homo sapien
cgtgaaattttattgaattcattgatcagatccaggagctttttggaagagtctttagggttttctaggtatatgatcacattatcagcaaacagtgactgtttgacttcctctttattcatttggatgtcctttatttctttctcttgtctgatcactctggctaggacttccagtactatgttgaatagaaatggtgaaagtgggcatctttgtcttgttccagttctcaggaacaatgctttcaacttttccccattcagtataatttagctgtgggtttgtcatagatggcttttattaccttaacatatttcccttctatgctgattttgctgaggattttaatcataaagggatgctggattttgtcaaatgttttttctgcgtctattgagatgatcatgtgatttttgtttttacttatgtttatgtggtgtaccacatttattgacttgcctgtgttaaaccaaccctgaatccatggtatgaaacccacatgatgatgatggattatgtttttgatatgctgttgaattcggttagctagtattttgttgaggatttctgcatctatattcattaggaatattggtctgcagttttcttttttagctatgttctttcctggtttttggtactagggtaatattggcttcatagaataatttaggaaggattccctctttctctgtcttttggaatagtttcagtaggagtggtaccaattcttctttgagtgtctgatagaattcagctgtgaatccatctggccctggacttttttttgttggcaatttttttattaccattttaatcttgctgcttgttactggcctcttcagagttcccatttctttctggtttaatctagcacagttgtatatttgcaggaatttatccatctcctctaaattttctagtttgtgcccacgaatgtgtccttagttgccttgaatgatcttttgtatttctgttatcggctgtaatatctccctttttgtttcaaattgagcttatttggatcttcactcttcttggtttatctcactaattgtctatcaattttatcttttcgaagaacaagcttttcgtttcatttatcttttgtattcttattttttgtttcaatttcatttagttctgctctgatttttgttatttcttttcttctgctgggtttgggtttggtttgttcttgtttctttagttccttgaggtgtaagcttagattgtccatttgtgctctttcagactttttgatgtaggcacttaatgctatgaactttcctcttagcactgttttgctgtatcccagaggttttgataggttgtgttactattatcattcagttcaaagaatttttaaaacttccatcttgatttcattgttgactcaacaatcattcatgagtagtttatttaaattctatgtattcacatggttttgaaggttcctactaaaggtgatttccaattgtattccactgtggtctgagaaagtacttgaaataattttgattttcttagatttactgaaacttgttttgtggcctatcatatggtctatcttgaataatgttccatgtgctaatgaatagaatgtatattctgcagtagttgggtagaatgttctgtaaatatctgttttgttttgtttgttttattttttgtttattttgttttgttttgttttgtctttttgagacggagtctcgctctgtcgcccaggctggagtgcagtggcgtgatctcggctcactgcaagctctgcctcctgggttcacgccattctcctgcctcagcctcccgagtagctgggactacaggcacccaccaccatgcccggctaattttttgtgtttttagtagagatggggtttcaccgtgttagccaggatggtcttgatcgccttacctcgtgatccgcccgccccggccacccaaagtgctgggattacaggcctgagccaccgcgccaagcccctgtaaatatctgttaagtctatttgttctagtgtgtagtttaagtctactgtttctttgttgtttctttgttgactttcttttttttgttttttttttttaaatttatttattattattatactttaagttttagggtacatgtgcacaatgtgcaggttagttacatatgtatacatgtgccatgctggtgtgctgcacccactaactcgtcatctagcattaggtatatctcccaatgctatccctcccccctccccccaccccacaacagtccccagagtgtgatgttccccttcctgtgtccatgtgtt

SEQ ID NO: 44092 - DNA, 2300 bp, Homo sapien
caactactccaactcagcattgtacaaaacagccatagactacaaattgacatgaatgtgttccaataaaacttcattcataaaaagtcagtgggccatatttggcccataggcatagtttgccaatccttgatgtatacacttgaacatggtttgtctctctggttcttggccctccatgctcctttgggtgtgagctatccctgtcataagccccccggccccagactatttgattagtgatcgggctaccttagaagaggaagacttaggcaaaattaatcatgtcaaaacgtgaaagttatcaacttcccccacgaactctgctcttctcacaatagcccctatcatagtgattggcaacattgttcattcaggcattgaagttagaaatctggctgttagctttaacttatctcactcctcacctgccaactggttgacaaattctgttgatttccccaaacactattacatctttcccctcctctccttcccttcatagcctggcttaggcctaggctcttaccatctcttggttagagtactgttaatatcttccagcaaaagcgggctacttgcagtcccccaagtatgttgtgctgtttcgcatacatttgccactacatatttccttttgcctggaatcccctcctcccttaaatcctgctcccatctcttatcttcctggtgaaatcctagtcattattcaaaacccaactgggactttccctttcacacttaatcattgcctcctcaaggctacttggtttaaatagtatacccttgacaatcccaatatacatgttccacaagccccgaattatgaatattggaaaatttaagtatacatgtcagaaacttagggctcaaataattaactaggctactaaatattgtaactaaaatgaactctgcatttcattgcatcatgaatttagtaacatcaaccataaaattagcttaatctgaaaagaaacaataaatcttttatcacttcaggtaatttactgcatatataaccataaataaagaacagagatcaacctcgtagagacacttgctcccacacagtagtcacacagaatgtgaatcacacatgcatctcagcaaaatcacaaatttctccatgtaaaagacctttgggaaaaacagtgagtgtcaaatccataaatgccaagagcctgctgtacttctattattgtacttgtgtcaatgaacaactacagccccaatgagaacatgagcttcttggggtcaggcccactattttgtcattctttttgtaccaaagttgatctaacaggaagcaaccactccaaaaacatttgttgaattaaattacctcctaattgatcttcctacttcaaggccatcttcctttccaaaatcctgccagttatttcacaaaaacatatccctgatgtcactccatttcccccaaacctttgatggctcttcataatctgctttacatgattatgtccccatgccatgctaggacatataagagccttcacaccatggcctcatactcccagtctcattcttagcctctcttcttcacaaacactcttcaagccacactagctgctcctggaacatttttggactttcattactctatgactttgtaaatgctgtttcctctgtctaaaaggtcctcctcctctcatctgcctggaaaacctgaatttattaatatagctcagcttaaatatcgctacctttgtagctttccctgacccctctcagaatcagtctccctcatttgtttttttataccaatgtgtttgttctaaaaacatactaagctgattctgcggggagggaaaagggaaggagggagtgccctgtcaaaggacttacccaagcagcgactgcggcactacgtgttaagcatattgttcaagcagcagtgggaggatggagctggatggccttcatgttacgagatgctatggctcgcatctttcacactgcgtgtgtgtgtgtgtgtgtgtgtgtgtgtgtgtgtgtgtgtgtgtaactgtgggggggggtagcagggggagagaaagagaacgaagggagacagagagactgagacagaaacaaagagggcggacgcagtgcagtaagagcagatgggcggacccaaatttcttcggcttcacgattttgcggaggtctagccctgcatccagccttgaaacagggtggggaggaggcagaaaggggagggactgcactccctctgagcgtgctagctccgactgcctgacggatcacccttccgctccaacatggctagttcctca

SEQ ID NO: 44093 - DNA, 2300 bp, Homo sapien
tgcctttagccatgaccaactttttttgaaaattagtaacagagaaataatttgcctgggtaaatggttggatattcataggccaatattatgagataaaagtttttagctcctggagtgcaaaactattttctgtataactctttccttttctggaaaagtaatttaatggagtagtcattatgaaaggatgataaagagctatcagtaatatctagcaactccagagctgctaaacttccttgattgtctggagggcttcttggtatagaacttctgatgttctttctagaatcatgtggatgccacggctcaacaaggcataattcaagagcttctcttttattcttaaaagcaaatttctcgaggttgacctagaagggagagtggtatacctggtctaaaatcaagagtgtcattcacttttaaggagatgtgacttagaacttccctttccctgggaatttaggtaaatatagcttgaatcctcaattttataacctgtgcaagtctagtattctccccatgattgctgtgaatgttcagtcttatatcttcccatatgcctctctgctatttagagacagaaagtaggtattagtggttgctctccccaccccagtgataggggtggggagagctatgaggggaaatgaggagcgactgctattgtgaatgcaatttattttagaggtgatgaaaatgatgtaaaactgattgtggtgatggttacacaactgtgaatttatgaaaaatcattaaattgtatgggtgtattcactttaaatgggtgaattgtatagtaggtaaattttatttcaataaaggtgttactttttttaaaaaagtaaggacatgtgtagatttattaggtattgcagatttgccaccagaagtgttgtagcagtttgctttctcaccatgaacgtatgagagtgcctgtttcctcgcagcttcaccaacagaatatgttgtcatttttttttgccagtctgataggtgagaaattgtgtctcagtgtatttttactttgcatttctctaattctgagtttgaacatcttttcatatgtttgaggatagtttttatatcttttgtgtgaattgtctgtttatgtattttccctatttttctattgggtttttggttttattctttcaatttttaagacttctttgtatgttaggaatatcagccatagtctgtcagtatccacatccttaaccattacactccattgacttcctgctctggtactttatccacttaaacccaatttttctaacttctatacttgtaaatgtctcaaatacttaacatagaatgatttaaatgtagtataggcccttaaaacctactatttaggggcatgtttcaagccatgttctcctgaagctctaccagttctgggaaaatggaggtgggtagtacagctggatagcctattctgggagatttggggaagtatttgcttctaagactctttgctatttatttttctctgtagccccagccctacaaaatgaagaacctaatatctctctgttgcagtctgttcggccatccttaatgctattaagtaaaggtggaatcatagttactgaggtagcaagtcatcttgctttggtagtcagtgtatggggaggagcaataaaggaatttcaccattctgtttaacttcactcttctggagctgcactgttgatcagcatacgaaaaaagctataaagcttttattttgtcttttagctgtgccatcttaagaccttgtccagcatccttagtattctcccttttggagtgagtctgccttatcattattattattgttattgctattattgctttgcccttgactgccttcacctgccttgtccttgacagcttggaagtttctttaaaaagtaaacatgcaattaccacatgacacagtaactgaatttgggggcatttatcccagataaataaaaacatatgataagatggcggtgctgagcagtggcggtggtggcagtgcggagcccggtgaggctctattcaacggggacgtggagcctgaagccggcgctggcgccgcggcctcttcggctgtggatcctgccattcccgtggaggttatcttctaaaaatgtagaaaccagacttttaacttttaaaccaacagaagagaacaaatgattaataaaaattaatcccaaagaagtgaagaaaagaaagaaccagtaggacaaataccacaaagtatggaatatcaaacaaataatcaattaagttgacacaggaacatatagaggccctat

SEQ ID NO: 44094 - DNA, 2300 bp, Homo sapien
ttcaatgctgtggaatgggatcaggatgtcatttcagagataagatgctgccattcaatgttgcttttctttattagatggagggagtagtaggaggttcaactcgcgacaaactgtgagctgaatttcagggggaaaatgtaccaaattgtttgtttttgtttataactagagagcttaaagatcttatctcaatttgccccctgggaagcacctatctaagacaaggaacaggagcccttctggggaaggttaaagaccagggtgaagggccccatcaggtctggccttaatcatacctttgtagcagcttggaagacagtgctggtttctacaacactctccccgaaaaaaggatcagcatacaaaccacacatttctaccgtctagaacatgcacattcatttgtgtaaacattgatctctttagcctagtttgactaaattcgtggccctgagttacctacttcagtactgaagaaagcacctgggatgtagacaatttcagaggtgagtaacccccacatgtgaagacagtagcctctgaaggaattccagggcataagattactgaatgtaatgttctgtggaatgtaacagtattcattaccatcaagaatttaaggaagaatttcaattgtaactgcagatggcaaccctatataaatcttttccctttccaatgccgcactgaaaaatgcaaccatcatagtcttcaacttgatgattgaagtctaggattacacctatgttttagcccaactattttagtagagctctcagaaaataaagcagctgactcacctcttcctggcaaaagtgtttggattatgcctccccaaacacacgtgtgctggcacgcatacacatacataaaccctctgaataaatagcttctattctgacgctgccattcctgccctgtggggccacaacaagctttgacatactaagtgaagaacagaaaatccaatccttactgtctagcaaccttcatcctcatctaccacccattctagtgcactctggctctagtcaccgtggtgagtggctgttacacaaacttgtacctacactcctctaggcctttcctgttgctgttacttcaggttagaatactactataaacccttcccatttattcatcacttagagctcaactccttcttgaggctttattggaaactgcccgcaatttaacataccccagactaagctgtaattcaatacttacctctgtgtttgtatcacatgttaattcaccctccatcagagcacctattttcatctattttatgagtcatgtttaataaataaggttaaagatcagatggtgtgagagaaagtaatatgcttgagactgacagacctgagtggtctctttcatttattgctgcttgactttggacaggtacatttacctccatgacccagtttcctcatctgtaaaatgaggatcattaagagtagctatctaagagctagcattatatgaataagtatgaggaaaatgaaagcaccagaaagagtgcctgcacatagtcagtgctccataagtgttatctctcattattattaccattgtttgaacataccccagaatgtaagctccacacaaaaagggaaaaatcactatgtttgtattctgatgtacagcactgtgcctggcatgtggcatgtggtcagtaaatatctgttgagtgaatggaagctttaacgagtctgtgaaataattctaatcgttagcgccctcctcctcctcctcccttcctccaccttctgctcctcctcctcctctctgaatcctctaccgcctgatagcatggtgctttaagccccacagaaaaacttcaagtggagggagcatcactgaacggctcctcatcccttgacccttttgctatatctgttactccatttctcgaattctcttctctaacaagttcgaattcagcagcaaccacttcaaccagcctagcctgcccttcagaggtgagggggcaggaatgagagacaaagcatggaagacgaggagtggggcgtggccaccacaatgcaaagactgactgcgcctgcgtaggctgcggcaaaataacgctctgaggcttgcagtcgttgctggccagcacttgtgtagaaagatcgctcttcacaccagatttcacttttgatccttccagctccagggtctcgggcttcagctttgtgccgaggcaccaacactgctgcggtcctctctccgactgatcgctgatctcaccgttcccgctcctgtctcctggaaccatgtctctggtaagc

SEQ ID NO: 44095 - DNA, 2300 bp, Homo sapien
gtgtttatcgatgaataaatggataaacaagatgttgtatttacatacaacggattttttttttttttgagacagaatctcactctgttgcccaggctggagtgcagtggcgcgatctcggctcagtgcaacctctgccttccaggttcaagcaattatcctgtctcaacctcccaagtagctgggattacaggcacccgccaccatgcctggctaatttttttgtatttttagtacagacaggctttcaccgtgttagccaggctggtttcatactcctgatctcaagtgatccgcctacttcagcctcccaaagtgttaggattacaggcatgagtcaccgcacccggcgttaatggaatattattcagctttaaaaatgtaggaaatccggtcatatgctacaacgtggatgaaagttgaggacattattcagtccccaaaagaaaaatactgtataactccagttataagcagtgtctaacatagttaaattcatagaaacagaaaatagaatggtggctaccaggggccaaaaggagaggaaagtggagaatcgttctttaatgcatacagagtttcagttttgcaagatgaaaaagttctggagatctgtcacacaacaatgtaaatatacttaacactacctaagtgtacacttaaaaatgattaaaatggtaaatttttatattatctgatctttaccccgatttttttttttaaagtccctagacctcatgtttctttctagctgcacctgttttggaagaactttccatgatcactaacatctcttctttatctcccactccctcttcaacccactaccatctgacttctgcccttgttcaggttgtcaatgaccattccactaaacctgctcttgctaaggttgtcaacctccctatatttttatgcttagtatactcaactgagagtactggggtctgctcaccacttatttctagaagctcttacatcctttggtttctgtgaggctctgccttgttctttgacagacaatcgacaactttttttttttgctgccttttttccttcataaatgcttgacctgctgctttttatgtctttacagtactttagagatttcttatgaaagctcaactaaacctgaagtaccaactatcaaatttatctctgatcagaactccctctgcctggtcaattctatctgaatgacccataggctcttataacttaacttctcaaattaaactcatcatttctcctctgtgttcccttgctcaacgatatttatgcccaaatcctattctgaaatctgggagtcatactagaatccaaattcccctttatcctctacatgaaattagtcaaaaagttctattgattctaagccccattaattctcaaaattcatctcaactgccactgctttagtttagattttcatcacccactgccttcaaactggtgtctctgtctccaattttgtcttcctcaaattaatcttctatgttgtgttagagtgatcataaaagttaaatctgaccatgaagctggcctacttaaaaatcttcagtagcttactgttgctctaagggtaaactctctactctttaacattcagcataccaaaggccctgtgctccctcaaatgattatagatgactccactttggattcagctatactgcttttgtaattcccagcaaggtgccactaatggctttgtttgtgctattccctctgcctggactgtctttccctgtctgcttggctaagctccccttcatgattcagcttaggtatcccccattcatgctcccacatcatccgatgctatgctgtgagcactactgtatccggtccctcactatatctagttgttccaaggcagggactaaattcttcattcctgcactctgcgccctagcaccatgcattttcgtgaatcactccctggtttggggtactggtgtgtatgtgtatgcgcatgtgcgtatatgcgcatatgaatggagagtaaatttgaatttttgctgggcacacggcgcagtgaagacaagaaaggggcactattttaacacaaccttttcccgtgatcaccaccgaaaattactgacgagtcaatcacctcagatctctcaagcagtccagcctacgcaacagtactccacctctgcgcctgtgcggggagggtaaggcggggccagcaacttcctcagctggagggagagcgcacggtggagccgccagttgagaaggactctgatccggctcagctttccaatcagctgcggaaggagccacgctttcgg

SEQ ID NO: 44096 - DNA, 2300 bp, Homo sapien
tttagttatttaacattcatttagttttcagctctgttatactagaacaaattatataataaaagttattttagctaaatatttgcacatatatcttattatttctttagaatatatttctagaggtaaaaatttttagtttataggtttgaacaacttcagggtctttaaaaatcactgtaccctaggttaggaatatctgttgctaaagcttagaaatatcttaggtttttttgtgcctcccattctgaataggccccaggcataaaaactgcattggacttcacagaaccgaaactggttattcatataagggattgcttctccaattggagacagagatggtgacacattgtgactgtagccagttattttccctttcctaaagacgtattaaaaaaaagtattggaaccaacccaaatgcccatcaatgacagactggataaagaaaacatggcacatatacaccatggaatactatgcaataaaaaaggatgagttcatgtcctttgcaggggcatggatgaagctggaaaccatcattctcagaaaattaacacaagaacaggaaaccaaacaccacacgttctcactcataagtgggaattgaacaattacaacacatggacacagggaggggaacatcacacaccagggcctgtcaagaggtggggagataggggagggatagcattaggagaaatacctaatgtagatgatgggttgatgggtgcagcaaaccaccatggcacgtgtatacctaggtaacaaatctgcacattctgcacatgtaccccaaaacttaaagtataaaaaaaaagaaaaaaagacaaaagtatactcccagatttttgagaagatataaagaaagacaacatataataaatgtttgcagcaagatataaacatatcaatagagggtcaatagtggtaagctgaattgtagtggttgtgtgagtgtcagaaagttagtgttttccctctatctctcttcctctctctctctcccctacttctaaaaacagcctgcccgtcctcttcagtgttttctttcttactcactgctgccgtgctactctcagttggaatgattttctcatccttgtccttttggtaaatatctacccactcatctttttaaacatctcctcttttatgaagccttttctgcatctacaggtagaactgaccctgccatcccctgcattctttacaaacttctagaaaatttagctttactttttctctgactcccatttttacatcgggtgctccttgatgacaaagagattaactgtaacttcgggatagatgaccagtgtttgttgagtgaatgaataaagggatcagggttggatctgctcaaaagtgctagagtaatagagcaaaacagagcaggtaacacatcccttaacactcggtatctcaactgactttcacaaaagctctattaaatgagcaggtgattgtggagtgaaagaattaaacaaattttcaagagttttagtggctttcccactaaagcctgggtgactgggaaagtttgggctgggaatgttgggcttttcaagcgtgttcgaagctccctaattggtactaaatttcaggcattcagaccctctaggaaagagttctttctagctcacaacattaggggaggagttagacacataaatggagaaagtgatagaagagacatggtcagggatgggggttctacccttccagagacaatgcacattttctttgaaacagcttcgggaaaactgcaaatctcaatgatatttaccaattttgagaatctattaagtgcctggcactctgtgtagaagccctccaatcgtaccctaaatctgagaagtatttattattatttccatttttactccctaatgcatctactctaagctccttgcttcaccctaccaaagtttcccttctgctagtgctctcctttggtgcagaaccaccgcatccactttctcaggcccaggggaggggcggggcggggcgatttcgccttgccgcagagccagtctgcgcctgcgcggactgcggcagagggcggggtgtgagaagcagagtacagtgagactagcattcactgctggccagtgcctgcctttttcaccacctctaatttcagcttcagcagttgcttggaactttggttctggcagcagcagcaacatcattaccgctagcggcagttttgtgccgaggcacctacacacctcccgtcctctctgccagatcgcgggcctgtcggtgtctgctcctacacgccaacgccggtggg

SEQ ID NO: 44097 - DNA, 2300 bp, Homo sapien
actgagaggccttctaaagaaatttgctcaactctcttactgtcaaatgatgaaactgaggatcaggatatcatgatgtcagagagtttattagtaaaagtgtctgggtagaacataggcctcctgattcccaattcagtgtttattttattgtactttgctactcttccagcaaaagtgaagtctgcctctctcaatattagaactggagtttttcaggaaagcctattgaaatgcaaaatccctaaaatccaaatgacatagcaagtcgaaaatttcacacttagggcacccttttctgtgtgtgttttatgtattgctggaacaggctacagagatgcaggtgaaagacccaaagtttggtaataaaagaatatctccagacagagatttcccatcatcaatcccagctgaatatccttctttcttatcccctgagaataaggctgttccaaacatatgattttcattctctgcaaagtccgaagcagctgcttgtttgctgtggattatgactccaggtgttaagctcaatcaatttcaaaggccataaattttttaggccagaattcatggaacagtgtttattccagttcaatcttctgtgtgaccattgcaaaacacaacctttttttttttgggataaatagaagaccaggaattatcttacttctttcatctcctcctgctaaagcataggtgagtagttatctatctttcttctacagctgtcactctcttgactattcaagatttgaaggtaaatggagccatctcataaaagccttagaagagagaaaactttatctcaagagtttctcactgtggtgatcctttttaaacattgataaacactgaataataggctgcttgtgaaaaattgaaatactttggcttcatcctaaatattctgatttagtcaatcagggaatggagtcagaaatcattgttcataagtatcatctgtgattctattatgcatccaagtttaaaaactactggtctatggtttgcatgttgaggagtatgctgcagaaattctgaaggtattgtgattagagttatgatagacattgatgcatatatgttggatttgggaatgtcttctctaaattcactgttaaatatctcagctgctttcacttgacttgatctgcactggattgcccctcattggctcagccaggacaatcagttgggctcagcatgggtaggtgcaagcagtaggttgccaatatctctaacgtgccacttatttccatctgtaccagggatatataaagattgattcagcattgaagaaaacttgctgaccccgttttatacctaaagtaatcaaatcttgcaggaggaagatgagagaagtctgaaatattgagttttacctgtttcctctaaggctgttatgcagatagatgcaaatatatgtgtagacatgatagaataatactttccattaattcagagtgaagccgaaaagcctccaagctggattgtttctcatactttaatgtgcatatatatcatcgggggatctaagtccccatgccagatctgctaaaagataatctgcaatttaactaagatatccaggtctgaaccagtggttcttaaagtgtggtcccaagaacagcattagcatcacctgagtacatgtcaaaaactcactttcttggggtcccacctcagaacttatgaatgaaaaactctggagatgaagcccagaaatccgtgttttaagaatccatccaggggattctgatgtctactcaaatgtgagaactgctctatgccattcctcgccttcagacaagattggcttccactcagccatagaagactgcagtaggagatgggcagggtttcagagattccagtattcattcaagaaagctctccctctttttttactgaaaacctttatgctgctttctctgcacccagagccctcattctcattggcaacccttttcaaatcttctttgctacaggaaaaccttcacagagatttggcaaggacttcttaaaatcccctatagagtgcctattttctgagactcagtgtcttagtcataatcatctgtaaggaatgtagctgtggtgcagccaggcaggcataggctgaagtaaacatcttgcatgactcagcaggatcggagcacaggtgcacaattccatgcattatataatcaacagctatgtagccataacatgggaggctcatcatctggctctaagccactattgtttgtgaagcgtataaatgcaatactgacattgaaagagctgctgaataaagc

SEQ ID NO: 44098 - DNA, 2300 bp, Homo sapien
aggaccatgtgagtggtacaaagaagtcctgaaggagttcagaggagggcaagaaccctgcgggaggtatggttgaattgggtcctgaaaatgagtaggaatcagagaaagatgtgacaagatgttcttatcacatctcttatgccttctaaagcagaaatcctttgaaattgacccaatatacatctttcatttactgtaggagcctgacctccaaccagattgcgttcagactagggtagctgtattgagatggttttgaacctgagtgaccagaatgacctgaacttctcaaaccagtgcaacttgtgtagaaccaagatagaactagaatgatatctagaagcatgaatcatcctcatcaggtcctgcttttaccctgtcaatcgaccctatcacaacctgaaactcaatagtggctcttctcttgctttcaggatggccaagaaaatgtattttgtgctcaaggtctttaacagtctgacccaaaccttcacttccagctgttctttattcttagagactccctctctccacacaagctaaatctcttccttatcccttggagaccatgggaaatgacttgaagttattcaaggtcttggaggaccttggcacacatctccttcctccctttgaggatttgggattctctgtgaggtctcttaactctctgtcatatatctactatccccattacattcttacttaagcagagtcctgttgaaaactgctattttgttgctttagatctgtggtcagcaaacttactctggaaagggccacatagtaaaatactttgggctttgagagccataatgtctactaccactcaactactactactaaactctgctgtggtagcaagaaagcagccatagataatatgtaaatgaatgagcatggctgtattccaacaaaactttattcatggactgaaatttcaatttcataaaattttttatgtcacaaaatgttattctttttttattttttcaactatttaaaaatgtaaaaaccattcttagctcatgttctctacaaaaataggcagtgagttgggtatggcctgtaagccctagtttgccaacccctgctctagaagacaggattcagacttctgggtgaaatccatagggaagaaatttggggctcacaatttttaaaaatgactagagttataggaaaatggaataggttgtccaggaactactacttttttccaactactactttttcacgtaaagtattcaagcaccactggttagggatgtcataggaggactcagaagtcttatgtagaactgggcttgatgttttctaagtttataggactgtacttttgtcaaagtgttgcttcttccacatagccatcattcgccaattactttactgtctcccttttattttcgaaggtctgtgaatttgtcttccacttctccccacctagcatttgatgtcatcatctcactttgttccccacttttttcatttatgtacatcttatttcccttccagtaacccaggggttaatgtcaaaagggcaaggttcatccagcagctgccgcactgttgcctagcaaccattaggggcagctgagaattactgcacaagcctttgtgggaacatggtctgacccaaccatcagaggggagagtaaagaacaaatgataataataatatatataaacacgctttattaaatataaaagcaggatttgattctgtcttacagaacaccatattcttgtttacttctcctataaagaatttatgtttgctttaagaaatttcagcttctttttgctcccctctctttcacagtggtttagtcctgctacttagaacagcatcccttagtcatcaatcctccacaggggtctgactctgtcttacacactactagaccctttacgatctcactcttcctcttcttttccttccctctcccagagtggtttgatggctccttatcgacaagcatccccattcagctccatatgcatctcagtggtttgatcctgtctggcgagcatcagcatctttcctcctcctgtctcacaccagtgatttgatcctgcgttattgagcatcagtttattttagtccttcccccggggtccacagtagtttgatcctacctctcggactattaggtcctttcttatcccccctccagcaccaccaccacaaatggtatgatccttagcatcaggtcctttttgtcccctccttgctggtcttctaagcagattgaagcagcttcatctcattcctggttcatcctgattccctcagt

SEQ ID NO: 44099 - DNA, 2300 bp, Homo sapien
cacctggtcatgtgtacaggggtcttagtgcttgggtcacaccatagattatctaggaattgacaacttatggcccacaggttgaattttgtctaagtccttgttttgtaatgcctatgagctaagaatggttatttacacttttagtagaattttaggaggtggaggaggaggagtagaatgggtggaggaagacaaggcagcagcagtgatgagagacacataatggcccacaaagctcatatatttaccatactgccctttgcagaaaatatttgctgaccccctggatcagcaaactgatcagcaaattggatcaataaactgatgccaagggaaccctcaaactacagaatatcagaactaaaaggagctagagaaccaagttgagaatcaaactgcattccttggtgtcatggggttctagaactgattcagaggatgactctgaggtggcctgagcttccacaccctcccccatctactcaatctgcttttccaaccagagaaactaaatgaatttcatttttaatgggtttctccacttttaaaaatattgaaagtcactggcagaaagcaaagtccctcactttatagatgtgaaaactgaggaccaaagaagataaaggtcagattcaaggtggcatatcaactcagagccagagccaggagaggaacctagatgtgctgactccccagtcagtgctctttacacatcaatatcccacaaataaagtaggacataaccatagcaatggcagttctataccattcgcataggatttgtctgagaagttttgcagaactctcttttctctatacacttagtccctaatttatctcatctgttctgacagcataaaaggccgtctatttgccaaacactcaaaaattatatctccagccaaaactgtttccagattctagattcatatatgcaatttccgattcaatatttccatttagatgttgaatagacttcaattcaacatgtccaaaactaaactcctgatcccttccaccttccaaaaagagcacctgctccacccacagggaagaaacaccaataacttggaggccatttgaaccaacccaaagaataaaagttgttggtaagtacaatgacaatgagaggttgactatatggtataagctaagttctttttttttcttttttttagttatactttaagttttagggtacatgtgcacaatgtgcaggttagttacacatgtatacacgtgccatgttgctgtgctgcacccattaactcgtcatttaacattaggtatatctcctgatgctatccctcccccctccccccaccccacaacaggccccggtgtgtcatgttccccttcctgtgtccatgtgttctcatcgttcaattcccacctatgagtaagaacatgcagtgcttggttttttgtccttgtgatagtttgctgagaatgatggtttccagcttcatccatgtccctacaaaggacatgaactcatccttttttatggctgtatagtattccatggtgaatatgtgccacattttcttaatccagtctatcattgttggacatttgggttggttccaagtctttgctattgtgaatagtgccgcaataaacataactgtgcgtgtgtctttatagcagcatgatttataatcctttggatatatacccactgggtcaaattcctcagggttccaaaactagaagctaagttattttccaaaaaagaagccggcctttagttgtctcctttctccaccagagcattctgggagagcacaaaatcaattaattccaaacagcatgaaataaaagcaaatgcaaaagtggtttgtgagatgttttgctccttttaaagtaactatggtcgcccggccaccccgtctgggaagtgaggagtgcctctgcctggccgccccatctgggatgtgaggagtgcctctgcccggccgccacgctgtctgggaaatgaggagcgcctctgcctggctgctgttcaatcttccaagtgtgaattgacagcctttctgcaggtgtacccaacagttccgaagagacagcgaccatcgagaaagggccatgaagacgatggctgttttgtcaaaaagaaaagggggaaatttggggaaaagaaagagagatcagattgttactgtgtctgtgtagaaagaagtagacataggagactccattttgttctgtactaagaaaaattcttctgccttgggatactgttaatctataaccttacccccaaccccatgctctctgaaacatgtgctgtgtca

SEQ ID NO: 44100 - DNA, 2300 bp, Homo sapien
cacttgaggctcaccctcccccaaccaaaccccaaacacaaaacactttggtaaatttgggagaccaaagtgcaggacttcacattgattctaattaagcatagtttgctggagccactccatttttccatcctcttgaaatctctttggatattgattgtgtcatccctctcagctgtacgtcttctagaactaggataagcggtcctcatatgttctcttacaagtcatttattgaaatatcaaatggagcagaaccaaatgcaaaacgttgtgcagtgcagctgaagatttggttgcattaaatcagtgtctgattaacccttacttggcactgggtattttctcttcccctcctaccgtcttgtctcaatctcatttcccgagactcctttctttgtactgtaaaatttaatagcaaccagactgagaataaaacttggaggatttcagtgtgagaggccaaaggccaaaccctgagtgttctatagaattgcagcagaataaccttacatccttccaaaagatctgggtgggttgtggaagcacatgcccccaaagctgccatacctgaacagcagcccaccaacttgagtcactggggttcctcaggagacttcccagtagagttttaacctgattttaaaattagccgcttaaaattcttgatcttggaaaatcagctctactccctatatagattacatagaatattattacccttaagaattgcatttttgggccaggcacagtggtgcatgcctgtaatcccaacactttgggaggccaaggtgtgcagattgcttgagcccaggagtttgagaacagccttagcaacatggtgaaaccttgtctctagaaaaaataaaaaattagctgggtgtggtgatgcgtgcatgtagtcccagctacgagggaggctgaggtgggatgaccacctgagcctggggaggttgaggctgcagtgagccatgatcacaccactgcactccaacctgggtgccaaagtgagatcctgtctcaaaaaacaaacaaacaaaaaaacagaattgcaattttggataagaaagacagccagatatgagctcatttcataccttggatgacttaaacaagtttttggtctgtatgttgagaaatgtgattacaggcaggaatatcaaagaggaatctagttgactattatgtctgtatctagataatagacgtactatcttgggacaaaattgtagtcttcagtaccaccaggatttcagttctgggtcctttttctcacttaggactgctgctgggtaaatgaaagcattttcaaatcttcacctctaatattgtccgctaggaggacatttctgaatttcttctctttggccttaaagttacaacatctcaaatcagtattgagtccaataccacctgccaactctttgctgtggataaacttaaaattctcaaaagagaatgataggcttgtcagcttggggctgtactagctgagaatgctttttaggagaaagctctcatgtggccaagttttgcctcctgccataagcagggggaacaaacagtgagtggcctgtgtgacctttgttagagtcagctacaggcagttgacggcctcatgtggctttaaggacatgggggctgacagggcacaaaacaagttcagcctagaggacagcaaggtaatgctgcgtgctctaaggaagagggaggttacagggaaagatacagaaacctgtccttcttgcatttagaaaacttcccgtttcttgaatttgagagcaatagcaccttgcaattatggagcttttgtagccaaagccttctcatggtctcttcctcataatatgcctaagagtgttgagtagaagcagagatggtgtcccccgttttacatatggaaaaactgaggcccaaagagactaagtaccttctctgaggttccattcttgccgcaaaagatggtttcatcaggcattttatcaaaggcacacagggctggcctccagttggggacaaatgactggtagctcatgtcacctgaacagctttctcttagtttgatgctggtaatgggaatagtgttcactttttgccctaggaatcctggagtttatcagcctggctgtggggctgatcagcatccggggagtggactctggcctgtacctaggaatgaatgagcgaggagaactctatgggtcggtaagtttaaggttttttttttttttttttttttttttttttggtcagaggttattacaaccagtgtttggacaatgtaaagcaaaagtataaaa

SEQ ID NO: 44101 - DNA, 2300 bp, Homo sapien
ttttccgcttggcagatggaaaactgaaagtatctctgattggttgcagaaagcagatgtttgtatagcagtgtaactttgtaacttcactttagcctctgattggttgctgtccacaaccaattagatgcttgcatagggtgtgacccttgtaacttcactttagcctctgattgcgggccactactttatttacatagggtgtacaccaagtaaccaatggaaaacctctagagagtatttaaatcccagaaaattctgtaatgggggtcttgagcccctgtgctctggcagctcctgcagtcttgtggagtgtactttcattttcaacgtgtctctgcttttgttgcttcattctttccttgctttgtgcattttgtccaattccttgttcgaaacgccaataacctggtaacatgttgactatttactatttttctcatagtgaagtcagttgaacagcaagcacatttctgtgctgccttgtgatggagtacatcattcaaattcactgcatttaccaaggagaaaaaaatgactcctgtaaattgtatgttgaaatgatatttaatgtgtacaagacaaaatcagtatagcaggtacagaggtctggtttctataattgccaactgaactcaaacatttgaaagatataattgcaatgtgtacaggcgtctgttgattaaaaagttgcctgaggccaggcgcggtggctcacccctgtaactccagcactttgggaggtcgaggttggaggatggcttgagcttagatgtttgagaccagcctgggcaacagacagacctacctcatctataccaatacataaatacataattagctgggcttgatggcacgcgcctgcagtcccagctgcttgagaggctgaggtgggaggattgcttgagcctaggaggtcgaggctgcagtgaactgcgtcacgccactgcactccagcctgggtgacagagctagaccctgtctcaggaaaaaaaaaaaaaaaaagttgcctgagcctatcagattttcaaagtgtttcattcaaaaaaggctcccctcttgctatcccagtagaaagcagcaaccctgtcacctaaccccgacaggagctcttgcatatttcaagaaaaataaatagaatgaactaaagcatgcatggcagaataaatttggaaataaatttcgaagcgattagattttagaggacttgtttgtgattagcagagattaccaatgtaaaatcaaattatagatcataaaagcgggaaaggcatttacagatcatccagccaagcttcctctgtaatgagaaggaagcagatctaaattgattggtttgtgagctaaacatcacatcaaattggggaaatggcccgtgtgtgtgtgtgtgtgtgtgtgtgtgtgtgtgtgtattctaagagacactttattcaatatggaaagaattttatgcagcgttcaagttggtcttatgtcgtctgcacacatatacatatatataagtatattatacacatatacatttccaagcatgttggtgtgccaaatattatgtataaaacatctaggaaagcaaataacttgatgatagcctagcatataggaaagaaaatacttacataggatggccatacagattagtggttaagagtgtctggtgaatctcggctccactactgtgggactttgtgtcttggtttcctcatctggaaaatgtaggtttgtctacctcagagagtgtaaagattaaatgagataacccggataaaggattagtgtagtgccgagcatatagtaaactctcaataaatgtaggttgctgttattacttcgttaatatgtcaaagaaaaaagaggttggaccaaaagagcattttcaaaataaagtcaaactatgtcactagcactttcaggtcaattgggactaaattggaccccctgcgaaaaggtggaggggatcaaatgacgtcgaccgccttagcaacaggcccccaaagaaggtgaatttccgtagccaataagactctgtgctttggaggaggtagccaatggctgacggaaagagaaagagggaggacgcgccaattctcctgcctgagcctcggcccaacaaaatggcggcggcagcggtgtcgctttgtttccgcggctcctgcggcggtggcagtggtagcggcctttgagctgtggggaggttccagcagcagctacagtgacgactaagactccagtgcatttctatcgtaaccgggcgcgggggagcgcagatcggcgcccagcaatcacagaagccgacaagg

SEQ ID NO: 44102 - DNA, 2300 bp, Homo sapien
agaatactaattgagatgtgaaggtaattttgctgggacttctgttaattatttgatcagcagagttgattcaatagcagtgtcatgtgcctgtagtcccagctactcagaaggctaagacagaatgatcacttgagcgtgggagtcccagaccagactgggcaacacagtgagaccccatctctaaaaaaatgaaaaaataaaattattaattagtgtctctattcaggagatattttaacttgaggttattctatttccttttgtcataagactaacgggtctctcagtgtttctcactttttgttattgatacccaaagattatcatgtacgtaccaaaatgctcttttatctgttaaaaccaacatactgcttattgattaaaagtaaatcctacttttctttcagagactaatagattggaatatatttttgtttcagctttctgatgagttaaaaaggtcccagagatatatagacactggagtactggaaattgaaaaacgaaaatcgtgtgtgtttgaaaagaagaatgcaacttgtatattttgtattacctctttttttcaagtgatttaaatagttaatcatttaaccaaagaagatgtgtagtgccttaacaagcaatcctctgtcaaaatctgaggtatttgaaaataattatcctcttaaccttctcttcccagtgaactttatggaacatttaatttagtacaattaagtatattataaaaattgtaaaactactactttgttttagttagaacaaagctcaaaactactttagttaacttggtcatctgattttatattgccttatccaaagatggggaaagtaagtcctgaccaggtgttcccacatatgcctgttacagataactacattaggaattcattcttagcttcttcatctttgtgtggatgtgtatactttacgcatctttccttttgagtagagaaattatgtgtgtcatgtggtcttctgaaaatggaacaccattcttcagagcacacgtctagccctcagcaagacagttgtttctcctcctccttgcatatttcctactgaaatacagtgctgtctatgattgtttttgttttgttgtttttttgagacggtctcgctgtgtcacacaggctggagtgcagtggcgtgagctcggctgactgcaaactctgcctcccaggtttaagcgattctcctgtcacagcttcccaagtagctgggatttacaggtgtgcaccgccatgccaggctaatttttgtgtttttagtagagacagggtttcgccaagttgtccaggctggtcttgaactcctgggctcaagtgatccgcccgcctcagtctcccaaagtgcgaggatgacatgtgtgagctaccacaccagcaatgtctatgcttctcgatagctgtgaacatgaaaagacatctattgggagtccgaggcaggtggattgcttgaggccaggagttagagaccagcctggccaacaaggcaaaaccccgtctctactaaaaatatgaaaattagctgggcttggtggctcatgcctataatcctagctacttgggaggctgaggcacgagacttgcttaatacctgggaggcggagattgcagtgagccgagatcacgctactgcgctccagcctgagtgatagagtgagactctgtctcaaaaaaaagtatctctaaatacaggattataatttctgcttgagtatggtgttaactaccttgtatttagaaagatttcagattcattccatctccttagttttcttttaaggtgacccatctgtgataaaaatatagcttagtgctaaaatcagtgtaacttatacatggcctaaaatgtttctacaaattagagtttgtcacttattccatttgtacctaagagaaaaataggctcagttagaaaaggactccctggccaggcgcagtgacttacgcctgtaatctcagcactttgggaggccaaggcaggcagatcacgaggtcaggagttcgagaccatcctggccaacatggtgaaaccccgtctctactaaaaatataaaaattagctgggtgtggtggcaggagcctgtaatcccagctacacaggaggctgaggcacgagaatcacttgaactcaggagatggaggtttcagtgagccaagatcacaccactgcactccagcctggcaacagagcgagactccatctcaaaaaaaaaaaaaaaagtaagaaagaaaaggactcccttagaatgggaaagaaaaatcataaaatattgagctgatgcctgt

SEQ ID NO: 44103 - DNA, 2300 bp, Homo sapien
ctatgagaccaaatttaatattaactcaaatttttctacactcattcaacaaataaaaattaaacaacagcaacatgaattatactgtagttgtggtgctgttgggatgagaattgtaaaatagataacctacccttatcatctggttaaggaaatgagttacacatatgaaaatttagatggcaatataaggcaatttgtgattaagtaccagatcaactgtacatataataaatactgtaaaatttcaggaaagaaggttaataggagtgatttggattggcctgatggaggaaataagacttgtgctagggctagacaaatggataagatgttgatacaggcaggatattctggttagaagcatgatgtacacaagggtacagggataggagtaaataaaatattgggactaaaggttactgtttgagattgattagtagtaagactagataaaaactagatgtattatttgaagctatgtgataaagaaccttcaataactagtgaaagagattagagaatgtattctgaaggtaataagaaagcaacagtgatttctgagaagtgtttcaggaaagtagtaatttaggaagatggatgtatattgcagtgtaaggattggaggagggccgggcacggtggctcacacctgtaatcccagcactttgggaggctgaggcaggcggatcacctgaggacaggatttcaagaccagcctggccaacatggtgaaaccctgtctctactaaaaatacaaaaattagctgggcatgatggtgggcacctgtaatcccagctacttaggaggctgaggcaggagaattgcttgagactgggaggcagaggttgcagtgagccaagatggagccactgcactccagcctgggccacagagcgagactgtctcaaaaaaaaagaaggattgaaggaggagaaaccagagtcagtatttttaaatatcctactattagataacaaaaatctgaccttagatgatagcaataaaaataggaggatatggagtgaaacttttatcgcaaatgagaattgacagatcatgagaactgaaagcatatgggagatatggaaaaattcaaagatgacttgaggtttcaataatttttttttgagatggagtcttgctgtgtcgcccaggctggagtgcagtggtgtgatctcggctcactgcaatctccgcctcccggattcaagccattctcttgcctcagcctcccgagtagctgagactacaggtgcctgccaccatgcccggttaatttttgtatttttggtagagatagggtttcaccatattggccaggctggtctcgaactcctgaccttgtgatccgcctgcctcagcctcccaacgtgctgggattacaggcatgagccactgcacctggcctaatttttgtatttttaatagagacagggttttgccatgttggccaggcttgtcttgagctcctgacctcaggtgatccacccacctcagcctcccaaagtgctgggattacaggtatgagctggcctcaattaatttcaattcctagactcttcttatctttcatcctaataatttatctgattgtgttatttaccaagtagcttttgcactttagatttttaaaaatgaattaatattgtatttctgctttctttagggaatacacttctgtcttgtctttgaactcttagaagtaatttagggtatggaaagttattgtagaggcgattagctatatatttccaatgattgttgaaagagttttgggataagaaacaggcacaaagtatgaagcggagtcaggtaattactacttctcatgaaatccctaacttgggataaggcttctcttatgccaaaacaagatttgtcttaaccctgtcagcagagtctgacctacttgtcagtgttttttattatttctcccattggaaaacctgctattgcttgcttggacctgttttactgatgataaacgagattgctttcaaaaattgttttatatgttatctttacgaatctcattgcatccaggcaagctgatgaagaattccagatcctggcaaactcctggcgatactccagtgcattcaccaacaggatattttttgccatggtggattttgatgaaggctctgatgtatttcagatggtaagatctttggtttattctgctatataaaaataggtaaaatatagtgaaagtggaatatatttttttcagtggctataagacattaaatgggattgctcttatgtaagatctagagtagcaaactaaaagtta

SEQ ID NO: 44104 - DNA, 2300 bp, Homo sapien
tttttttagatattgccaaattatagatgttgtaacgttttgccttcccaccagcaacgtattaatataaagggtgcctgactccccacagccttgctaatagcatgtagtgtcaagcttttggatttttgccaatatgataggtaagatatcccttttaaactttaaaatttttatttttaaaacatacacatagtaaaattcactttttggtgtacagttctatgcgttttgacaaatgcatacaattgtgtcaccaccaccacaattaaggacagaatagctctagcatcataaaaacacccttgtttgacctctttgtgatcaacccttttccctacccctagcccctggcagccactaatctgttctctgtaccaatgagtttgccttttccagaatgtcatatatagattgaatcatacagtatgtctcagtgtacttttattttgcattttttcttttttctttcctttttttttttttttgagattgagtttcgctcttgttgcccaggctggagtgtgataacacgatttcagctcactgcaaactccgcctccagggttgaagcgattcttctgcctcagactcccatgtagctgggattacaggcctgcgccaccacaccgggctaatttttaaatttttagtagagacgggggttttgccatgttggtcaggctggtcttgaactcctgacctcaggtgatccacccacttcgacttcccaaagtgctgagattacaggcatgagccatcgcacccggcctgcattttcttaatataagtttccataaatgatttaactttttttcacatctgtatttcacatctcttcacttcggaaccagctatttttctttccatcccatctccttgtctctccaacatactgaaattaatttcctggtttttttatccagtagcgcctaaaataatagtcatataatattttccacaccatcaaaataaatccaaattgtaggcagattgattttatcttgttggtgttttccttctttacaaccttacttttgtacccatcccccaaacaaaataatgaataaaaagaaggaatttgctgtctataacctgcaattaaagtccttgttggtgctttaaatattaagtcaaggagtttaactgaaaaaacaaacaaaaaaagccggccgggcttggtggctcacgcctgtaatcccagaactttgggaggccgaggcgggcggatcacctgaggtcaggagttcgagaccagcctgcccaacatggcgaaaccccgtctctactaaaatacaaaaaattagccaggcgtgatggcgggcgcctgtaatcccagctactcgggaggctgaggcaggagaatcgcttgaacccgggaggcgtaggttgcagtgagccgagatggcgccactgcacgccagcctgggctacaagagcgaaattccatctcaaaaaaagccataaataaacaaaaactttaaaaaataatctttgatgtcctcttttttcagcgctcctggcagtttctaggacacaataggtattcaacaagctcttgttcatatttacctttaaaaatttccctcagtggtattaggtatatttttgctttcctacttttattttttcactttgaagtactttggaggcaggataacggactaaatagctcttatccctcacgcggctaggtcccatttttctagaatattacatgaaggcggcgaatttcaaggacttctaaatgagtctttgaaagattctgttctagcaacttcaagccattttggactccgaaaactccgcaatatttcacaactgcgcatgcgtgcttggaaagcgtcagcgcgctagatgtttacgtatcgagaaaggggcgggtcattatctttagcggaccaatgaaaacgctccagattatcttttttctattggccgaccggggccaattagaaatcaaccttcttttagcgggcgtgtagcgccagcgcgctgtgacgtaatgtgaggggtctcccggcagggctgagctggaccaatgaggaaaggcaaggggccgatttgcctgttctcacgccccaccctcagacctagccggagcaaagtttcacttatagaagggagaggagcgaacatggcagcgcgttggcggttttggtgtgtctctgtgaccatggtggtggcgctgctcatcgtttgcgacgttccctcagcctctgcccaaagaaagaaggaggtgagaacgcggtttccagcagcatgggcttttcccaatgactggggcttaagagggtctg

SEQ ID NO: 44105 - DNA, 2300 bp, Homo sapien
tttaaaaataaaaattttaaagtttaaaagggatatcttacctatcatattggcaaaaatccaaaagcttgacactacatgctattagcaaggctgtggggagtcaggcaccctttatattaatacgttgctggtgggaaggcaaaacgttacaacatctataatttggcaatatctaaaaaaactacacatatatttatcctttaatccagcaatcccacttctagtaacctaccttggagagagacatccagcaatatgaaaatatgtgtgcacaaagttattcatttcagcattattgaaattgaaatattcttgaaactacctaaatattccaacataggagattgactgaatatactatagcacatatacaccacagattttgcagctgtaaaaaaggaatgaggaagacttatgtaaaatgataatggatttttatgctacatttgtataaaatagagaaataagaaaacatacaggtatttgcctatttttgcaaaaggaaacacacaagataaaccagaaagtaatgaaatcggttacctataggaattggtggaaatggaatgcaacagttaggggagggaatgacacttctctaagtacactagtctgtttagttttgacttttggaataatgttaatattttcaatagtcaaaatgtataatcaaagcatttagttttacacgatgaaaaagtcttagagatgaataatggtgatagttgcacaacaatgtgaatgccattaatgccactgaactgtatgtattttattttttttgttttgggacaggtctcaggctagagtgcagtggtgcgatcttggctcactgtaacctccgcctccccggttcaagcaagtctcatgcctcagcctcccgagtagctgggattagaagcatgtgccaccatgcccagctaattttttgtatattagtagagacggggttttgccgtgttgccatttcttttctttcttttttttcttttcttttcttttcttttttttttttgagacggagtcttgctctgtcaccaggctggagtgcagtggtggtatcttggctcactgcaacctccgactccctggttcaagcgattctgccgcctcagtctacagagtagctgggattacaggcacatgccaccacgcccagctaattgttggtatttttagtagagatggggtttcaccatgttggccaggatggtctcgatctcctgacctcgtgatccgcccacctcggcctcccaaagtgctgggattacaggcgtgagccaccgcgccaggcctaacagctttcttttctttctttctttttgagacgtagtctcgctctgtcgcccaggctggagtccagtggcacgttctcggctcactgcaacctccgcctcccgggttcaagtgattattctgcctcagcctcctgagtagctgggatgacaggcgcgcgccaccacgccggctaatttttgtatttttagtagagacggggtttcaccatcttggccaggctggtctcgaactccgacctcgtgatccgcccaccttggcctctcaaagtgctgggattacaggcgtgagccaccgcgcccggccaatagctttccaaagttattttatcacgtatttatctacatattacagaagtttttactgttcttgcaacttttctctaaacttgacgttatttgaaaactaaaagctaagccaattagtatagtagtaatagcagacaaaaaaaatgagagaagtaaaggaagttttgggggaacagaaagaagaaagagctagtgtggagatactaaaccgaagcttgtggaacttgaacgccattttgaagctagttccttagacgattcggtcgaagatctgtctctcggctgccctctatagagctctaaacctggcttcaaggagttctttcattcttcattagataccacccaccatacgtcattttataaagccggaaactacatttcccaaaaggcctttatttttcctcgcgggaaaagggattgcaattactataggttttacaggtatcgcgagatttcgtcaaatctcattacggatcccggctgaaagccattttgtttttcagctcacttcaagggtacctgaagcgaattggcaccaaagcagcagctgtattgccgcagttctagcttcaccttcacgatgtttcccttggtcaaaagcgcactaaatcgtctccaaggtgagcaaaaattatgacaaatcatttacaacaaccttatatcaatgtgtcctcgcggcctctcgtgtgc

SEQ ID NO: 44106 - DNA, 2300 bp, Homo sapien
gaggccaagagttcgagaccagcctgggcaacaaagggagactcccatctccacacacaaaaaaataaaaactagccaggtgtggtggtgtgtgcccatagttccaactacttgggaggctgaggtgcaaggatcgctttagccccggagtttaaggttacaaggacctatgatcacacttctgcactccagcctgggtgacagcaagactctcaaaaccaaacaacaacaaaatatatatatagctctctaggtttttatgttaaatattagagtgcctaagaatgtacatggttggcagaggatcttgcagctcatagtgataaactttagtatttacataaaaatactagatagctagtagattcaatgttctgcttctgaaaaagatatatttttggttttgccttttagtgaatttcttttggatgcttaacacaatgttaatatagttacaaaccaacttgctaatatttggaaacccacttaaaagctatcttcatttcatatgatgtgatttttaagattttaaatttggggctgagtttgtatcttaataattaaggctgcacacattgacaactacaaaataatgcctgggaagatgagtcctgaggctaattttatatttatgtggatgagtgtggagggggataataattctgaaatacttaatcacagacctaaaatgtagatctatgggtaattttaaatgttgcctgtcaaggcttaatagggacttgacaacagctaggatggaaattatttcaacacttaaatatgcttactttgtgccggacgctgttctaagtcttttacaaatatttacttgatatttgtattttgtgtactattttgatttctgcaacattattaggcttcatactcttctgtgggaactgggttcaaatggttccagatgaaaatacaaatagtcctgtgattagttttgttctacatcttatgacagatacttcatgaaaggaaatatgaaaaggccacatcttgctttgaaataagtgagatggagcctctccctctttttactgttaatgttcatagttttaaaaatcctagaattttgctgcttttcaaaatgttaagttggaaagcaagaataaaatgacccttttttcaaatgttttctgtaccatttattgcattgtttacattttatgcatctcatttctaaatgaactcatggtaacagagactgtaacacttttgcatcaccggaatcttctaggtgtgtaaaatgatggacgagtgaatgaataaatgggggagtggttcagagcttggaatggcgctatgaaggtggtgaagtgacgtccctaccccctcaacacacatataaaaattatgaatttataaacattttcctcttgatgtaatttttcaatggagggaagaggataaattcatagttctggcacttacatctggaattaggctacacagtctacgggaagcaagttaacacagtctaacagatgcacgtgaatttcatgctgggcgaagatgaactatgtggaagatgacttataaggagcttttatgttacatcttggcagttaacacagtctaactgatgcacgtgaatttcatgctgggcgaagatgaactatgtggaagatgacttataaggagcttttatgttacatcttggcagttaacacagtctaacagatgcacgtgaatttcatgctaggcaaagatgaactatgtggaagatgacttataaggatcttttatgttacatcttggcctgaggttaggaaactaaagatgacaaaggcactgttttagtatgggttttctggtttcgcttttgtcgtgggggcggggtgggatagtggactcgtaccctaacaaagacccactcgaggctgcgtgtcggcccgggggcagcagggggcaggagaagctggctctagaccacgcgttccttttcacgtgaccagtcgctctctttcccgtggcggccctgcttccggcaggggcatcacccggaagtgggggtagtcgagggagggaggggtaaaggcggctggccgccgcggcggggggtgggaaaagagaagcagagggaggagttgttgctgccgccgccgcagccgcagctactgtgacttctccgattgtgtgagctttgttggagcctgcgtacgtggatttatcgctgccacggtctgcgtagctccagaggtttaaccataggatagagaaaccaggtaagtcctacattggcttcccgtcgtcctttctcctggagggggtcttctgtgctgtcagtttgt

SEQ ID NO: 44107 - DNA, 2300 bp, Homo sapien
cttggttaactagaatatctcctcagtcagtatatatattttcccagcactgtgaataaaagtcagttgaatgagaaattgaaagtacctctgattggtcccttcctgcaaccaatcaggctggtggcaggccaagttttcatttgtataggagtgtaactttgtaacttcacttcagcctctgattggtcactttctgcaaccaatcagactgaccatggaccactacttcatttgcatggggtatacaccaagtggctaatgggaaacctctaccgggtatttagaccccagaaaattctgtaaccaagctcttgagctgcttgctcaggcctgctctcaccttgtggagtatacttttgaaaccgcctttgcaaaaatcataactgaggaaattatgacagtgaaagagatcagacctaacctaccctatcttccttctaacttctaaaatgtctttgttcattcctgggtataggccaaactagccttgggaaagaatttatagtgtaaactctgagacaaaattgataacagccctttccccttcttgctgggaccagtctgcctttctttgtaggtgtaacaaattagctacaagattataaattacagtttaggggccatgcagcctctggctgcaagaatctgaacctccccaaattgcttctgggaataacatcaccattgcaaatcctaagatcagtgcttgagatattttgcagaccctgcattctcatgcagcagaggacaccacccagactgataatctggctcaactagctccacgatcccacccaggaagaactcgcaagaactcacttcgaccccgtgatttaatcttcatcccgaccaactagcactccccactttccgaacccatacctgccaaattatccttaaaaactctgattccagaatgctcagggagactgatttgagtgataatgaaactctggtctcccgcacagcgctcagcgtgaattattctttcgccattgcaattcccgtcttcataaatcagctctgtctaggcagcggacaaggtgaacccattgggcggttacactttcgttttcaatacatctctgcttttattgcttcattctttctttgctttgtgcatttcgtccagttcttagttcaagacgctaagaacttggacaccctccacgggtaacaggactacaggtgcccgccaccacgtctagctaattttttgtatttttagtagagatggggttttgctatgttgctcaggctggtctcgaaccactgggctcaagcaatctgccggccttggcctcccaaagtgccgggattaaaggcgtgagccaccgcgcctggcccactaaacttctctgtgcatcagttatttcatttgcctaatgaggataacagtagtcactactgcgttttgtgagcgttggttaatatatgaaaaatgccacgtgtttgccattagcatcaatcatgccataaccagaaaaattacattgcattttttattttaaaaaaggtgggggccagagtggacctgggcctcttccaacttctgagaggtctctattactaagtaagccttaagaagcagaattccatgaagggagctaggaaaccaggattttccaaaaggaggtggcatttgcattgatcctggtagggcagcctcgaattccacggggttggggttgcgccttttccaaggcagccctgggtttgcgcagggacgcggctgctctgggcgtggttccgggaaacgcagcggcgccgaccctgggtctcgcacattcttcacgtccgttcgcagcgtcacccggatcttcgccgctacccttgtgggccccccggcgacgcttcctgctccgcccctaagtcgggaaggttccttgcggttcgcggcgtgccggacgtgacaaacggaagccgcacgtctcactagtaccctcgcagacggacagcgccagggagcaatggcagcgcgccgaccgcgatgggctgtggccaatagcggctgctcagcagggcgcgccgagagcagcggccgggaaggggcggtgcgggaggcggggtgtggggcggtagtgtgggccctgttcctgcccgcgcggtgttccgcattctgcaagcctccggagcgcacgtcggcagtcggctccctcgttgaccgaatcaccgacctctctccccagctgtatttccaaaatgtcgctttctaacaagctgacgctggacaagctggacgttaaagggaagcgggtcgttatgaggtaattctgcacgtttgcccgcgtgctctc

SEQ ID NO: 44108 - DNA, 2300 bp, Homo sapien
ttcatttgaatccttattcaaacaaaccaactgtaaaaagacacttctgagatgatcaagaacatctgaatacagattgggtattggatgatagtaacaaaactgctaaatttgttaggtataatatggtgattatttaaaagaaatctgcttagcagttacaagatgtatacaggagtattacaggttgagtatccctaatccaaaaatctaaaatcctccaagatcaaaactgtttgagctcaaaggaaatatcattggaacatttcagatttcatattttcagattaggatgctcaactggtaagtaccatgcaaatattccaaaatccaaaaataaatctgaaatccaaaacatttatggtcccaagcatttcagataaaagatactcaacctatgtaagtgaaagtatatgatgtctaaggctaacttaaaaacattcctgacagcagggcacaagctcacgcctgtaatctcaacactttgggagaccaaggcaggcagatcgcctgagccccagagttcgagaccagcctgggcaacacagtgagaccctgtctctacaaaaagattcaaaaattagccaggcatggtgatgcatgcctgtagtcccaggtactagggaggctgaggtgggaggatcgcttgagcctggaaggtcaaagctgcagtgagctgtgatcatgccactgcacttcagcctgggcagcagagtgagaccctgtatcagaaaaaaaaaaatctatatatagatctagatctagatatatagatatgtctatatatctaaaatatctatatatgtacacacacacacacacatatatacacatatttatttcacttgtattcactttgtcaggaatatatacgtgtgtgtgtgtatatatatgtgtgtgtgtgtgtgtgtacattcctgacaaaacagagttaggacataaaagaaacaagattagcaaaactgtcaattaattgttgaaacagggtaatggatacctgggagtttactacactattctctcaacttccatacatatgagtgtttcttacaataaagtttgtttaataaaatataaaagttttcccaaaaactgttaatggcctagggaaactacactacaagaaaggtggcaaaaaaatctcacatccaattccccgtaacagctatttcagtctgaacctaaaaacctaaccataaggtagcactaggtggcactcactcccatattccaggtctacagaaagttgaagaacaaagcccaggaatagatacctttttccaagaacaagacacaacaacctgtatctacctgagttatttttaagactctgaaactgggctcataaagcctagaaagcaactgtattagcccattttcacaatgctataaaggactacctgagacttggtaatttataaagaaaggttaaattgactcacagttccgcatggctggagaggcctcaggaaatttacaatcgtggcggaaggcaaaggggaagcaagtcacatcttacatggtggcaagagagaggcgagcgagggtggaactgccaaacaacactatcacaagaacagtatggggtgaaccgcccccttgatccaatcaccaggtccctcccacaacacgtggggataattcgagatgagatttgggtggagacacagagccaaacagtataagcaactatgctacctgaaattgacacccaactccagagtcaattttcatcaggagatagtatgttcactcccctgggggaaaaaaccctgctcatagaagggtaatgggcctccagccataaagagactgctacctagatcaccacaccaagtcacaggaaattgtcttatccaagcagtgctagctctctcacctaaaatttatcctcctctcaaccctcaattctgaaatttctatttttaactaacccattggaaaatcattatctacttgctgcctttccctataggagaaaagataaaataggtatgtaatctggagaaatgaggtctaaattatatattaaacacatatgaagaggttttcatagttataccctgccaggttatatggttataccctgccagattatatggttataccctgccagattatatggttataccctgccaggttatatagttataccctgccaggttataaggctcaagcacttcaaaattgctaaatgagcacctatggtggatctttcccattcttccctgcagagccatcttctatccttctctaccctgttgcatcacaggaggaggacctgcatggactacatcaag

SEQ ID NO: 44109 - DNA, 2300 bp, Homo sapien
agcaagaagtatgctgaggctgtcactcgggctaagcagattgtgtggaatggtcctgtgggggtatttgaatgggaagcttttgcccggggaaccaaagctctcatggatgaggtggtgaaagccacttctaggggctgcatcaccatcataggtaagcggtcctatacaaagctaatacccatataagctggcagaattctgatcagaggaaggtggaatggagaacttcttctatgtctctttattctgggtaaatgttaagaggtaaacaggtaggtaatttacagaggagcctcttggtaagatagagttgggggtttatcagctaccttttgggttggggagcacactgccttacagttttggtgccaatcccttttttttcttttctctcttttccctttttacctggctttcattcaacaggtggtggagacactgccacttgctgtgccaaatggaacacggaggataaagtcagccatgtgagcactgggggtggtgccagtttggagctcctggaaggtgagggtcttctgttttttggcttgtttgggataagggtggactgtgcagtgagaggtgggtagaatggagtggagaaagttagaaggtagtgttgtcattagcagtcattactacctgggcagtacagaggaacttcagataaagctcctggcatccactgaggcggggagggacagatagaaacttggtctgagagttatggtctagtagacctggaatccacaatgtaaaagttggccagctcctggccatatatcctaaaaaagagctggcatgttattgggaagataaagtgggggaaatctggcttactgggccctatagtaatgctgtctatgtatgtgtgctctctcaaaaacaggtaaagtccttcctggggtggatgctctcagcaatatttagtactttcctgccttttagttcctgtgcacagcccctaagtcaacttagcattttctgcatctccacttggcattagctaaaaccttccatgtcaagattcagctagtggccaagagatgcagtgccaggaacccttaaacagttgcacagcatctcagctcatcttcactgcaccctggatttgcatacattcttcaagatcccatttgaattttttagtgactaaaccattgtgcattctagagtgcatatatttatattttgcctgttaaaaagaaagtgagcagtgttagcttagttctcttttgatgtaggttattatgattagctttgtcactgtttcactactcagcatggaaacaagatgaaattccatttgtaggtagtgagacaaaattgatgatccattaagtaaacaataaaagtgtccattgaaaccgtgatttttttttttttcctgtcatactttgttaggaagggtgagaatagaatcttgaggaacggatcagatgtctatattgctgaatgcaagaagtggggcagcagcagtggagagatgggacaattagataaatgtccattctttatcaagggcctactttatggcagacattgtgctagtgcttttattctaacttttatttttatcagttacacatgatcataatttaaaaagtcaaggcttataacaaaaaagccccagcccattcctcccattcaagattcccactccccagaggtgaccactttcaactcttgagtttttcaggtatatacctccatgtttctaagtaatatgcttatattgttcacttcttttttttttattttttaaagaaatctatttcataccatggaggaaggctctgttccacatatatttccacttcttcattctctcggtatagttttgtcacaattatagattagatcaaaagtctacataactaatacagctgagctatgtagtatgctatgattaaatttacttatgtaacttttattgtctttggcattaacagtgtttcaaaaaattttctgtgtatacccatcagtgattcattcccaaatcttctagaagcataagtgtctcaatatattaaaacatattgaataatccttgttagagttatccctgcaggagtccttagtgctcctttatccaatttgtacttgatgccctctaggcagggtgtacagctagctgttgctctggtatttcctataaccttcttggggatttcttttacctcctgtgttagactcctgttttctggattcccccttttccctctttcttggtctactttttgtagaacacaagactctactagcttcctgagaaagggtgcctgggaggcaaaatc

SEQ ID NO: 44110 - DNA, 2300 bp, Homo sapien
tgaacacttattcttaagtaatgatacatatggacaattatttataatatgttatgggttttcttcatctagcacatctatgtcctgggttggctctctgaaggttggccaccctaagactatagtaccattctagtgggaggaaaaatatataaacaagatactatttgtaaattgcacagaatagaaactgataaacaatggtgccatctgtgaaagtgacatcagtggctggaacaggtgagagaggctttcttttactagggtattttaaagtagtcttaaatgttgtaccttgcaaatataccacgtatttttattttattttatttctttttctgagatggagtctcgctctgtcgcccaggctggagtgcagtggcgcagtctcgactcactgcaacgtccacctcctgggttccagcgattgtcctgcctcagcctcctgagtagctgggactataggcgtgccctgccatgcccggctacattttgtatttttagtagagacagggtttcaccacattggccaaactgatctcaaactcctgacgttaagtgatccgcccgcctcggctcccgaagtgctgggattacaggcgtgagccaccgtgcctggcccccacctatttttaaatgtaccttgcaaatattcaaaagcaagggactgttactagttttacacagaggttggccacagtaagagtggagaaaggcactagctcagcgtgggagcacgtgctctcactggaaacaatgtattgagaacacatggttcttggttggggggagttcctgcccaaacttcaagatggcggccaggtggactgctgattctgatgagtctgatgaggtgagctgcgccacaaaactgaaggacccgctaagcctgggaaattagtatgtatttgtgtaagtgtttgtgaggagagccactggagggttttaaggaaaataatgattggatttatgactgaaaggtccgtctagctgtgtaaggaatgtggggggacactatttggggagcatatttctgtaatcttggtaaggatgttggcttggactcgttagcatagtagcactggatggagatgtggagacatggatagaactttgggaggtcacccggacaagacttgttgctaggttgagtgtggattgtgagggaaagcgccaacatggctgcctgctccgtttctggcctgggtgagtcacggttcctgttcctgagggagaatcctagggcgttggtggatgtggagggtaagaatgagttatctgcgacattttaagccagagatagttaactgatgcacattttttgaaagtcactggggctggatggtaggttctcacgaaaagtcattcgggctgttctgtgggtgaggggctgggaagggtgtaactgggaggcaaggaagggtcctgtgttggcctcagcggggagacaggaagctgctccagggccaagagaggctagagggtctctaacgggccgagtgaaggctttagtttttcatcagtgtgaaatgggcagccacggtagggctttgagtgtgacaagggctgaccaaagtcttgctgtggggagagcaagctattgggtaggattgtcagatttagctaataaaaatccaggacacccggttaaatatgaatatcagaacaattatttcgtagcataagtatggcctgtgcaaatctgggatatacttatactaaaaatgtattccttgttgatgtgacattcaaacgtaacgggtccaactgtgttggaccaagcagccctaacaccgactgggtctggaattccgggaggccgaaaggggcaaaggtggtagccgtggaggtgtgaggagggacccccgcaaaggtgaggttggcccacttggtgccctttgccgggaaacaactctgggaagtcgagcttctcggcccctctacttctttcaggccccagcaggctccatggggaaggattacctgcctcttccaatactgaactcgggcaccccagcgcgtctcttcccctggccagcggcttgctgaaactcccgcccccggcggctggcacgtaaccccgccttccgtttccctcctcccgctccccgcaggggtggagcctgagcgaggagcccgcgagctctcctctctcctctgtctccgcggatgacgagtggctggataacatggagtcgggcaagatggcgcctcccaagaacgctccgagagatgccttggtaagtgcgaaggataagccgcggatcgcgaagccaggtgcagccagggacctgcgaggc

SEQ ID NO: 44111 - DNA, 2300 bp, Homo sapien
aaagaagaaccacaggaaacaccctctctgccacagctatttcggtgccaacttgaagctcaaggattgaagggggcctgcccctccacgcctgtgggtatttctcatcaggtggtacgagagactgagaaaagaaatgacacagagacaaagtatagagaaagaacagtgggcccaggggaccggcagcctcagcatgtgaggacctgcaccagcgctggtctctgagttccctcagtatttattgatcattatttttactatcttggcaaggggagtgtagcagagcaacaggtggggagaaggtcagcaggaaaacgtgagcaaaggatctgtatcatgcataaattcaaggaaaggtactgtgcctggatgtgcatgtaggccagatttatgtttcactttatacaaacacctcagtgtagcaaagagtaacagagcagtatttctgccagcatatctcgcctctagccacagggcggttttatcctatctcagaatagaaagaatgggaatggttggctttacaggagacattccattcccagggaggagcaggagacagaagccttcctcttatctcaactgcaaagagacctccctctttcactactcctcctcagcagagaccctttacgggtgttgtgctggggtatggtatcaaagcagaaacaatttttcctggtacagatcaaaatggaatttcttgtgtcttccttttctacatagacacagtaacaatctgatctctcttatccccacaaaggatctagctcctttctcttttcttcatttcctgagtatgaattgcccttccactgtagctcaaaatggctgtaacatttcagactggaggaaaagtgataattcactctgtgtctcacttataaattttcctgtagatatttggggatccaaactcagttgaagaaatactagtttgaatgtcagtttagttactaaaactccctaggagaggattagaaagtctagtcttgaatccaaatgttaacatcccttcaaatgtggttggatagccttttcctccaactatcaccatcaccaccacaatccagaactctgtgaaaagagataaagattcaagggccttaaagcgattgtcccaggttggttgtgaggtaattcttgtacctaaagatacaaaatttgagtaaatgactttgttcctacagcaggtagcaagccagaaggctactgctgggctcatattttacaagtacctaaaactagttgttagttatggggcatgtttacaaagtgttaacatcaacatatttatgcccatctccatatagaatcttcttaatataactcaagataattgatgtaacaaattcacatcatgatcttaccaatttggtttttaacatcaaagtgctgccccaggcttcaatcagcacataccagactgctatgtcccttttctccagaagccatattgagcaccccacagctctaacacctcagagcctagccaaaggccaagaacacttgcctgatcccccaaatttccaacacaggaccattgacagcaagcccagtcattccagatcatcttcagtgggacaaaaaaagaaaacaacagttttaatccaatggaggcaatttattgttatgaagatttcaggaaacaaagctcaaaaaggaaccagaaaggaaaaggctttttagaatgtggatagagccacaagtgtcattaaggagagagagagagaaacggagagatgaaatttatgttacttaagatcaagtttcacataatgccagttatattagcatatactggcaggattatctttccccacctacaaatagtctaatgacctcacagtcacagaaatcacagagaactaagctgaagagagaacactcgtccctgcttcccatcttagagcagctgaataatttcctgagaattctattcctgaagctaggaagaaaagtttatttatacatacacgcaacctgcaagtctccagtttctattcttccttcctctttgacccttcccctcccccactttgcaccagagaagtcagactccgggagtgctttaacagtttgaaggctaatctgaaagaggaagaagaatctgtatatctgtatatattggctagcaaatgtgccctgctctctcccctcttaaaaatagcagcaacccatctttgcaaagaagcttgcctatagagcaggcactctgtgaatggactgtgcttttacgaccctacagggtatcaagatactgtgcagctcgccaacaaggattaattgcaaggact

SEQ ID NO: 44112 - DNA, 2300 bp, Homo sapien
tccagtcctgattctagagtactatctggaaactaaaccatctatatcccagcaaggaagaatagataaaagttcccaagtggtgaaaaaccaatgctgtaaaatcgatgcactgtagatttctcggtatgagacccctttctcagcctctacacaactctagcatgtttacctattcagtttcccaattcacaggtgattaaaaagaataaattaaaatgagattactgctgctacagcttattattattattattattattattattaacctttattgggtgttattagctgccagacactgtgctaatccttttttcacacattatttcactgaatttttgacaaccctataaagtcaaataatattaataacttcattttacagtttcataaactaaagtttagattctaactatcagaaggatgaagtaatttgccaaatttgtatagggtaagtatagacaggcatataggtataacatgaagggctatgttacaacttgattgcaaaagagtataaaaatataaaggaaaagaaaatacaagaagtcgcaaaacatagcaatttggaagtttttaatttgaagacagaccactttatacctctcagtagctttcagagggcaacactgtgttacaacagggtaaactagctggtttgtgtaagtatgaatccaaaccattaaaactggattaaattatatgcaaaatcatttcttaagaatggacaaagaggtataacatatgctataaatatttctctgatttttttaaattgaaatactctttattaaatttcaacttgatgtccagtattgaaccttcaaactcattgttacagaaattgctaaacattaggaaagagtttcaattaatagttgttccctaactaagcccgttacaaattcaggtgttggaagttctcttttctttctggataaaataaatgttaactgtgtgttttggcttcttggagggcaggaaggcttcagttatctgaaaacttcacataaatagatcacatcatccctgatgatggtggtatttttatatgtgtggtgtttctagaaaaataaaactttgaaaggtaaggaaagaataaactcgatttgcaaaagattttgtttttactttcaaagcttctgcattcggattcaggtagcccagtctgtcaatttgctatgttttgggcctattccatcactagggtttatcccattatgctgactaatgcagaactgaccatttgtgaaggagacatgggactgtggttgacatgatgtgtgatttgaaatggccaaatgcaaacctcaaccccactccttacttggataaaaatagttgcccctaagccttgcctaaaatggccacatagcccatacccaaggcataactgtgatctggcatgagaagagaaagtgagattctgagcagggttacttcccaagaggccagtctttagtgaatgtcctgagtgctacctggagcacctgatcagttcagggaagcatgagatctttggtccaggacattcagaaagagccagggactctgtaagactgctataagtacccaccaacacaattggtctccctgacatttgtacccttttataccttttctagatctgtctgtggcaaattttccaagaaaacattgcaaggaaaaaccctagggactgaataggtagtaagcaagggaaggggctgagggtttgcaggctgttccctgagtgagaagtaaacaaatggcccaatttggacagagtaagaataggttagatgagacagacataaaaaatcacatcccaaaccactgtggtcattcaaaaatgtttgcaacttttcacaagggcagtggtattactcacaatttcctggccaaatattcattaaagtaaccaaggactgagtacatgaagctgcttcacatcagcacagcatcctactttccttgcagctctgaactgtgaggtactgtcaaaaaactcttccacactttaaaaagctatgttacagaggaaagttggaatgtgttctgggagtgggtgtgtttgcttgagttcagtgtgtgcagaaaaggcaagcctccacagccatttacacatttccctcctcagcaatgggtacacagacagccaagctcctggactaagtctctgaatggtaacgtacatttataaagattattttcttaactattttgaggtattttataaataatatgcatgtgtcttctgagggcatatatatatatatatatatatatttagtcgacttttgcttgttttctcctga

SEQ ID NO: 44113 - DNA, 2300 bp, Homo sapien
tctggggatcagaagcactctgacctggcctgcgcttattaaaaatggagcaaagcaaaaataattttagtatactctgccttcaaggccttgtcttcctgagctctggactgtcctctgtagggagcaaaagcaagtcagcttttctagggtaccgggcatatttatgccagaagttggagctttgttttcaatgtatgatctgaaagtttagcacttcatgaagtgaagtgatttggttatttatccttatagggccaaaaggctaactttacttcttccaggagccttaaggaccccaaatatggtatacctgtattttactatcattagaaattttttaaaaaagaggaaacaattgtggccactctgaattagctccaggtgtagattgaagttaaaagttgagggtcagatttatttttggtcaacctccacgggacctgcttcctgtccattgtcaataaaaatgcagctacccaacactctctgacacccttaggtgattaattgtcagaataattgggagcagaggtttgcagaagacagtagtttaatgctccttgcagtggaaaatgtaattaactgcatcagcatatatttttccttcttcatttcatctgaagctcaagtgttggtcctttgcctctatttagtgcacaatatgttggctatttaggaagatctaatagttagaaatgctgtttcttttagtcaaaagaaaggaagccagtaagaaaagaggctaatattgattcttcttcagaatcatctcaagagccaaatgtctttctggttttttaatcatacctgtatgggaaatattaccttgagggcacactcctggattgtcctgtttgagtaaattgtgtagttaaggctgaaactcaaggggagctttctgaggcacaaggtatacatgacactagaaggatgtgttcctaatgtgaacttcagtataccaaaaaagacagaaatataaagttacagttgtttcaggaagggaggaagaaacaaacttacataatgtttctctgtagttaggtagggccgaatactagcaagctcataaagcaattcacaagccctattgaatcttcctagctttagctgtgaggcttagaggtaaagtttatacaaggaagagagagagtatagccaagttacagagtgaaccagtgtctgagtcagaaatagaactccttgcttctaatgctgtgttaagtcccagcgccacaccctcacttctagacggcaaaggtggttgtgtgttcaagcaatgggagctatgaatagggccacagtggcagttttcccatgccctctcttcaggattgagaatgtaatgttttcttgtctgtcctttctctcccacaaagtttgattactcagagcagcagagcagaagtgccaggcatttgcaggctgcttgctgtgggtgtaatatatatgttcctggaaacataaaactgaagtgaggggatggatgtgttaattagcttgacataatcacctcatgtagtatacatatattaaaacatcgcctcgtacttacataaatgtagttcaattatgatttgtcagttaaacataatgcaaataaaaaataaaatgattgaaatcataaaaaatctgaatggaaaactggggagatctatttgaaatgtatcaacttgagactcacaaaataatatatagccagtgagctagaatcatgctgtgtaaaaggatcactagtgggcagactggagggactctgggcagaagggaaaagccttccattataaaagcattttccaaataaaataattatactggcagtacttattgtagaagataagttcaagccgatcatagtgaataaagcctgactttaatgttagaggttttgcagtcccataaatgctgttttaactatcattttatatttttggactcttgagtgacctacaccttagttacatttgcaatgctatagtattgcacttattgtattgagtgtgagctttcctgctcctgcaacatactcttgtagtacctttaaatatataatagatgttcaaaaaatacttgtcaaaccaaatggaatgtgcatgttttcttccaatctgggtggacagaatatcttattacacagaaatcatggatggaaggcaaatttgattatttgttccatcttgtctctcataggaggaaaatatttcctaccggtccatagtgtcagagtggtgaacccctgcagccagcaggcctcctgaaaaaaaagtccatgggtgacagaagattcattgacttccaat

SEQ ID NO: 44114 - DNA, 2300 bp, Homo sapien
catttattgatactgttagagagaatttaaagcctttgaagcaccaaatcataaactttccccagcctatggaagacataattcatcatttaaagtaaactttgatgacatacataagaataaggaaagaatttagaactattggtaaaatagtacaactgcactacttttaagaatcttataattagggtacttattactttgttttagtttataatgatttgtaaaccataagtcgtacctagtaacaaaaagactttcttttaaaagttaattggagatgactgttaggttatcagcttgctttgtttctccacagatttgttcattataattgtattagtttgttttcatgctgctgataaagacatacctgagactgggaagaaaaagaggtttaattggacttaacagtcccatatggctggggaggcctcagaatcatggtgggaggaaaaaggcacttgttacatggcagtggcaagagaaaatgagaaagatgcaaaagcagaaaccccttataaaaccatcagatttcatgagacttattaactaccaggagaatagtatggaggaaactggaggaaactgcccccatgattctaatgaactgccttcaagtccctcccacaacacgtgggaattatgggagtacaattcaagatgagatttgggaagggatacagagccaaaccatatcaataattaacactcaaaatttacctgagttaaaatttttcatttgaattgggacactgacttctggttttatttttcttccctttttagggtcagtgacagaagaagctgcttgcgtgcaagacagaaatgaagtaaactggtaggtttccttctcgcaatgtgaaggttttgtctgtgaaataaagttgggatgtggtgatcatagccagttgtaagaaaaggatttcttgtatttctggatcccagggtttgccttcaaagctcaacaggtctggaatttttttgtttgttcagagaagaatcttaccctaggaaaactggctcacactaaccatagggaggaacacaactgccaaatggactgagatgtgtgttggtctgtcagtgtattctcttttcagtagggatgccaattcagaaacctaaattaacaaaagataggagctgaataaacatttgaaatcaaaattaagaaggggattgaaaggctaaacttgtttcatttgacatacatcagccaggatgatgccagtcttcacaagttatgacatttccatcaatcatcccaagctcttagtttccaatactgtcagcttctctttcccttacacgccaacaggggtttgtgctgcattttaaacctcgtttctcaaaactactctcagacttagttgacactgtagtcctcaagtgtatgatcttcctgtattcacatagttttgaaggccccatatacactgtacataaaaaccagaattttagtacactggagggagaccccgtaatcaataatgttcatttacttattcatgcattctttgagcatttgtttatttattaattcccatatgtattcattcaataacaattcatgaaaatgccttgtgctggacaaattgggaatacagatatgaatcagacatgatctttaccctcaagcagtgtgcagtctagtaaagggataataaatatacaaaaataatgaaactatgtgttaaattgtgagcctcaagatgaaggggttgggagaggggcactccagatggagggaacaacttaagcaaaggtacttctactgtttctaattttgacttgtattttttaggtttcctcagcctttgcccctcaggcttgcacaagctgtagctttcttgttactaggtaaacactctttagattttcctgaaaatttcatcttaccatggaacctactggaatcagtgaaaatctagatatgtcggttgtcaaggaaggagatagggtgaggaaggctgttatatagccattgtgtgagtatgcatagcctctgactccctgctatttgaatttctctgcaccaatgaaataaaaagaaataaaatttgagtaacgtcatttgctcaagggacttacctttcatttgtgcaaataaggtttctgtggtgagacaccagataaactcaacttcctctttcaacaacaaatgtgtcagttatcagcaggatccatgccgccagagtaaagctttctaccctttactccctgcaaagaaacaagagtgcttatcccagctaagctccagggtaagttaatgcctagcacctggggattggtggttt

SEQ ID NO: 44115 - DNA, 2300 bp, Homo sapien
tagtaggtctcagcaaaatgatacagaaagccatttctaatattcctttgaatgagacttcacctggacaagcaaccagagacctaatattgctggaaaatacttttgaaacataagtacaactaagtaaagcttcagatttggatgaacatattcatattcataaataaaaaacaataacttcccataagaactccatatgaaatagtttctcacttacatatggctgaaaaattagcatgctgaattcaggcaatcaattccctttctctctacttttttcctcgtaccaagaaagtaagtacaattgaggaaatacagtatgctgaggaaaaaaaaaatctgcccaaggagcttggcatttccttccaataagtgtctcatttaaaattggagtctgtttcagtcccagttaaaatatggattttttcttgtgaaaggacaatctcaaagaaaagtggtattatttacagttgtgcttcactgttttttataacactatctttctatgtcttccttacctgagaaatctcgggtatttaatctcttcaatccaaaggcatattatgaatcactcatcaagccttttaagtaaagtgagtatcatatctttgaataaaacgtgctgtttcacttaccatgaaattgaagtaaaataataataatttgttcaggggctcaatgacgcacacttcaaaccacatggatttgatcattcaaagcaggatgtttcataattcccatttcatttttgttcttcccacacatatctttaaagttagttaagtcctcctagatttcagcagccttgaggcaactatccaggcccctaagctaaaatttacttacctcagaataaaggtcatagacccagctgagtcaactttctatggattttgattctctgctctggtgctacatctgttgtctcaggtaactaagaggtgactaaatgactcctgtaaatgggattatttaaagagaagctggttgtccatttatttttagacatataggaatgatttggatcaaatgatggttcaaggacaaatgctgggctggctatttcaaaaccaaatggagagctttgaaaagatacaaattgcatactgtaccccatgaatactcaatcagaatctctggaggaaacacccagaagcttgtattttaatttttaaccttccccagatgattcagacaatcagtaatgttagtgaagcagtagtccaaatcatagcttctcaaatgttaatacgcagaagaatcacctgagttcattgttaaaacgcagatcttgatgcatcaggtccagggtgacgcctgagattttgaatttgtaacaagctcccaagcgtcattcgttcatgaattttgagtaacaaggggctagattacttctcatgttctttcaagctatgtttttctgtgattataaagtgccttgtagaaactgcagcatatacccttcccttacttaagaattttttcattcaaactagaatatttttctgaacacaggcttttttttttttttcaaagctgggccaggaaataattgacttattttcttttgcttgcagctctgcctttgtttcctactttttagcttttgacctatagctgaaaaagtcccagaaagctgatctttccaagttaatcatccctgaagagtggcggactcattgtgcactaaagcaatcctttcttctatgtgagccaaaaaaagaaaaacggcctgccagacacctgtaaagagaaggctatcgtcatataggaatttgaggaactgctatatggtacattccttttccaaatgggagagaataagctctcatgatgtcccagagggccttaaaataaacaagaggggaaattgtaacagcttgtcatctgtgcttgtacactagacttccatgtagttactctagagaaatctaaatcaaaaatgcagatcattctttgaaaaatccccaaatcatacgtagagactcagacagatgtggtaaaaagaggaaggttattttatacttcgtatctccaacccactggcaatcaatcttttggaaggaacagcagttgattgtgaatttagttttgaaccaccattaggcaaagatagtttctctagagagaatcatgcctgctaattacacgtgtaccaggccagatggagacaatacagattttcgatactttatttatgcagtgacatacactgtcattcttgtgccaggtctcatagggaatatattagccctgtgggtattctatggttatatgaaagaaacaaaacgagctgt

SEQ ID NO: 44116 - DNA, 2300 bp, Homo sapien
agaatgttaagaatggttgaagggtaaataataagaagaataattcttataagcttgaaacatgcgtatgttacagaataaaataacaatcccaggataacaaaacatttcactccctatccttttcataataatttaaaaggtatttcctcttgcattataccaaataatcctcacagcaacaggacacaaatgaagaaactgacatctgagaagacgaagtgacttgctcaatattatgtacccagaaattgatcacatactcccttgatcgttatcataattttgatctattcatctgaaaaaatgaaaagaatccctctccttctgcccgaccccatttcaggaaagatatactaagataatacatcacaatcccgcccagaaccttgcacttactaagtaaatgtgcaagagcaaccatgagtgtggatcaccgggccagactagcacagaccatagtggagatgtcacaaaggtgattgcaagcggaaggcaactgtaaagagaaacattctaggaaggtgagagttcctcagcttacactaaaggttgcctgataaatattaaattataatggtcaatcttgagcaataataagtgaaagaacataggatgccaatatttctaagcaaactcaaacatcctgctttttaagattctggccctaagtaaggcacaggctccccgctgttcccctccatccaccttcccatctgtggcctatccaagaaaatgaatgctgtcttcacaaaggtcccacagtggaaacaggagacaggcttctgagtcaaggaaacatcagtgggaaaaacgccaagttggaatttttcggatgaaggggtggcgactcaacatatttaagtccgtttcttaggtagatgagtagatggtaaattctgtagcaaaagctgtttctttgttttgttttgtttgatgctgttgttttggtaagtgctactgtcttcacacaacagacctttctcctgtcttctgcagcgggactatttataaactgtgtaccagtgctaccccagtcagcaacctccaaagcctgcattgtacttggtaaggttctctatcagtatcactaacctggaaaaactgactgtgaagaaacagcttgattatactggctgcacatgtaaatgttccaagaataatttctaactcaacccctttgaagttattgttttttcctccattagatcggtattagcatctggctaaattttgtatcctccacctccacctccaccttcctgaacacataagtacttatacacacacacacacacacacacacacacacacacgttttttttttccccctgcaggtttcacagctggtggctgaacagaaacagtctctgggttgagactttacactggtttccctgacctggaagagtgaaaaatctagattatttcaggaatttattgtaagctttccacccttctctgtctcatcatgtcttatctacaaaatggggtgttggggaggcaggagccctatctttctgatctagcatcgccttaggttgagatattaaaatttcaaaacacaagcaagcaaataaaaaaaataacaatttgttgaaagaatcaactgggtaactataaacaggattctaggtgtcctttaaaaggaagatattattatcaaggaacagaacctttgtagaatggcgctttgggggcctgggtgggtccagaactaaggaagtttgagttactgccaagctacagtcccaggccctgcggggagtcaggtccaagtttgagaaaacagtcatagtcaggggctattgtggcctggacagaggcagaaagacacgacacagcaggcttccttcctgtcttgctcttatctgaagttgcagagagtgggtgggagtatgcctgaggtgcaggtgaggcacgtttagcctgagccggccacggactccacttcccctgctcttcccccagtggcaaatccgcgccacctcgcaaacccccaactcaggcacttgggccccttttgggccccctctcgctcctccctttaggcacctccctgggcccgcccacggtctccccccagtttgggactgcgtcataagtatcccagacctcggcttgcagtagtgttagactgaagataaagtaagtgctgtttgggctaacaggatctcctcttgcagtctgcagcccaggacgctgattccagcagcgccttaccgcgcagcccgaagattcactatggtgaaaatcgccttcaatacccctaccgccgtgcaaaaggaggaggcgcggca

SEQ ID NO: 44117 - DNA, 2300 bp, Homo sapien
ggagtggagatgggaagaaagacactgtttcctgagttgcctggataggattatttatgacgtagccacaagcctcttctgctacagcaggcggagaccttgccacctcaggattatgctgccacttgcacttagccttcttcccgcatatacacacccagcgacataaaaagggcactcctgccctgagtttggaaatgatgttttgtgatgagagtctagtcctggtggctcactcctcactgtctattgctcaccggcacggaaaactctctttcattcataaataattgccttgcgcattactgtagaagaaaacttagttaacaaattcctttgttttgcttgtgaagttaccagatttggttagtaattgcctgcttgatcaaaagccatttccttcgtggttaaccaaacatcaacttgtctctgttgggcccgttttaaatatcaccaaaagtgaacagccccaattacgacaggaaacacatttcccgacattaaacaaggaacagaaacagatttgtcgtgtttcaaaatgcacatagttctatggatgggctcacatgctgttcttatttgcaaccttctctccctaaacaaacacacaggagcgcgaagacacaaacacattcttctttcagtgggtgtagaaggattcttggaaaatcctgtctctgagttatcttcaaaaatggctgaaacttattactgtgacactttttaacttgaaaatcaagataaagtaaaggggaaagtctaaaataaaataaaatacaatcactattttacttttcttgaaagaagggaaaatatttgccaggaaaaatactttagagagactgtagtcctcttcagacatttaaaactttcacatgagatagtaaaataaatttaaaaattaaaaaataatcccttgagtttttgtgtggttgactgtgagctgcaaatctcaggaacaccggaatgcatttataaacccatcagaaatatcaccgtcactatttggcattcagtattgataagaaatgcgtggtcctccttggcctctggtttttcaggcagggttataacaggcattatctgcttcaggggttttatttgggaaatcccctgggtccttcctagttatccatggcactgcggtgtggtagcccaatgcggggtagctggggtttcctgcattacttgaaaggtatggtgctctctgcaatggagaaaataaatttaaaagctatagaattcgtccaattaaaccgcactaatccagaatctgtcttctcttctatgagagcctcttcactagaggataaaatgagcattgatttttcaagtacctatggatcacttattgctagtaaattcttctgacttagggccttaagcccttttcgattctctctgagctgccctggagaaataaaccaacaagtaaaaatcaaacatgttctattttgcagcagaaaaatgtgtcagccaagacatttctgggattcgctgtgcattaaattgtgtgtgtgtgtgtgtgtatatgtgtgtgtgttggatctttcctttaggaggtgtaaagttttgtttatgtggcgcttgcagactgagagggggatcctggccactgagagtctctacactgcctgggaatcactgcctgaggctgaatgggtctcttagtggatgactccagagctgaaccccttgagtggagcttctgagctgctgttgttgattgaggattgaaaagtgttttccaactgcaagtgctcctgctgggcatggaaatgagctgactagacttgtaaagtcaatccactcctgcttcaaaggcattttttcccaagtgcattagcctgtagctcagagcaggatgcagccaggtatggttgcaaccgggaggctgaggtaggatgcagggtgcctgcagccttgaggctctgaaagctgaaatcacagactgtcattgtgacttcatggccaaccttgagtaacagcaggtcttctgtgggagaagttgctggagtccaaccccggaagtagcaagtgcctctcccacagctgagggccagaacaccacgttctcttgtgctctggctctaggccactcttctctgggctcttgagaagagctgctgcaggcatttgcagagtgaatgagctctgactgagacttgacttcagaaccactgggctggcctggcctcttgacacagcaacacactgcttcttgccttccaggtaaatacctctgccttactgaccatgttatgggttttagtgggacatcagtacagggattctcctca

SEQ ID NO: 44118 - DNA, 2300 bp, Homo sapien
cacctgtattaggagatactaacacaaatattacatggtaataattgcactctaaaattaacaaataaactcgacttttctgttttttagttgtgtattttagctaagagcatgcaataaataaaatatagatagatagagatagattagatagatagatagatagatagatagatgatacatatagatagatagacagatagatagatagatcttctgagtaagaggaaatgaacaaacactctccccccactttaatgggtgcgaaaagaaacgaatgctcagatcacatgcagatgtggctgttttccagcccaagttccttacacgaaattggccttacctgtgaggttcactttgcctgtctaggatagggacagtgtctttctcaattctgcatggtgagcagtggctaaataatgattgagccaaacccttcagcagcattcaagctgtaagtaactctttgccatactgagatttttagagtgtttaaagtcatacccagttgcctgaagatctcctccctatggctgaatatccccctaccaccaccactaccactgccatcacagtggcagggcacatttgtacctaagtagctgaaattaaaaggacacacaggtcttttactctcagattccagtattggcatattataagttatttcaagttgcatcttattttaaatgaacttggatcagctttaaatgccctttttacaaatgtgtcagaggagaataatataatttttctggaaaaatgcaaatgctattagttaagatgcaacctgcaaaagaatccaggggcacttgatttcttatttctgatgaaaagtaggagaccaaatcatatgcacacaggcagacatctcatatctgcatacgtaaacatgctctttggatgttgtagacaagtctcttcctgaaaaaaaaagaaacttgtatattcattttaaggaaaagtaaaatccagcccaagaatatattccaggagacactggaatcaattacttaatccgaacattttgagttgtgcacattcttgggagcaaaggcccttttgttgccctgctggtggacctggagtttttagactgtgtttgctgattaagtactgtgagaaaaaacaaagactatgtataggaatattgggctccagcagaggcagggcttgaagatccaagttttctctgatgcttgacagtggcattgggagactcctgcctgccctcacctcactaacagaagagagcggataaactggcacaactgctgctcacctaatttgagactccaactgcagagccaactggccccaaaagcttgtactcctttctgtttcccagtgccttcactggagagcaaaagaccctgatacatctctccggatctgcttaaagtggtccctcgtgggcaattatttcgcatgtctttgagttttataatttaatgtaaagctgtaacctgtatctcccttttctcctctctctacttccctatctatagctttttttcaacaagctccaaaacccccctccctgttagactctgaagtgtcactcactgtgttttttatgcttccaatagtttccaaaacaaacagtggaggcagtgaccggctgggtattcactggatgcaacagtaactcccaatccgagcaacctgagccgccattggcggcaggtctgctccctaaaaggccagcacttgccaatctctgctctgccaggtcctggaatcagggatttgaggactaatggtctgcacatgtgcactgggaggaagggagactagactttgaaggacatatacactagtttgatcttcctctcctttcattttgtctattcaaacaaaaaatatatatgtatataaaaaaattacacacacacacacacacacacacacacacacacacacacaattattttctttgaatacagatccagaaattgtttttcagatttgggttttgggtttggggttttgttttgttttgttttgtttttcccgctttccctccttccttcaccctctgtgccctccgcctgtgtctccccctccctccctaacccagttcaggttgaaactttgctgcaaagaatcccttcaccccctccagggatggctctgagctctcgggcgcgtgccttctccgtggaagccttggtggggagacccagcaaaagaaaactccaagacccaatacaggcggagcagcctgagctgcgggagaaaaagggcggagaggaagaggaggagagaaggagcagcgctgcagggaagagcgagccgct

SEQ ID NO: 44119 - DNA, 2300 bp, Homo sapien
tgatcatgctaatcgaattgtgtcagcacagtcttcttatatactataacaaagggatttttgcatttataaaggtgacaagtgttactcaagatagagctcaacttatttatggaagagggctctgagtccatatgtcattctcctgttctatactccaagaaaaaggtctggactgaacatattccacataaatgaaccaagagacttaatcacagccagatggtgtgagtcaagttaaagctcctttttttttttttttttttggtagactgaagggaagttaatcgttcacttttgttgggtattaaactattgataacagtaccattaactttgattacagtcaggcattcctttcagttaaagaaaattggtcagtatagtagttatcttgttaccagaaattacatgaggtagatttagaccaaaaataacttgattagagtaggaaacaaaaactcatttagagctattacctcaaatacttctaaaggttctgggaaaagggatacgatttgtaatttatttcctcatacttaaaagcatgttcaaaactttacaatttaataagcacttccatttcatcttcacaacagctttataaggttggcaggtcagttatgcattacagatgagtaagctttgcaggaggctatatgacctgtcctaactcacaggcttaagataaactgggattagaaattgatttgactcatattccagtgctcttccctttattatgctaatacaactacactttctttattatcctttaaactgtagtgataagtagaccttttagtcatctactatgttgatgaaatgacctatcggtgcccatcaagggttcatattttattctcggccagtccggcacatgatataatgttaacaatattctcagtatggcttacataattctttcaccaaatgtctttctatgttgtaggcttacaaacgaatgaagctaaaagagctttaacatgagctatcaaacaactactattactcacattttattattttgccaagtttcattcagtggcagtataccaagctattctattttccataataccaactccttgaagaagaggaattacaacatttccgttgtgaaaaacaatttcatcctttaattcagggctttagacagcttggttctaaactctgacctcatttcttaagtgggaacacaggtgcaattgatgaattttatagctttagggaactatatgagtttcctcatgtgttaaatcctattattaagcaagcaatcatcttagtttggaggcttggtgttaagcactttacctccttaccggtcacctccacccaggaaaagaagtgaagttcaacaaaagctatctgccctagtactgcactcaaaacctacacctacaccctaaacctctggcaaactcctgttgccttgcctctgttctcgcacagtttcccaacaatttcaaagaggacgaattcactaaaggacaggtgacagaagctctcagagtgggagggctcgcgctctaaatctcaaaccagtgcggcgactcccctgaccattctttaaagcagtcccacctcccctgattctaggatggcagcgagtcccaggaaaaaaaaaaacaaaaaacagaaaaactaaaaccaagctgctggagcccaccaatcggtgccagcgctctcagccctccacagctagaccaaaaaggtcactaccaggcacctcccagggtcccaacctctgccctccccacctttccctatgccctaagagcagcttttcaaacaggaaaggatactccccatattcgacgtggtcccacgacttttcgcgggaggcgagtgcccggggcagcagcacgagtgggatgtgaggtcgcccagagtcctgcgctagtcctgaatagccggcacgcgcagctactaggtttgcaatcccatttcctgtttctgctcctggaccgagggggcggggccgggtgcctccgaggggcggggctggtgcaactccaaaatggctgccgcggggagcggcgattagaacgggttccagtcgcttgggggcgttggggggctggagggcaagaggttacgcgccccagctcccaccttgggtccttcgcctgcacccagtctaacctggcacctaaaggtttcgtcacccagccaaccttctagttctttcttttgtcctactccaaagtcttcttaaccttccgccccacctctttcctcagatttcactctgtccttggcccctcaccattgtctcagagtttaagccttaacgg

SEQ ID NO: 44120 - DNA, 2300 bp, Homo sapien
gaaaaattatacataaattcaagacagcagctgcctctaaaaatgaagaaaataaatgtgattagaaaggagtatacaagggaacttaaagggtataatatccttttgcttaaattgggtgatagttcacaagtatatatttgtaatattgcttttattttgcacacacattttataaatattttataggtattcaatatttaatatacaactaaaatgttatattttctttcctttttatattttctctataataaaaagttttactttaacagatttgttcgttgcttttaacaacaccagttataaatgaatgaatacacatgtactttaaataaataatgctatttctgtgcctaagtgttaagaaaaatataaacctcgctttaagaaatcagatatctaagaaaaaacaagagggaaatttttggagtcaaatttagtttggaactcacaaaaacaaaaaccacttcttaattttctaaatggtcagcacaggctacgattcgtcttttacttaaggcggacatcaacaacaaataccctaacaacaaatatcttcagattttaattttactaaaaaactgatcctatcctaaagaccttttccttaagaaattccacaaaacattttcaaaacactttttaaaaaaggcttattcttatagcttagctacatataagtctaggaactttatatgaaacttgaaaatgctttagctttagtggattgttctggtctatatatggatttttttgaaatagctgtgttaaaaaaatactaagagtccagggaaaatctttttttttaatgttttttatctttataccaaaagaagttctccaacagcgaaatacaactgtttatctagtatagaaactgatcaaacagtgatgaaatctactaagttttatctgtttctgtaaagtcttaattctcaaatatatagggacatcaaaaataaagcaatctttatacagtttcacctactgaagtggtttccaggctgtactttcctagaaccttgtattttaaaaggtttgtttttccagcatcgaaggtttgtagttagggtaacagtctgaagcctaccaccaattacattaacactaaagagtaaaacagtagtttttagatccatctttctttcaaaaagaaacaaagataaaaagaaacttatccaattagatgcttatttcccctatatattgaaacactaaagatgggaaaaaaattcgtcaaacttgttaaattccttagtaagagaatatactaattgttttccccaaagcaaaatctcagttcttccttggaatttccaagggttttgaattgaaacgaatcgacaattcccaggatgcccttcctttccataaatccatagtgtctaataactttggaacattttcatgtcacatataaaacgccaactactatctagtatttcacttaacctccttgcacattatagactttgtagtaattttcgtatcttatatatatattgaaaaaaaaagttagtgcgaatacatatttcacataaactttacctattaagtctagcctacaactttaaggatcacgaagctttttaacgccataagtgaacttcacacctcaaatttaccagccgcgctatcccttagacccttattttatacgactataattttttgaaaaatacgttaaaagccctatacctttttccttcatccgttaaggcttaaactctgagacaatggtgaggggccaaggacagagtgaaatctgaggaaagaggtggggcggaaggttaagaagactttggagtaggacaaaagaaagaactagaaggttggctgggtgacgaaacctttaggtgccaggttagactgggtgcaggcgaaggacccaaggtgggagctggggcgcgtaacctcttgccctccagccccccaacgcccccaagcgactggaacccgttctaatcgccgctccccgcggcagccattttggagttgcaccagccccgcccctcggaggcacccggccccgccccctcggtccaggagcagaaacaggaaatgggattgcaaacctagtagctgcgcgtgccggctattcaggactagcgcaggactctgggcgacctcacatcccactcgtgctgctgccccgggcactcgcctcccgcgaaaagtcgtgggaccacgtcgaatatggggagtatcctttcctgtttgaaaagctgctcttagggcatagggaaaggtggggagggcagaggttgggaccctgggaggtgcctggtagtgacctt

SEQ ID NO: 44121 - DNA, 2300 bp, Homo sapien
tcattatgttgcccacactggtctcaaactcctggcctcaacagatcctcttgcttcagcctcccaaaactctggttgatttaaaaagtatatgtatccaaaatgagtcaaaagagaatgacactattggtcaaattgggaattatgacctttggaatgaatggggatgaaaccagaatatttggattgctaaacagctatttagcagtagttgtcttttgacttctgttttgtcttttcttctcccaaaactccttcctcctatcttctttctcactgatacttgtactatctttgttattatactgttttgactttttatattggtaaaagacatatttttaaatctttataaaaagatagttgagaatttgacctatatctgatatatgtattttattttagaatttgacctatatctgatatatgtattttattttaaacatgtagtactttacagaattcattattgctgattaatgaaactgccttatgacattttcagatttctttccaataacccttgcttgtatattaaatggcaccctacaaaatatctgatttcttattctacttaaaacccctcctccaccccctacctagctagctaactctttgttcatcatgtccattttatctgttactcttttcatgaatttctttgcataatttgttttttatttttttcaatgggatcatagaccctacctctattcttcacattcttttgaatgaggattgagttaattaaagcacttaatacctgacacattataagcatcatataatttttagttatcattgccatttaattatgtttaaaaattctacactcaaaagtttaaaattaaaaacttatattcagtattatatatatcatgtaatgtaattttcatatctttaagaaactgtacacgtatatttttctttaaaattaaactccagtgtaacattctttatatacaaggattaggattatagtcttaaatgttactaaaaattatttatttctttgtcatatattatactgccaggaaaacattgagtaggtatcttgttttacctttggcccctccaaaatgtatttagtcttttctatgttttactggaaaatgctataaattatctatcttaaaaatatcacatggatcactggcttagccagacaattttcttcctatatctacctatttgcctatctttgtaatcttgatattcttattcaaacagttatgtgatagtttctataaattggacatactgtaacaaaacattattttgagaagaactctgtcttttaaatgttctttttaaaaattagttgttggcactcaaaacaattatacttatcaaccataatacttttttaactgtttctttttgagacaaaggcttgctctgtttctcaggctggagtgcagtggtgtgatcatggcttacttcagccttgaccttctgggctcaagcaattctcctacctcagcctcctgagtagctggaatgacagatatgcatccccacaccgagctaatttctttttatattttttatagagtcgaagtctctctatcttgcccaggctagtcttgaactcctgggctcaagtaatcctccagcctcagccttccaaattgctgggattacaggcatgagccaccatgaccagcctctttttaattgtttaagaattttttttaaaacaaaaacatgttcacttgggggtaaaaattaaatagagaatattttcccaaattctgtatttcagaaattacaacttaattttgaagttacatgtaggcagttacaatacttacaaaacaaaaatgtttgcctatctgtgtgaatctgcatggtttaactggttattttcactatttttttctccttcctccctcttcactattttttaacttaagttcaagtatcttgaggaacctgtttttaatctttaatatatctagtataacattgtcttttttgagatttgggactcagaattgccctatttaaatttattttttgaaaattcccccatctataagagcattaatgatgcaataataatattccttgtctcctggcaacagtaaccctggaattgcagcaagtgaggtgtagagaatgtgtggagatcaggtgatgcagaactctggtaaaggatgttagtcttcagagtaagactgttaaattcagcaaagtctactatcagaagacacggtgagcaatcttgtagaaagggagtttttcttttagttttaactctgagcacacatcaaaattgacgtttaatttatattttg

SEQ ID NO: 44122 - DNA, 2300 bp, Homo sapien
aacctcaattcttgacttctatgcatctgtaggcccaacaccacatggaagccatcaaggtttggggcttacaccctttgaaacaacagcctgagcagtaccttggccccttttagtcatggctggagctggagcagctggcaaacagaacaccaagttccaagtgtgcgcagagcagggaggcagccccaagaaaccattttttccttctaggccctgggtcttgtgatgggaggggctgccttgaagagctctgacatgccctggaagacattttcccccattttcttggtgactaacatttggctcctagttacttatgcaaatttctgcagctggcttgaatttctcctcagaaaatgggtttttcttttttatcctatcagttatcaggctgcaaaagttctgaactttaatgctctgcttcacttttaaagataagttccatttccagaccacatctttgtgaatacataaaactgaatgctcttaacagcagccaagtcaccccttgaatcctttgctgcttagaaatgtcttctgccagataccctaaatcatctctctcaagttcaagtttccacagatcttagggcatgggcaaaatgctgccagtgtctttattatagcatagcatgagtgacctttactctagttcccaataagttcctgatctctatctgagaccacctcagcctagacttcattgttcatatggctattagcattttggtcaaaaccattaaacaagtctctaggaagttccagactttcctacatcttccttgatttacagcctgccttgaagatctgtaatataaatactagtatgaagagatttttaaagaaagctaaaagcaagatagaagaatcaactgcatttatgtacatatgtaatacaataagaagtgtgcctaatgatgatgctaattaattgaaaaaagttaaattatgcttggtagtatttatttaagatgtggtcatatgtaatttatttcagaaagatttctaccacttggaaatcaaaatacataaagaggttaaaatgtaaaataatcacttatcccgaaaacctagatggaagcttcttataatgctagatacagtacttctgttgtcaacaaaaagtagtaatttagagtgggaacagagctaatattctcaagagcatccttttaagaattttaaaacattataggtgatagattccgcagtataatagatgacgcctggtggtttgggactgtggagagtcagcagccttttcaaccagagtatcctgatagttctttccagtgttacagtgttcagtaagtatgtttatgatcttttatgcctaatatgacattgtagtagtatgtggacttttaatagcctccatcaggagtaatgcccttttatctgacttatctagtctcacaatacctgtacctgtaaagaagaaatttgatggtaaaatgctcagttcttcccttgttttagtcaaagcaaagttctttgttttctttgactaaaacaaaggaataactaaacactttattgctacctcttttgttgtttgcattttctattaactatttctactttagacaagaattgcaactattttttaatgggaaatatggaaactaatttactacttaaagtaattgttattgctggaatatagctatgaatattagtacttagtcttttgtttagtcgtatgaattctaggcagaggtggttgcatcatgtttggaagtactatttgttttcaacatctactttaattattcttgaaaatccagagttgtaagattgctaatgaatgaatcctctcaagaatgatagacgaaatgtttattctctgaggactgacttttagtctccatattgacaaaaagtaggctttctgccctctaagtttcatagcgatggaccatgttttctctattagaagtttattgttatctgtatgtaaccggagttgtactttcaagacaactgtattgccctttttcaaatttcacccccaagaagtcatgtaaaattgtggtagtatatgaaaggaagtactatatgattaatttgatttgcatcttcttattttttaatagctgggacaataatgagagagaaaagatgagcccatgggatatggagccaattccagaaggaagtaaatatgcttttaaaaaatgaattataattcttttaaaagtaaaatggtaatcacatgatattggaaaataattttttctaatttttttttttttatcttatacctagctgcctttccagatgaagttggtgctggt

SEQ ID NO: 44123 - DNA, 2300 bp, Homo sapien
ttaaataacactcagtcttgggagatattggaaaagcagagatgaatgtgatatatgataggaagatagtagaataaaacattggaataagctattttctatcaaagcaatttattctcttctggttagcatatttccattatttatactgccctgtacccccacttaaaatgccttcatatcttactttggtacttgtaggttgtcttcaggtatgagctagtaagttactgatttgcaagtagaatttcatatcattgctagggaattaaggcttgaatggagtgaaatgctgcacgtccttttatgttcttgctcataaaggttgtagagcagggaaatggtattacacatgtgcttgtagttactgtgatgatgtcatatttattagccaaggagaaaaggtgtgaatattaattaaatgggagataaacttgaaaagaaatgaataagaaagtctaatttatcagactttatttcttgtacatttcttgtaagatctgatcacttggttactctgtcaaatctgactagaggacaagatgaaaaccagggctatgatatacttaagaaagaaaaagatttaacattttcattcagaaataatcattaagtttcagtgtatataaaaattttgtactcattaaaacactaaaatgttatcaaaagacagtaatagttgaaagatcatcatttcgacttctttcaaaaaggaaattttcacaaaagaaggaagcaaagcattttaggtatctgtggttaaacttgttcaaaccttactcaaaactcttatatggcatagctagttgttcttaggcagcaaacctgtacagcatgtaactgcactgaataccatagacagttatacatacaatggtacatatttgtatatctaagcatatctagacagaaaaggtacagaaaaatatggtataaaagattaagaatggtatgactgtataaagcacttaccatggaatggagcttaaaggactggaaattgctatgggtgattcagtgagtgagtggttgaatgtgaaggcctagaacattactatacaatactgtacactttatcaacactgtacacttaggctacactaaatgtatataaacaatatttttctttcttcagtaacaaattaaccttagcttactggaaacactttttaggttttttggttttttgtttgtttgtttgttttttaacttttcgactcttttgtagtaatacttagcttaaaacacaaatacattgtacagctgtataaaatatttttatatccttatgctataaggtttttctatttttaaaatttttattgttttactttttaaactttttaaaagttaagacacaaacatacattagcctaggtctacacagagtcaagattatcaatatccctgtcttctacctccacatcttgcttgtcccactggaaggtcttccggggcaatatggagctgttatctcttaggttaacaatgcctttttctggaatacctccaggaggaccttcttgaggctgttttacagtgcaattttttttaataattaaaaggagtacatttcaaaatgatacgaagtatggtatagtgcatacataaaacagtaatatagtcatttattaccaaatattatgtactgtgcataattatatgtgctatgcttttatataactagcagtgcagtaggtttgtttatgccaataacaccacaaacgtgagtactgcattgcactgtgaaggctatgatgtcactaaacaataagagtttttcagcttcattatgatcttatgagactaccgtcgtatatgtggtttatctttgactgaaatgtcgttatgcagcacttgattgtatttttaaagatgagaaggctctcataataatgtctaatttgggagcattggttaagtcagacacataagctagtacatcaaaaatatttacaaatgtttcatttgatatatactttattttacgtttaatgctgtttttaatcatttgtgtagaaatttataggttgtttttactatgtttaaggtatactaaaatgtaagtaattttgtggctttgtatctggtcttattaaggtgatggtgaggtagtagaacaggtaattgggcagcaaaccaatgaccaagatgagagcattcttgatggaataatcagggagctgcagagagaacaagacctgagactaattaatgaaggagatgttccacatttaccagttaatagagcatactctgttaatggtggtaagtatttttatacttgtaaagggtgtagt

SEQ ID NO: 44124 - DNA, 2300 bp, Homo sapien
attcacattttacaggtgaggaatgaggttcacaggctgtgagtggaccaaattcatagtcatttttatcatttgtaaaatgagaataacaattgaacctatctcctagggtcattgtaaagattaaatgaggtaagcacgtaaaagtgctgaggacatgataatggcttgttaagtgttaactgttacatacaggtcaaacatccctaatctaaaaatccaaaattcaaaatgctccaaaatccaaaatttttgagtgtcaacatgatgccacaaatggaaaattccacatctgacctcaagtggaggatcacagtcaaaaggcagtcaagactttgtttcgtgcacaaagttattgaaaatattatataaaattatcttcagtctatgtgtataaggtataaatggaacaaatgaaattcaaatttagacttgggtcctatagctgaaatatctcattatgtatatgcaaatattccaaaatctgaaaaagtccaaaatccaaaacatttctggtcccaagcactttggataaagaatactcaacctgtacattatacttcaactataaaattattcagtctggtattttgctaaactacttgcaatgagttgtctaggtctcatgtatctttttatatcattttgttgtatcaattattcatatttgttttgtcaagttccatggcaataacaaccaaagataagcctatcacttcacaattacctcctgtggttattgctttctgaggaaaaaaaaaaattacaagtgagagctaatcaacctaggctaagtttatgtcaacttagaaattcaaggcccactgtggtcagtggcagagctgagtgaggaaacccaattcccaagaatatagccttaaatttagatgaaccttcaaattgtaatatttcaatgtaaataatacatgcaacttaaaatgcatttctggtctcatcaggtttaggtgagggagtggggtggggacaggatgttacgggaaagtagggaagaaaaggacccggtttactaatctgtgtcaattatcataccaacccctttcatcattgaagatttcagcaaccaaatactgaaggtcagtgcggtaccaagggttggggttatatattaaacagtgtagtcccgaacctgtagaaaactattgataccttgcatagagataggcaataatacataaagattattgaaaactcttggttaaagtactttagtagtatttgaaaacacaataggaaattaccctgtaggaatgggatgtgttagatcccagccgtagatacggcacgtgttaaactttcagaaggggaaacatgcttcacggctgattgcaaatttctcatgcaatatttgtcagaatccaggagcattttaagtggtcttctaacaatataagccccgcactttggactggtaagtacaacattttcatttggtaaataataataattttaaacagaaacaagtcacgaccaaatagcgactcatcctcccccaggcataaaaccctttagccagctagccgcctttccacggggtagagtataaacagcaaacaaaaccgctttggtaccgggaggaaaaaggggaaaggagtcgagtcaaaacaccgtctcttaagttcctcaagatcaacccagggggaagggtcctccaccggaaagggccggattgccttcacaggaagggaaagtcactccggagctcgcagacgcgaatgccaccacagagttccaaggcggctgccagagcgtcggccgtcagttagcacctccccctccttcccagagctgtagctaagcaaccatcgggctccgggagagtctaggctcagctgctgtattagtgcctctagcggggaactatgagcgctgcaaaaccctatcaccatttttaccctcccctctctccaccccctttgcccccgcccacctcttcgccacttcggctcctccctcttctcgctccgtctatctctctctctctctctctctccgcccccccaccccccgcgtctctctctctctctctctctctctctctctctctctctctctctttttcctctctctctctctctcttctctctctctctctcactcactcactctctctctccctctccctctcctctccttcctcctccgcctcctcagctcttgggctagaatatctatgggtcgaaacgtgatgcgatgaattcgagagagagcgaaactaggacgaggagtgcggcggaagcggcgggactcccgggcatgggggcttcaccacaatagaggca

SEQ ID NO: 44125 - DNA, 2300 bp, Homo sapien
ctgcttctcataatttagggttgtgaaattatgacaaaagttacagaagaggaaaagaaagtagctaggttcaaaagtcacgaatttactaataacaatattatatattgagtagttactataagacgggcactctttaatgcatatttcgttacacttttacaatcccaagagaatggtattattattactcttttatagatgaaggaactgagggagaaaacagttatgcactgaactttaggttgtacaactagcgaacagtaatagcagagttttaaacctaagtttgacagactctagagaccacgctctgtagaaaaaaaaagtgcttcactggaaaacaatccattttctagactctagagaacacctctctgagttttctgattctaaaagctatttaataactctgtaaactgtaaacaaatggaaacaatgaaaaatacttcttatttatggatttgcaaattctgtctattcagaagtccaaataacttctcttttttggtccctcatcctactagaaaaaaccagttttgcttccatttgaacatttattttaatttttctgatctttaaatttatttgttcttcagagtctctttcgaaccagtagtcatatctgtgttgtttcctcatggctaaatgaaatatataacatatttgtatgacagtcatgattttacttttttttttttgaaaattgtctcttaacagttttccagagatgcctagtgagttcttctaatggaaccaagcaaacttaacgagagaagtgcacctcataagcggtttaagcccagaccagtctttcttggcttctaaaggtgactccaaattggcaatatagcactgctgactttctttttgttgttattgttgttttgagacagagtctcaatctgtcactcacgctggagtgcagtggtgcgatctcagctcactgaaacctccacttcccaagctcaagcgattctccagccccagcctccagagtaactgggattacaggcatgagccaccaaagcctggctaatttttgtattttttgtacagatggggtttcaccatgttgcccaagctggtattgtacccctgagctcaaagcaatccttctgccatggcctcccaatgtgctgggattacaggcgtgagccaccactcctcgccagcactgctgacttcctatttatctagttttgatcttcatctctactaattttgtgttttgatttcatttgtttttgttcatttgtggctaataagttatgtatcatagctaggagtaattactgggaatttggttttatagtctgaccatacacgaggaatttgattttgtacccttatcaatgatatgtgtaagtggattaaatgtttataatatctatgttgggtgagagacaacagggaatcgtatttgttagttttttttttttcaatttgttgtctgtctattttaattaagttcaaataattaggaattttttttgtctaacaggaaggggactagctctttgatatctagacgcgattttttatgtttctgtgtttattcttaattaatatctgaaatttttgtttatttatttgttttcttgagacagggtttttatctgtttcccaggctggagtggtgtggcacaatcacggctcactgcagcctcgatctcctgggctcaagcaatcctcagccacctaagtagctgagactacaggtgtgcaccaccaagccaggctaatttaaaatttttttgtagagttgtggtctcactatgttgctcaggctgttctcaaacttctgagctcaagagattctcttgccttggtctcccacagtgctagaattataggtgtgagtcactgcttttggccacatggctgaaattttggaatagaagctgtaaacccctctgtgtctgcatatttatgtgcctgtaatttataaagatcttgacctcccatgtgagcgtgtgattttctaccttcagatgttgttaataaattattatattatttctaacacaataaataaaagcaagtaatgtttacctcaaaaaataaattatatcataaagttacttaagttaaaaggacctccctgcctccgcgctgcagcccctgccgtagccgcccctgagcccgccaccaccgcctctgagcagaagatggctgtgccacctacgtatgctgatcttggcaaatctgccagggatgtcttcactgagggctatggatttggcttaataaagcttgatttgaaaacaaaatatgagaatggattggaatttacaagc

SEQ ID NO: 44126 - DNA, 2300 bp, Homo sapien
aattataaaattccttaaagacagaagctgtgtaatgcaactttgcatgctacagggtttcgcattttcataagctagtctacaaaaacaaaatccgactcacaaaataatgctaaataagaatttgttgaatggatgcattccactgctgacacattttcattcccttcatttttcttcttatccttatgaggcaatccttatattaaaatcaatttttatgcttatcttctaactgttggagaataaaatgattgaaacatatttaagttcacccaggaatgcttttaccataagggcaaaaagtgacatcaggaacatctagggattatcccaataactgtggacgaaggaagcaatttaaatatctttctgatttacttacttgaattagaatgcagtatgaagttgggggaaggaaactgagcagcagtcacgcaggctcattctacctgatctatgtaattccatactatcagtgctggggaagaatgggcaataataataataataatgatataaatatataacaaaataaaaataatatagcaatagtaaatataataattacaatgggttattctgttaggctgtatttttgcttgaagggatggtttggcactctgtagcagatacagtgtttatctcttaaactgattattccaaattttttaacctacataaacacaaatgaattcttcctaaagtaactgttcaaaaggttaaatttcttttttgattaaccctccaggataaggatttgggttgttgtttgggagcacttttatacacaggtagctcttacaacaaccacatcaaggcgcctctgagaaagggcggtggggaattagatcctctattttaatcatatttattcccaagtaatttattcatcaatctccacctcaaccctgaaaactttaggtctcagaaactgacactgaaaggcacctataagcctctcttacagtcgaaagtcacctaaatatggctgggactagagtgacgctatggagacattctcctttggcaaaaattttaaagggccgcctagaaactcagtaatgaagatacttaatatttttagacaatctttttaaatatcaaaattcttgcaaaaaagtccatgatgaacaaaatatcaaaaatttaaataaagacaggatcataccctgcacttgcgtgactcacctcactcgcctcatcctagtctcctgggtttttgtcacaagcttaaattttgtgcctgaggcgagtacctcaatggctttatgctagtctaggttctgagtcctaaacactttcgtggatagcaccttcttgagtcctttcactaaatgcaaccttcagattaaaaatctattctcagtgtttttcatttggatagacctctgctattacacatttccctcggagtcccgctgaattcttcgtatacctcctccaagtgggataacggtatagctcccggttttgtcgctactctacacctgcggaaaacacgccattttggcaccctcctcttgccagcaccacagttctgctttggcaggatgttcccacaccagagaaacatctccactcttttgcgctttctgaatgaatgttcttgtcggttcaacaccatcccgccaaaggtggcagggaaagaccggagcccagactcaactggtcttaaaagcacttatcccgctaggaatagggaagggtggcgggtttggaggctgtgaagaaagcaactgttgtggctttcgcctgtcattataacataaaagaaaaaaaaactgatcaagtcagctctggctttcctgctgttcttattcctgatcgcttagcccttgctaagttcgcgtgctccgccactacaccagcggttagagccgacagggaacgagggcttcgggcaagttcgcgggccacgcccctcaaagccggctgcctcttcttattggcctgagagcctgtcactccaatgtggctcccactccggttaaccattcacgtagtttggttgcgtcttggcgtgtttaatgttgccaataacgagggattttttttttttccagaggagagtacaggtcgtgctgcagttagttcattgaaaactcatttgctcttggagcagtcaggcagtgactgccttcggctttttttctgctgactaagatctcctatagagagctacaacaatgcccaaaagaaaggtaagtgaaatggaaagacagacggggaatgagctgctgagttacctatttcctaataggaagaatttatttgtttgtttggttttttttaaagct

SEQ ID NO: 44127 - DNA, 2300 bp, Homo sapien
aagcaatggcaacaaaagccaaaatagacaaatgggatctagttaaactaaagagcttctgcacagcaaaagaaactatcatcagagtgaacaggcaacctacagaatgggagaaaatttttgcaatctactcatctgacaaagggctaatatccagaatctacgaagaacttaaacaaatttacaagaaaaaaacaaccccatcaaaatgtgggcaaaggatatgaacagacatttctcaaaagaagacatttatgcagccaacagacatatgcaaaaatgctcatcatcactggtcatgagagaaatgcaaatcaaaaccacaatgaaataccatctcatgctagttagaatggcaatcatacaacagatgctggagagggtttggagaaataggaatgcttttatactgttggtgggagtgtaaattagttcaaccattgtggaagacagtgtggcgatcccccaaggatctagactagaaatgtcatttgacccagcaatctcattactgagcatatacccaaaggattataaatctttctataataaagacacatgcacatgtatgtttattgcagcactattcataatagcaaagacttggaaccaactcaaatgtcccagtgatagactggattaagaaaatgtggcacatgtacaccatggaatactatgcagccatagaaaaggatgagttcatgtcctttgcagggacatggatgaagctggaaaccatcattctaagcaaactatcacaaggacagaaaaccaaacaccacatgttctcactcatatgtgggagttgaacaatgagaacacatggacacaggacagggaacatcacaccccggggccagtcggggggtggggggctggaggagtgatagcattaggtgaaatacctaatgtaaacaacgagttgatgggtgcagcaaaccaacatggcacatgtatacctatgtaacaaacctgcacgttgtgcacatgtaccctagaatttaaagtataattaaaaaaaaataagaaggtggcctctggagttcctaactctggaatgtactaaccatatgattttaggaaaactatttttctgagtttcagtttcttcatctgtaaaattaatgtaatagtacccacctcttgaggttgttttaaggacaacatgtaaagagattaatttggaattagtatttaagacagattggagaagggaaaacctgtgggtagggaacagttaacaaagctattgtaagcactgagcctaggcaaagacagtaaaccactagactggagacagtggaaaaacagcaaaggaaaagaagtaggacaagcgactgactcctctccactctcattcatcttgcaaattcctttttttctgttcatttaacataatctgggaacctaaaactacactttgaagtatatggtctgtctctggacattattaactgtttgctcatttccttagagctacaaataaccatctgatctctctcttcaccatttcaacatctgcaatatgttctcccaaatcccttacttcagtcagttaaaaagcaaaacaaaacaaaaatcatccatctttttacacaatattttcaatcttttctttgtaatttattccttcattcttaaacttgccaatcaggcctcctgcaaattcccacggaagcagggttccctaatttaacaaaacacaaaattcaaaaagaaaaccaatcctgccatttctgggcttaaggaaacctgaaactttccttcaaaactctgcagcattgctcagtactttagtgcctaattcctacaacgagctaagatcagaaaaatcactacgtaataggaatcttaaaatgcgcaaggctttgagaacatgggttttcaacatacagcttgctctttcaggatctgtcttcttatttgcatatatttctgagcaggaagttatgcgcagtacttttagtctccgcgtgaaaaggtccttcatgctaatctaattcaattcagttctcctttttctttcttcttctcctcgccctcttctcagggaaggaatcgtcaaaaatcaatgtttcaacagatctcgcggtgctattcgagattccctattaaaaaaaaatagaattgatgcaaacagcctgttccttccggggttttgggctggaactgcagcgcttagagagctcggtggaagctgctaaaggcggaggcggggctctggcgagttctccttccaccttcccccacccttctctgccaaccgctgtttcagcccctagctggattccagccattgc

SEQ ID NO: 44128 - DNA, 2300 bp, Homo sapien
ggaggaaggcaaaggttgtaaaattacctattgggtactacgcccactaccagggtgagaggttcaatggtaccccaaaccttgcacagtatacccatgcatcaaatctgcacatgtaccctctgaatctaaaataaaagttgaaatctaaataaaaaaaaaaaggagtccaataaaggaaataatagaagacagcagccatttctaaggctcttggaaacttaagacttaacaaagagaggtgcagttattcttacttgaatagaaattctgaaagcagtttcttgttgaatctacttttaaagaaggggtagaggaaggagaaagcaaagaataaataacagtattgaaactgtatgactcccaaagcaaaactaactgcctgatctgttcagtctcattaggggtttaactaaaggcattaagttggactttacaattattggattgagttgagactctgagcaactcaaattttactttgaaatattagacaacatgtatggaaaataataaagcaagaggctcataaaattaggtccaaaggaaatataaaaggtgttcttttttttaacctaaacttattcaaaaaatgtaagattaaattttctgatattccaaaattgcataaacatatccacacatggtggccagagaagacaaagttcaaatatcaaggttcttgtgatttaacataacctccacttccattccacatcctctcaggtgtaaataaacaagccaaaaaataaaaacacacaacaacctggattagctgctgctctaaagctcaagaagagggaaggggttcctataccctacaatctgaacccacacatctgttcttgccactgtctgcctttctcttgagttgtaaaaagcagaagcactttcatttatcatggatatacactcatcttgcaccccagtttatcatattctcccgacagctgctgaaaatttgttattctaaattaagagtaagtgaatccatgaaagagaaagtcctatcatttgaagcagcagcaactcaggctgccactacacaagaagccactgagctccctatccagttctcaatatacttgaagcagtgagagaaatttaaaagtaaaatattttgaaagaatagaaacagtcaaaataagggacaatatggggggaaaactgaatctcgtgtcatattaagttaaaaaaaaatttacgtcattgttaccaacttcccctcccaatttgtctagttctaacaggccttcaagctcaagttaaccactttcttctacacactctcaaaataactctattaccagggtctcactcacccagaataattacaatgcctcggtaggcctccactcaatccccaccagttacagcatgtgtacccccatcctttacagaagtgcactcctccttgtctcagtacttagggcgtattcatcaaatgtctcactcttgaaactcaccagtgtgcgattttacttgacttcacgtaaccctaaagaccgtatagcaccatctcccatctcccaaaacttggtagctttcgttttccttcaaagcagaaatgtgccccccaacgtcacgaagcaaacaaagctgaactctatgtggaaaaaaaaaaaaatgaaatcgatgcaacaaagggaaaaaagggaagaagaagggtgggatcggggatgcatgagtcttccaaaggagaagctgccagaggaacttctgcattttaatggttctggggcagcagaggactggtgtgtaggaaaacaacaaaggtggactccccactctccttaccgctgtagagccagaggaagatgcaatatatacacggatcaccatcctgggaacagcggctgcggttgtttgggtcctgaaaagggctgtggagcagctgcagcaatggctggaatccagctaggggctgaaacagcggttggcagagaagggtgggggaaggtggaaggagaactcgccagagccccgcctccgcctttagcagcttccaccgagctctctaagcgctgcagttccagcccaaaaccccggaaggaacaggctgtttgcatcaattctatttttttttaatagggaatctcgaatagcaccgcgagatctgttgaaacattgatttttgacgattccttccctgagaagagggcgaggagaagaagaaagaaaaaggagaactgaattgaattagattagcatgaaggaccttttcacgcggagactaaaagtactgcgcataacttcctgctcagaaatatatgcaaataagaagacagatcctgaaagag

SEQ ID NO: 44129 - DNA, 2300 bp, Homo sapien
ttcttccagaagcggaatttcaggcacaaatgagattgcattcttgcaaaggaagatgcaaacagttagcagtaaagaatgagttccttagcagaaaaggtggggagttggggggggcgggagagagagaaagagagagagagaaaggaaaactcaatttctaaaagcagataagcctctacaataagacgtgggcaaatgaagctacagtttcaatgagagagcaggaagagggggtgagatggcaaatgatcctctctgccaataattactaagtgtttaccttaaaaaaaaagagtgaaaaaaagaaatagatctgaatcagatgccaggttttcatgcctaataaacacgtttacacttaccaatatcagctcctattgctctgtgctctcataagaaattactcatttcacaggaaatagatgctctttagctatataaaggaatggcagaataagctcaccttgtttttatttttttctcattttcttgcacattcttcagatctgtcttcttagagaaactaatgccttaatgactttctggtagcagcaagccttcttttatttctgctaaatatatgaaaatgtatgcaaatttaaatcaagcttaacctaggcgctcttgcaatatatttaatggaatttcaaaccaataagggaactctgatgccgtcttctgtaagtgcaaatataattaggcagctaggttacctccaaaattattcaacgaaaggtcatttttttaacttcaaagaccatgttgggtatctggtgttgccttttctcagctagaacaaatcaaatctttgcctttctccccactctgcttccaagcactgcctttgcgccgggctgtggagcacacggacttgtcctttcctaacttataaaagcttagaaggagcacaagtgtttcacctcttttattctatccaaaatgtaaaagcagtcctatcttttcaagctgaaagcaaattcaagcttgatggggactggggaagtgggggcggtacttgatgccaaacatcccgccatttctctctctctgaatttcctgggcacattaaatgcagggcgggtgaggagggtgggggagcggtgaaggttaaaaacaattttcctaggggatggcatcggggcgcggggtcacgaacgttttcctgtatacctattcgtagtgggtctgcagagtgttttgggtgagtgtgagggctgcccgcttcagcaagcagaacctttgacagaagttgtgggatctgtgatgggaactgatatggagcagtgagaaagcaaggtttccaattgaccagctagattgggaagcaaacttcgaaataactgaatattgtcagtatcacattagattttactttcccagaataattcagttcttcgtgacctaaaaaatttttcagaaaaattgaaagaacaggatatctcttagaagctttcagaccttgatatcgaggttcttaatacaatgaaataaactgaaatgttcttattggaatcattggtttcaactttattggtttagggtccaatcgaagacgttactttgctcaaagtttgtagcgacgttttgttttgcagtcctaggcacacaactagcccgcccagacagccgagtgagtctgaaaaatccctattcactgagatcaaaatgacatttaaacttgctttactttttctttatttagattaatctaaataatcaaaaaggagttctacaaccttaattttccacctcactccctgactgccccccaacaacacatccctcacatcttttccccatcaacataaaccccgcggtggggggggtagtaatcaaatgtacggccgccactctgcgctaggcagccaatggagctgaaagattgattcacttcctgcttgggtctcattgaaactccggagcttcaccagcctaatttggaaagcgagcccgacctcccgcaccgctattggccgggcttactcctggccaggcggagacgcgctgcgattggccgtggtgggtgccggtaacccgtgctagcgtctttggctccccgcaccgtagatgtcaaaggctgaagctgctccctttgccacattataactagtaggggatcctcaccgaccatggccacagctgcctcgaatccctacagcattctcagttccacctccctagtccatgcggactctgcgggcatgcagcaggggagtcctttccgcaaccctcagaaacttctccaaagtgattacttgcagggagttcccagcaatgggcatcccctcgggcatcac

SEQ ID NO: 44130 - DNA, 2300 bp, Homo sapien
ttattttgaaatacgtcccatcaatacctaatttattgagagtttttagcatgaagggttattgaattttgtcaaaggccttttctgcatctattgagataatcatgtggcttttgtctttggttctgtttatatgctggattacatttattgatttgcatatattgaaccagccttgcatcccagggatgaagcccacttgatcatggtggataagctttttgatgtgctgctggatttggtttgccagtattttgttaaggatttttgcatcaatgttcatcaaggatattggtctaaaattctctttttcggttgtgtctctgcccggcttgggtatcagaatgatgctggcctcataaaatgagttagggaggattccctctttttctattgattggaatagtttcagaaggaatggtaccagttcctccttgtacctctggtagaattcggctgtgaatccatctggtcctggactctttttggttggtaagctattgattattgccacaatttcagctcctgttattggtctattcagagattcaacttcttcctggtttagtcttgggagagtgtatgtgtcgaggaatttatccatttcttctagattttctagtttatttgcatagaggtgtttgtagtattctctgatggtagtttgtatttctgtgggatcggtggtgatatcccctttatcattttttattgcgtctatttgattcttctctcttttcttctttattagtcttgctagtggtctatcaattttgttgatcctttcaaaaaaccagctcctggattcattaattttttgaggggttttttgtgtctctatttccttcagttctgctctgattttagttatttcctgcctcctgctagcttttgaatgtgttagctcttgcttttctagttcttttaattgtgatgttagggtgtcaattttggatctttcctgctttctctcctgggcatttagtgctataaatttccctctacacaatgctttgaatgtgtccccgagattttggtatgttgtgtatttgttctcgttggtttcaaagagcatctttatttctgccttcatttcgttatgtacccagtagtcattcaggagcaggttgttcagtttccatgtagttgagcggttttgagtgagattcttaatcctgagttctagtttgattgcactgtggtctgagagatagtttgttataatttctgttcttttacatttgctgaggagagctttacttccaagtatgtggtcaattttggaacaggtgtggtgtggtgctgaaaaaaatgtatattctgttgatttggggtggagagttctgtagatgtctattaggtccgcttggtgcagagctgagttcaattcctgggtatccttattgactttctgttttgttgatctgtctaatgttgacagtggggtgttaaagtctcccattattaatgtgtgggagtctaagtctctttgtaggtcactcaggacttgctttatgaatctgggtgctcctgtattgggtgcatatatatttaggatagttagctcttcttgctgaattgatccctttaacattatgtaatggccttctttgtctcttttgatctttgttggtttaaagtctgttttatcagagactaggattgcaacccctgcctttttttgttttccattggcttggtagatcttcctccatccttttattttgagcctatgtgtgtctctgcacatgagatgggtttcctgaatacagcacactgatgggtcttgactctttatccaatttgccagtctgtgtcttttaattggagcatttagtccatttacatttaaagttaatattgttttgtgtgaatttgatcctgtcattatgatgttagctggttattttgctcgttagttgatgcagtttcttcctagtctcgatggtctttacattttggcatgattttgcagtggctggtactggttgttcctttccatgtttagcgcttccttcaggagctcttttagggcaggcctggtggtgacaaaatctctcagcagggaggagccaagatggccgaataggaacagctctggtctacagctcccagtgtgagcgacgcagaagatgggtgatttctgcatttccatctgaggtaccgggttcatctcactagggagtgccagacagtgggcgcaggtcagtgggtgcgtgcaccgtgcgctagccgaagcagggcgaagcattgcctcactcgggaagcgcaaggggtcagggagttccctttccgagtca

SEQ ID NO: 44131 - DNA, 2300 bp, Homo sapien
ttttttttcttttacttcttaaattcctactaggcacaggccgtctcttaatggtgtcccataattcccatagactttctccattattttttattcatttttctttttgttcttctaatttagtaatatcaaatgttgtcattgtgctgattaattcttactgcagcttgattgagcaccactgctagctggtacactgagctaccacccaaatctgttcactggtttccttgggctctgtttcctttcttcatttctacctgatcccaagtggtctacttatgaattttccctctatattccctgtttcccataaggtggaaactgagtaggcctcctgtctcacaatgccggggaagctggatgtcaacttccctggtcatcttttcccactgtagatgccataaatcctggggaatcctctctgtgtggtgctgtgccaacctggggctgtttgaggggtgatatgctcagagtgaaactgtttctgctaccatttcaatgcagattttcattctgttccattgagcatgcagttgacttaggataattcccacattttgaggttttaaccaagttgttcttttaaattttattttctatagttgctagttgatatttctgtggtggagtgaagcctgggaccacctattttggcatcttgctgatgtcactctacttgtagaaatgtttaaatgcaaaatattatatgcagaaaaattacctataattattagcatttttatgtgtttacatcaatttttacaataaatttatttgctttatatgatatatatcaaactgcatgaatagttttatgttccattttttcaagtaaatgttaagtatatgatgatgagcaaaatgaacatgattcctactgtcatgaaaatataggatttactgaaaccattccgtagtttcgaacatttagagtatttctagattttaatatttatgtagaactgtaattaatgcctttgtgctaaatattaatttacttaggaatgaatttactctgccagaggagtgaaattacatttttatggcttttaactcatagttaatattcctttcaaatacataatagtggttcacttttacttagaaattaaatggccttatattaccttccttaagataatgctatttgactagcttgtgaaattagtttgttcaatgaaaaagttatgagatatactgctttgtactgctcaggtaaaaattatcttggtgtcttggatcacatttttttcattaaaagataaaatatcattattatataagaaatataaacttacaaaaatgaaataaaaattcaatgacaaaaagtggtgaaaaataaaaactaatgaattgctttttctcctgtggctagaaatatggtcactgttatctaaaacacatatgggcaattttacctgtatacattcctacctgcccagaaaggttttttatctataatgaataattcacatttatgggttttatataccaagtagctgtttataacttgttctaacacaactctgtgcataataagagttgttttaagctttgggtgaaaagtttttttcagatttgtcaatagtagtttaatagatagtttacttttgctgaatttacatatccaagaataagacatcttcaagttattttatggaaataccactataaatgtacaaaaaggttgtagaggagaaaagcctaaaagtgaagaaaatgtagtaagctaccactgctctttttagaggaaaacttatattcttctattttcctttcagcacatatatctcttacacacacaaatatacacacataaacacatctttgtgcacacatgcacattcaaagttagtgttaaaataggctgatatgaaataattaaatatttaataaaccaaacaggtagattcaattaatgaatactgactaattcagttcaagttttaaaaagtggagtgtgaacacatccacaatttaaaaataggtttcaaaaacacctgtgcactttaaaatatgactactctgtcccttttaaatttcttttatttacaatccctttatgatgtcatcactcaacattaccagtttcaacttactatgctcaagtccaggcaacgtacaggcaggggaaatgtctcttccaaggttgtaagtcctctttttaatatttttttagtattttaaatagccaatatgctcaatttagttacaaatgtatatgtttaactgtaaagaatgtttctttcatagtcgttttatttatgaattagaacttgtattttaaacagagatat

SEQ ID NO: 44132 - DNA, 2300 bp, Homo sapien
aaaatggaatgcagtatttccacctagggccctaattcctgtggttcgggatgccactgaggtcagagaggtgctaaaagaaacactcagatgtaatcaatcaagacttttactgactgttgtcaacaccgtgctagttattatgaagactatagcagaagttatattgtctgcaatctaactaaagtgacataaagaaaaaaaaacaggatagacgagatgatgtagatattttcaaggaaacagtaaatctctattttctattcctactgtctgattatataattttaccatcatgatttaaatatctgtgaaaattagtttaatgtagaaaataaaattacaaatttcattttaaataaaattcaatgataaataagaaaaatggtttttattttctctgattgctatgcaaataaactaggaactctgaggaaaaaatctatattttaatgtataacttagtttaatttaaataatatgtttcttactcaagaataattcaggtctgtggaaaatctgacattaactccaaattgtttattatcctttctcatttagtcagtgaatcaagcagaaaatcatggaatcaaaaacactttgctttgacatttcccaaaccactccagagaggtacaaatgataaatcaagacctttgaaatcacaaataacagttactgtaagtatagaaaaagtcatttttaaaaacgaaatctaagttggtaaagcatatataaatataagtaaggcctatataacttgaattttactacctgttggaagatatttttaaatttgtaattctctgtacaacagactgcccctacctgctttagattaagctcatatttgtacataattatccacatcaaagacattatctaagcaagctggagaacctaatactgcacctggcaagttctatcaggacatgtttaccagctgcaaaaagcagctaaaatttaaatattagagcagaaactgatcttgatgaggtttcaaggcctccttattttacaaaatatgaaattcagagacgatattaagagattcaagttttctactgtttctctaaagtcgagttatcctatcaattagcaaaaggaaaaataagcatatataggtcacctattatgatatcaaacaatttttaaagcatctcccagagcaaagttacagtcaatgcatttattcaagggtcatttattacatttttagtgatccaactttcatgtttctcttcaggtcatcttttaattccatattaccatttgcttgttggcacctctactgaataattgagggaaaataagaagtaattttaaaatcagtctttatggttatttatgactacaagatttggcaaatatttgggtgagatttgaaaataaattacaccactgctgcacaagttaatgtgaatcaagcatctgtttatttcattcagtttatgcctttgtttcttttttttgtgcagtgcagttggggtcacagactctcaatttgacaagacactttaaaagcaggagtagaaattaggctagggttttacaactattacaggaactgtcataacaaacttcaagtggatcagtttatttctgatttaacttggggataaacagtgttcaatattttccaaaagattctccccatatagaagtcccaaaagcctactgttggtatttgaggacaagtcctggaatgtcatgagtcactgtgggcctgctctaatctcaatatgaatcattaatggaatcataaaattcccactaaagtcattttatttccaaagtggagttatatgtctctttctgtctctctcttacacacacacacacacacacacacacacacacacacagacacaaccttgaaagagaaaaaaactaagtttaaatagatggttaataaaaatataaacttttttatgtttcaatatagaaagataaaactcattcacaaatgcttattattctaaccaatcttttcagagacatgacaaaagaaaactagaagaaggccagaaaccagctcataaatggataaggcattctttcagaaaaattttgcaatggccacccatttacacagctgccagggaacagactccattcagacatctttatacttccaaaacccatcttaaaaaagcagaatataaaaagtccaaagatgaaaaaggaggaacacctttgaagaaagattccaagaaaaaaggaggttcatatgcaacaaatccagaatccaagcaaatagtagaagagaaaactaaaagacaaaatgaggcagataaaac

SEQ ID NO: 44133 - DNA, 2300 bp, Homo sapien
cttaatatattgaaaacttttcctgtgaggttatattaaatttacaacttttttaattgcaacagagataacataagcaaacgtacacttactttgatgaaaaacttaaaatgcactggggactactatgatagaagccacttgctaacattggatttatggtttgctttcttaatatgttatatagtaagccaccatttattgaatggattaactacatgggaccctcccttctatgttttatctgtgtacacatacccttacaccttggggcccagcttaacagcaaagttcaatagctcctgtctcctgctgaacatttagcatattccaggataacttctgccattttacattttcctcctccgtcactaatcacacatccaattccacagatttggcatcttccgatttaaaagtggtgtataaggatttagtatatattgaaaaatatctctcaagattctcttgagagttaactgtgtagagtatagattttactttgcataaatgtaggtgaaataaacagattgcaaggctattgatgctgtcacattttcagcaaatgtaaaattatgtatgtatacatgtatatatatatacacacacattttttttaatttaggatttgctttcccatatgcttcatatggacccacatcagcggtatactgctgaacaaatattaaagcactcatggataactcacagagaccagttgccaaatgatcagccaaagagaaatgatgtgtcacatgttgttaaggtaaaacaaacatacttttatgtgccttcgagatatcagatacctaataaacccattgtgtgccacttgctgatgacacttaaataattccttaaaatatctttattttttaaagatagatttttttaaattaacaaccatgtacttttcttagcttactttactactgcctttcagatgaaacaataaaaatttcttgattgtacctgccgtgcttttgagagatgctggaattaggattgggctaaatgcaagtttcatattgaaataaaagattgctgttagttcttaatttataactgttcgtgaaaccattcctatatccatatacattgaatcaaggttttaaatgttagtgttttaacaattttttgtaaaaagcatagttattgaaatgaaaaacatacaagtaatattgattcatcagtgcacagatctaatatattcaattattttcctaggaaaacattttgttctagatatatgtctcatgatatcatgtgaaagttttttttttttttaactccagaatttgtacttagtttgtggcattttctcattactttagggagcaatggttgcaacatactctgccctgactcacaagacctttcaaccagtcctagagcctgtagctgcttcaagcttagcccagcgacggagcatgaaaaagcgaacatcaactggcctgtaagatttgtggtgttcctaggccaaactggatgaagatgaaattaaatgtgtggcttttttcctattcttatcaaaggcatcgttgtctgctaaattacttgaatattaagtaatattaaatccccatttttaggggaagtgagatttaaaaaaccattcacaggtccacaatattcatactatgtgtttgcagtagtgttcaagtgtttatttaagcatataattggtgtccaccaggtcctcacaacttctctgcacacaagcttctaaaattcctttcaaataaagttactttaatattttttttcttgtttcatacaattatggtttggggagtcattaccaacaatcagtatacatatataatagtataatgacaagcaatgttagtatttttaaacatcagatcctgaaggataggctttttctaatgaaagaaaaacaacaaaaacttattataaaagcttgttattccgtaaaaccaaaggactccattcatttgactcactgtagttactaaaatgtaaacatagtggtttggtgccagagcaaaatacatttgtgctaatatatgaattcttgatatagttggtgccaaagtttttatagaagaattatatctcagataatgtgtgcaggcagatctgtatattatccataataagtggcctcatttagaaataaaggtttttataaggcttctgtaaattttacatcatggaaatttagtacaagtgaaactttttttttttccaaaggctttatactgttggtgtaatcttataaataggtcatagttaagcctttgaaaatgaagtatgtggtgttgacactatcctgg

SEQ ID NO: 44134 - DNA, 2300 bp, Homo sapien
tcaagcaagctgtcaataacatgtttttgctgacgggagagatccagtagagagaaaaaaatagatgatgttagtgggggggcgggttgcagaacaaagcctttgagtaggcaagaagggatggatgagacccagcgctcaaaaggttggcagtaccaggcacagcagctcaggcctgtaatcccagcactttgagaggctgaggtgggcggatcacaaggtcaggagttcgagaccggcctgaccaacatggtgaaaccctgtctctactaaaaatacaaaaattagccgggcgtggtggcgcacgcttgtaatcccagctactcgggaggctgagtcagaagaatcgcttgaacccgggaggcagaggttgcagtgagccaagatcgcgccactgcactccagcctgggcaacagaatgagactctgtctcaaaaaaaaaaaaaaaaaaaagaaaaagaaaaaaagttggccctagttaatactgtcagttcagccaaatatgagtttatgggtgtgtgcgtgcacacacagacacacacactctcacacattttcacgatttatagccccatgcacccactactttcgaagctttgacttttagagaaccctgttcgttaagctcactttctcctcgagattttcagcagagtaagtgagaggacattatcagttatccttgtttgtaattcagtgcaatctctgtggccagctttgcttcattagctcttgagaccagatgatgaaataaatggagggcataggtcaacagccctaggtgtagaagggtaaagggggtggtgtgccttttatgaacgttagaaacctctccaaggtcctgagttggtttagccgctgttacagttgctcttttaagtctttgaagtgtcaaatgtggaataacttttaaactttcagctctgaagtgttttgatgagaagcatcttgattatcccccgtataagattatactttatctctgttatatcgccagctcccagtacaatgtgtggcttagagtagcgaagtagtaaagctcgctttgaagaaggtactaaaaactatgattattgtcactacagacccaacattctcagagggggctggaggatgggctagcttcggaatcatgcctttgttgccacaagtggagttcattaagtggcatatgtttgcctgtgtgtgtgcatgtgtgaagagaaacattgtgtgttatcaatagtgtgaaggcaaccagcaggagcatcctgagagggacaagtaaggtgggggctagagaggacaggtatatttatttttttaaatgggggttatcctgcctttaccttctaggaggataatgtatgatgtactaaaatccctgccctagtatttgtcactaagtatcgaaatgggcgtggtttggcatataagacacctgctcttcgtgagccctgcaaagagatactcttggagtcctacccttaccctgattcctcaagtgctctggagggtcccccagttccagcatcctttttgagaatcctgccgcccgccagcaatgctgctccgtggacttgagagggcctgctgagcatgtgtgaagagcgctgcgcatgctccgtggagtgggcaggtttaccgaggcgctagcaggggcttttactactgttcagtcgcctccccagcccagcacgcccccctcccctctatcccaccacccaccacgcggtcccccgcatccaccccgcccctctatcccgcccccttcaccccaagctggggaatctccattgacgtttgggtgacgccgctgtgccgccgccgtgggggggtccaggcgccgcacaggtaacgccgccgctgccgccatattgacagagcagggagcggggaggggacccgaggaagtggggtgttgggggagtcaccaccgagcggctgtcgttgtggtggcagtggtgagcgcgagccgagcggcagctcttggagaggcagcacagagttgtcttctctatgggaatcaccgggcggcggcggcggcgacccccagctcccagcctctgagagacccggcggcgagggcagcgctcgctgaaggcggggctgggggtcgcggcggcggcggcggcggcggcggcggcggcgggccagttcaatagacaggatgcgcggccgcgccagcggtaggcggcagctcctgtttgagtgctcctgaaggggagatgctaccattcgctcctcaggacgagccctgggaccgagaaatggaagtgttcagcggcggcggcgcgagcagcggcgaggttagtgtggtg

SEQ ID NO: 44135 - DNA, 2300 bp, Homo sapien
gcctgtaatcccagctactcgggaggctgaggcaggagaattgtgtgaacttgggaggcagaggttgcagtgaggcaagatcacgccactggattccagcctgggggacagagtgagactctgtctcaattgtgggggaaaaaagcctaaaggcttcatcgataaactcttagaaatgattaaaatttcagtaaagttgcagaacacaaaatcaacattaaaaagtcagtagcatttctatgcaccaattgtgaactatctgaaaaagaaatcaagaaagcagttccatttatagtatctacaaaaaaataaaatacctagcaataaatttaacgaggagaaggagctctacagcaaaagctaaaaaacactgataaaagaaattgaagatgacacaaacaaatgaaaagacatctcatgtttacgaattgcaagaattaatattattaaaataaccatactatccaaagcaagctacagattgaatgtaatccctatcaaaataccaatgatattcttcacagaaatagaaaataaaaacaattctaaaatttatatggaaccactaaagaccccaaatagccaaagcaatattcaacaagaacaaagctggaggcatcagaaaacctgacttcaaattatgctgcaaagccatagtaacccaaacagcatggtattggtataaaaacaaacagtagaccaatggaacagatcagcaagtggagaaataaattcatgtttttaaaatcaactgatttttgacaaaggtgccaagaccattcatttaaaaaaggacactgtcttcaaaagagggtgctggaaatactgtatatccatgatccatatacagaagaatgaaactagatccttatctctcactacatacaaaattcaactcaaaatggattagagacttaaaaataagacccaaaactatacagctactagaaaaaaaatgtagaggaaacacttcatgaccttggttaaggcaaagatttttagggcaaagacttagataacacaggcaaagcaaaggaaataatcaacagagtgaagaaacaaactttagaatgagagaaaatattttcaaggtatttatccaacaaggaatgactatttgcaatatacaagaaactcaacagcaaaccgacaaacaatcccacttaaaaatgggcaaagcatctgaacagacatttctcaaaagaagacatgcaaatggccaactggtatatgaaaaaaatgttcaacatcactaatcatcagggaaatgtaaatgaaaaccataatgagatgtcatcttaccccagttagaatggctattacaaaaatataaaaattaacagatgctggtgaggatggagagaagagggaactcttatacactgtgagtggaaatataaattagtgcactcatggaaaacagtatggaggtttctcaaaaaaataaaaatagaactactatatgatccagcaatcctactgctgggtacttaccaactgaaacgaaattagtatatcaaagggatacatgcacccctattttattttttattgtagcactattcacaatagccaaaatacagaaccaacctaagtgtccattgatggattaacagataaagaaaatatggtgcatatatacaatggagtactattaagccacaaaaagaataaaatcctctgacttgcagcaacatgatggaattggaagctattatgttaagtgaaataagcaaagcacagaaagacaaatagtgcatgttctcatttatatatgggagctaaaatttttatttcatggaggtaaagagtccaatgacggttttcagaagctgggaagggtggcggtgtgaaggggtgttggttaatgggtacaaatatgcagatggataaagggtataagttctagtgtttgagagtacaatcatgtgactatagttagtaatttgttgtatacttcaaagtagctagaagatttgaaacgttcccagtgcagagaaatgatgagtctttgaggtgatggatatcctaaatatgctgatttgataattacacactttatgcatgtatcaaaatatagtatgtactgcataaatatgtaaaattattatgtatcaataaaatcaagaaaacatttttaagataagtaatgtctttgttggaccttcaattaagtgtaggttttaatcttgttttaattaaatttccattcaagtatactagatcatactcaaagatgtaaacagcaggcaagttaggtagaagctgtgttgcctttgtataatttttatggttatata

SEQ ID NO: 44136 - DNA, 2300 bp, Homo sapien
gagtgagaggggaaaagaggaaggaaaaattggattaatttaattgcctctatttgtactgtgatttcatacaagtcttcttgtgtctttgcattataaacccttcaagggtagggactctgatcctttttctcatatcacttcagtttcaggtaattcataaacgtaatttatgaatacgttaatcaattatcaataggctttttctgaatcctccactttacccatataattccttctttgaaagtctcatatttcatcatttttaacaccctaatctaggggtgtgtcacctagaagctgggttagcattacaactgtctaactggtctctctcactccagcctatcgcaatgttactgaaaatgcaaattaatgacttgaaaaatgtgctttcagtcattcattcaatacgtacttacttatttgtctactttgtatttagaggctttctagatttgagggatataataataaacaaaacagacaaaaatccctgccttcatagagcttacatttgcaataactaaatatataaaatacatttaataataataaatactatgaagaaaaatgaaacagaaaaaagggtatagagagtgttaaggatatcacaattttaaataggaaaacctctttaaagaggttgcatttgagcaaagatttcaatcaagtgatggagtaagtcatataaagatcagacagtacaacagtacagggtcactgctgtggacatgagcttgacttgtttgagaaatagaagattaatatatttgtgaattagtggctgagtgacaggaggtgaggtcagaaagatggcggaggccagatcatttagggctttgaggacatggtaagaaatctgcattttattgtatatgtgaaaggaaaccattgaacaatctgaagttgagcataatctggcttttgttttaaaaaatcacctaaactcctctgtagataattgactatagaggattgaggtcacatgctttatggcttttggtggcttttaatcaaataaaagttatctgcctattttcaaaggcttttattattagccaattccatctaccactagtcctcagcatatgccctctatttgtcaagctgatttcatcatgggcttcctcacatcatatgaatttatacgtctctacctttgcctatctttcccctttaagacggtgacttccatctgctcttatccaccattcaagaaccatctcaagttttaattacataaaatgcttccctgacttttcacctcactgatgtctccaataattaaataatgtagctcttgtctgtagttaatgactgagcacatgatcatgtactttattttattgttgtgaatatttactgtgtgctaatcttgtcttccaaacgatgttgcaagttctatgatagcagagaatcaatgaattctatatctctcatggcatccagcaaatctgggaagtatatcaagtgactgttaaatgatgtaacatgtggcttgacttcttttctggaatggtataatggtgatcacccaagaagcttctgccagaataggaattgaggttggatgaataaaaaccatagtttctttcctcagtcatcagagccaaccagtcacgtataatagtacacttgcttttactgtaaaattctaaaggctcgatggacaccttattgattttagtaaaactgaatatttacctgtcaatcgaacactgaccacaaaggactgtatttccttatgctatcatttgattttggcagcatgtaacaattttgttaaaacccaatgtcaagttggaaggccaggcagcacctgctcaaatggctggcatgtaactactatagtcacagggatgctcggtgttcacagctattcaggaaggtatagagagccctggccgtagatgtagctgatttgtgtgaggaagaggcagtccagttgcaggcagccatctctcttcccccctcccaactcttgggttctgggctgaggccagggactgtcctgagctgatcgcaggctcccattggccgctgtcttttgtgacgtcacgatcatgatgagaattgatgatcggacacgctgatttcattgtctgaagcggcactggagacccaggaaaaatctcgctgaatccgcctgccccagcagcggcctgatctgggttccgctgattcctttcgtaaccgcaccacacccgaggtaagcactcaacactaagtgggtgagaagggcgaaggagggagggcaaagcaccgggataatgcttttcctagtttggggcgaggtt

SEQ ID NO: 44137 - DNA, 2300 bp, Homo sapien
gtggaaggaatgtgaggattgaaaaactacctatcaagtgctatgcttattacctgggtgaggaaataatctgtatgtcaaacccacttgacatgcaattttcctgtataacaaaccggcacatgtacccaaacccaaaataaaagttaaagttggaaaagaagcaacaacaacaactacaacaacaaaacatgggtgttattgaaattcctgaaatttttgggaaataagattgttataaatttattctaagcttattcacaattttaagacttttcttatttgcctgttgattattgtgaaataaacctgactgatattaaaatcaataaaaagtgtgcatcaatcagttatgaacaaagttagcttgacaaatctaggtataccatttatttaatatgcagaaatgttaaatttggatgaaattattgacaaatacacagaggttaaggctcaaaaacagaaactgtaatattattattcattcctgtggcagaccactatgtagatataagtatttttcctttgaaaaatacattaatgcaattaaaacaccttgatccatttttttccttttttggttctgtactatttattttgcattttatttttatattggcatatatatgtatgtatatgtttatattaagttcaataaaagaaaatagtcactcaatgtttcttttgtagccagtattattagtttcatttcatcattatttcttaaaataattttgtcatttacaggacagttctgttaaaaaggatctgttttgggtatgaaatgtgataggtatcaactaatgcctagtatatagtttgcacataataaatatttgttgattgaatgaatgaatacatgaattaatattgggactgttaatgggcatattatgagcatcttctttcctcagaatccttcagggaggcctacagcagaccttgctcctgttgtgaatattgcaatatacccttagtatattctcctgatagcaccaaaatcatcctttaaaaatgtaaattagatcacatcacacctttgctcaaaatcctccaatgatttcccatcttattcagcataaaatccaaatttattttggcggcacgaaagcccctacactgtgttacttcgctacctctgaaattattgctccagcctcactggactttttcattgctgttccttccgtatgcaaccctcttctctaaattcctccaggacttttatcaaatgagcttatcagagtctttctctcattgatataaaccagtaaactcccacctcattcccatactgttttattttccttcatagcatttgtctcttttttaaaatttattatttatttttatttatttatttatttttttgagacggagtctcgctctgtcgcccaggctgaagtgcagtggcgcgatctccgcttactgcaagctccgcctcccgggttcacgccagtctcctgcctcagcctcccgagtagctgggactgcaggcgcccgctactacgcccggctaattttttttgtacttttagtagagacggagtttcaccgtgttagccaggatggtctcgatctcctgacctcgtgatccgcccgtctcggcctcccaaagtgccaggattacaggcgtgagccaccgcgccggcctcatttgtctcttttactcctgtaatcataagctctgtgaggaagccactatgttttgtctatgccccgaacaactgcccggcacagagtatgctctccgtgacttagttttagaatgaatgaacttacccatgtttcgcagaggtaataagttgtttttcttactatataattaattattaaagcagctacatttgggtattaagtccttatctggacatatcacatatgcccgaaacaaaataattaaaagttctgcacccaggaaaataactcccaactggactattgataatgttctggaaggctttatctgggaccgggagggtcaaccacaggggtgaacagtttctccagaagacagctgaccgaaaccgcagcagttgccaaggcggctggaggagggcggagaaaaggcggtaactggcaggcaaggggcgtaacggggtggggctgtcctaagggaagcctagtcgaactgatttgtccctctctgctctccgtctgaaaaccttggccgaaagggttgtagacatggcggccatcagggtaagcgaaaaccaacttgcttaatttctgtgggtgccgatagcatcccggtaactgtaaaagggatcctactaacttctgaaggagccctgaaacaa

SEQ ID NO: 44138 - DNA, 2300 bp, Homo sapien
tgcatcacagggttattttgatgattaagtgagataatacatatgtaaagcccttatcacagcgtgagacttagaacagcctcatccaaagttctctggtatatttaaaaaataaataatattccatctgaaacaatattagaaccagttatataatatacattgttgaggaagtaagccagcagttaaaatgatgggagaatgaatcctgcagaggggagaggtaaaaggacaaaatgcctgacctcacagatatgaggatggagaacgagtggaatgtgtttaagaggctggaccgaataataataaaaagcctggaaagatagatctgggtctgaattcaggctctccaccaacttttacgaagccttggggaggtaaccaaatcttttgagtcagttttctcagaattggggataatagtgttgatgtggattgaataagaaaatgaaacgtacattccactgagcctaggccataaaggaactcagtaaatgttggctgtagctattataattactattatttttgagacggagtttcactcttgttgcccaggctggagtgcaatagtgcgatctcagctcactgcaacctccacctcctgggttcaagcgattctcctgcctcagcctcccgagtagctgggattacaggtgcccaccaccatgcccagctaattttttgtatttttagtagacatgaggtttcattatattggccaggctggtctcgaactcctgaccccaggccatccacccgccacggctttccaaagtgctgggattacaggcgtgagtcaccacgtccagcgcagctattattatttttaaagacgtagtatctgcattcgagacttgagcacttcatcgggacaactagtttccagtgtaagtgaaaaatgaggacggaaataggaattgaattatttgaataatgggatgaagggaaagggaggggagttgcggcaagtttctttgaattggctaaaacagcagggactcttgggagtgccaagcataagctctgagactcattatagcctcttgcttcaccattttaagctcttaagagaggatgaaataaagtggtcaagcgagccctgctttgccccaccctcaccacacgggggagcacgtaggcactttgatacctgcattgtgaccgccattatgatgcagtgaccatgcaggggcgggctggtggttatactcctccaggatcattttcgtcttccctttacttccccccttttggcagggaaaggccagatgacaacctgaaactcagccaagcttgcagctgtggtcgctggtgaagtcaactccagcaaaccggaggcattaataatcttcctgaggtgctcctctctttttccaattcccaccttgatagaggggtatctcaaagtgggcgaatcaaattgagaagaactgggaacagccaacaacctcccaccacagcacagttaagggattctgttccatcaagacagccatcagccaatcagttgtctgccaacccatcatctgccaccccatccttagtcaacaaagcaggaatcaactgggcatgaaccaatcaggcacgaaccaatcaagtttatcagactcgaaccaagcaggcataaaccagccaagcacaaactcacttggtatgaaccaaatggacatgaaccaagggagtgcaagcctatatgaaatgaaccaagtggacatgaaacaaccaagcatgagccaagctggcatgaggcaatcaggtacaaacctaccagacataaaccaacccgacatgaaacaaccagacacatggcaattaggtaggagccaaccaggcatgctgcaacaagaactgagccaactagtcctgagcaaagcaggcataagccaaccagacccatcgcaaccaggcccaagccaatcaggccccagccaatcacgcatgaggcaaataggcacgaaccaatcaggtatgagccaaccagtgatgcagcaactagacagccagtcaggtgggagccaaccaagcatgagacaagtaggcaccagccaattaggcacaagccaaataggcatgagccaaccaggcacatggcaaacaggactgagccaaccagtcctgaggcaaccaaacatgagtccaccaggcatgtggcaaccaggcgtgcaacaaccaggcatcagccagcaagtcccaagccacccagacatgagtcaaccaggcatgagccagcaagtccccagccaaccaggcataaggcaaccagacactagccaatcatgtaagaaccaaacagacat

SEQ ID NO: 44139 - DNA, 2300 bp, Homo sapien
gatttgggaatttggtgagtaaatggacacagaggaactagttagcaaggggttgcaataatccagttaagaaggcatgtgaacctgaacaaggtaatgatgttaggtaaaagggggattaattccacggatattaaagaggaagaattctcaggatattttcattgactagatgtttggagaaagagggaagagcaggatggccttcaggttttaaaaattatctcccacagtgtaccattcacaaaggtgattgatgtaaaaaccccacatctttctcagctttcttctttgagtgtcctgttggaattgccatgggacaagaccataagtagtatttgccagactatccaacatagaaaaatgtcatgtatgaggacacactcataaaaatatctttcttcttctagaatggaaaataaaagcttaagtaaatgaaacctacagaggtgggcaaactatggcccacaagccaaatctggactgctgcctgttattctatggcctatgactaagagtgatttttacatttttaattgttgaaaaaattcaaagaagaataatttttcactgcgcattaagatgaaataaaattcaaatgtcagcgttcataaataaagttctactggaacacagccatgctcacttatctctccctggaactcaaaagtaaggaaaacaaatattttaccatcattacacatgcacatacacacacacatcacatgcgcgcacacgagcatgctccttctctgtgcccactgtgtacgggctttgcagaaattgcatttcttgcagagaaactttgaacctcacaatggaaggtaatttaccaatctcttatctatctatttatcatacttcacgttttagtaataactgaatttcacccttttcaagcttggaaattatatctcctcattctgctgaacgtgtctatggccactttggggctacaatggcagagcagagtagttgtgacagagacgctatagccctcaaaaaatattttgcttactactatttatttacaaaaataaaatatttactatccggcccttcatagggaaagtttgccgactcctggtctactatgagccaggtactgtgctaggactttcacatcttctataattctatcaaaaactttagtggtatattaggttatagagacctgaagaatgtatctagaatctagaataataacatgctttatttgtaaatattcaaatgatttgcaaagataaagagttactttctttaggatcctatcctttccctgcttaaacactgttattgattccaaatgcttatagaattaaagctaaaataggcaaaacataagactctttgcttacgcaatctagtccccacctacctttcatcacatctcatcactcttttccccatccctcacccaatgaatttctcactgtcctcccactttttgcagacagaagctgaaagtgacacattcatgagatatttagtgtccacttcattgaggtcccttgttcaccttttcctttctatacctttcttcactctccttcactttcttcatcgaattgtctaccattacaaaatagaaaagaaatgaagggagggaggaagggaaactgcaacacacacaggttttattggggtgaggcatacctcttattactctggtcagtctaatttgtcaaatcctcgagggtagggccgatacattttttttttaacgtcgtccaacatctattagaggttcagtcattgattatcctcctccctttcttcgtttcccttgggaaacctggaaaacagaaaatcttcccacagaaactcctcaggggcgcgccgagatctgggcttgcgcacttggacttggccggcgctcagcccccgcctcaagccggcggggtctcgcactaacctagcgcgggcgcctcgatctcccgcgcgcgcgcgtgcgcgagacccccctttggccccctaccctgcagcaagggtagcgtgacgtaatgcaacctcagcatgtcagcagcaatataaaggagaatgaggcggcgcgcctcccagacgcagagtagattgtgattggctcgggctgcggaacctcggaaacccgaatgtgaggaccttaagggatccacagctgccgccccccgcagccatccagagcgcggtcacagtccgactggcggcacggaggcggcggcggcggcggcggcggcagcggcggcggcagcggcggcggcagctgtagctgcagcagcaggtaaggagactcctgacgagaaactagagggacgtggatc

SEQ ID NO: 44140 - DNA, 2300 bp, Homo sapien
acacgagcatgctccttctctgtgcccactgtgtacgggctttgcagaaattgcatttcttgcagagaaactttgaacctcacaatggaaggtaatttaccaatctcttatctatctatttatcatacttcacgttttagtaataactgaatttcacccttttcaagcttggaaattatatctcctcattctgctgaacgtgtctatggccactttggggctacaatggcagagcagagtagttgtgacagagacgctatagccctcaaaaaatattttgcttactactatttatttacaaaaataaaatatttactatccggcccttcatagggaaagtttgccgactcctggtctactatgagccaggtactgtgctaggactttcacatcttctataattctatcaaaaactttagtggtatattaggttatagagacctgaagaatgtatctagaatctagaataataacatgctttatttgtaaatattcaaatgatttgcaaagataaagagttactttctttaggatcctatcctttccctgcttaaacactgttattgattccaaatgcttatagaattaaagctaaaataggcaaaacataagactctttgcttacgcaatctagtccccacctacctttcatcacatctcatcactcttttccccatccctcacccaatgaatttctcactgtcctcccactttttgcagacagaagctgaaagtgacacattcatgagatatttagtgtccacttcattgaggtcccttgttcaccttttcctttctatacctttcttcactctccttcactttcttcatcgaattgtctaccattacaaaatagaaaagaaatgaagggagggaggaagggaaactgcaacacacacaggttttattggggtgaggcatacctcttattactctggtcagtctaatttgtcaaatcctcgagggtagggccgatacattttttttttaacgtcgtccaacatctattagaggttcagtcattgattatcctcctccctttcttcgtttcccttgggaaacctggaaaacagaaaatcttcccacagaaactcctcaggggcgcgccgagatctgggcttgcgcacttggacttggccggcgctcagcccccgcctcaagccggcggggtctcgcactaacctagcgcgggcgcctcgatctcccgcgcgcgcgcgtgcgcgagacccccctttggccccctaccctgcagcaagggtagcgtgacgtaatgcaacctcagcatgtcagcagcaatataaaggagaatgaggcggcgcgcctcccagacgcagagtagattgtgattggctcgggctgcggaacctcggaaacccgaatgtgaggaccttaagggatccacagctgccgccccccgcagccatccagagcgcggtcacagtccgactggcggcacggaggcggcggcggcggcggcggcggcagcggcggcggcagcggcggcggcagctgtagctgcagcagcaggtaaggagactcctgacgagaaactagagggacgtggatccaccgcgttcagtgtttcttgtctgaggggaggagaggctcacacccagcgtgtagcgtagggcgaagggaacaatggaagtggcgtccagtccctgagctttcctcccgcctcgggcggagttttcctcttcagccgcagccgggggctggaggaattgagggaagtaagggttttcccccttagccaacctcctctttccctaggccagagccccagggagctagagccgtcgttgagaccgtcggtggtttagggtgacggtaaaatggcggaaaacaaaacggtgaagtgaagaatgcagcgtccccctggcagtttctctcagctctccctccaccccatattcttttcactggcgccccagtcgcctcgcccccgccccctgaccgagctaatagtaacctttggaatgcgcgagggatggcggcgtgtgcgaggaagtggcaccgaatcggcattttaggggattgggagccgtcagagcctgggagttggggggagggggggggcgtgtgcgacaactgtcgcctacactaaaacaccaccattttggttcccaaccgtctcccacgtagcggggcagaggaagctggaggaggctgaggggctgggcagcacggcgtgggtagcagcggtggcgaccgctgcaccaagtgagaggagggaggaggggaaagggtattcttgtctcatcggtctcttcctttctgctgcgaaggttctcttgtta

SEQ ID NO: 44141 - DNA, 2300 bp, Homo sapien
aacttcctatgtggggaaagatactccggtttatttatttggtattcacacagtgtaatacttttataatagttgcactatgtgttgtaatttttacacttcattgagtgctagtgcagacttttcagtatggatttggcaaggataaagcttgcccttgattctctttcactttctaaaataaggtgttgtttgtgatttttaagatgtgctttagagaagattttggtttaatcaagtggtagcattctaagtataataacgttgctaatgtagtgagtagttgtttttgttggaatccgttgggttgcttttaacattactacagatttgagcatatgaacccttcccagcctcactatgcaagttcaggtgtaaagaaaaatattaagttgtgtaagaaacttagtttaaaatattttaaagtatctgattttgaatgtatttttataataggtaaagagagcgttttcccaaagaaaataacatagcacagaaggaaaaataaaaagaaattgctgcagattttactttatgtgagaaaatctacaatttcttcgagacactcatataaaggtgactaacaaattacttattgttttatcttatttaacagttaaataaaattaagtttttaaaaacattttcagacatttgtagttgttctattagttatgtggtaaagaaagtaattactctaattaaaatccaaatagtacactgttttaaatgttaagaacatgtccctttcagatttattttgttaacacacaggtagtttattgtgaactctcttggccttggacctcattttgcataatagcaaagcagaaaacaatggcatttgaaaaaagatacacaactaagaatttctaaaattgtgaagtttgctcatacataaagtaattctgtctgaatcgtttgttatacagaaatgtcacctacttctgtagcatatttatgtatatacctgaaatggtgataggggttcctctgagactctcctgcctcctgaataccaatttagccatcctcctttatttaagaatatattaagttgtattacgtgtcacctttctgaaactttcattaaggttgcagctttatctgttgtgcaatatggtacaatttattaagcagtcctacgtgaaaaggagataagtgccttataaaattgacaggtttttgttgatttacttagaatcttatgtttgaagagaaaatgcacatatatgtgtctaagaaatacattgagtgacagcatctgactttatgttccatactatcaaatggtcgtaaatataggataagtcatttgaaatgaaatagattgagcccttgctttcaaaaccaccttgaagctagcataattttattaatcactaataaaaagtcagttgtacaattacaagtaaatgaaatgctgagataaataatttgctaaatgtttgtatgtgatcgatcttatttttaccatatttaggaagcagtcatgtttcatgagtcctcaaaactgagacaagagaatgtagtagagtgaggccagaagtccttactggttcaaagaactccggggaaactgggatagaacattttacattataagtagaaccctgggagccagaggtgaatacaagtttatctgcagagctccgctgcagggctgatctgggtctggaagaaatggatgagagccagtggatgaaattcactaatactagacatctgagtcctctagtaatgtataaatatcctaactattgtttgttgtcatctcgttcttcttttataacctatgttttaactggaacttttagcactgcagttttgttgttttgctttcttctaccacttccctatggctcatcagcttgactgtgcctttgtctccattatttttggtttacttccacttggcacttcttttatttatggttgtcacataaagcatctaaccatggtttttctttgttttgctttcttttgtaataagctttccacacttggttgaaaggcatattgtcaattgcatttttttctcaaaacaactaactttggactaaatatattaaactattttaaaagccatttcttttgcagatattggtgaatgaactttgctaagtatggattcaggcggtggaagtcttggattgcacacgccagactctagaatggcccataccatgattatgcaagattttggtaaagcattttctttgttgtatttttttcttttttagaagtaaggggataataaaaatcaaaaataagttgaggaaggggagaattacaatgaa

SEQ ID NO: 44142 - DNA, 2300 bp, Homo sapien
tgagagaggagaaaagaggtatccaaagtataaatgaaagaatgttggatgtgcacttatcatttagtttaccactaaggcaatttaatgcttaaagccagagagtcatctgcaaagttaaaataatctgactcattggaggtaaattccccctttttcataattataaagcatactctgaatttccattcaaatataataacttgaaaacatttttctccaaaaaattaatttttttccattttctattttaattggtgttcttggtgccatcagctagatacattcagaatgctttccacacattgaataatgccttgaggactttggagtagttttgttgtttctgggttatgatgaacatatttagactctaatttaaaaatttaccactcgctgggattaacgaggactctttgtagattggaggaaaacattaaaacatttcagagggttgtgcttcatttcatgtatagttagtccatcaaaatgtctctttcaatgaaggttttagaagtttcaatcatttcctatcccgtattttcttaacttttaagaattctgctttattaagcaagtacaaatgaaacaagtgcttatttaaatcttccaaggtaagcaagtctttgtattatgtgactgttaagtttttgcaattctgaatcataataaataatttatgcttctagtcactggaaaatgacaagatgagacttgagaaagatttatcattcaaagacactcaattaaaagagtacgaagaactcttggcatcagtgagagcaaataatcaccagcagcaggtaaactgatgcttttattggtgttaatctacattgatagcttttcatatgcacaattactggcacattggagttatgagatataatcaagacagaattaaatatgatggaaaaatttgttcatatgagaattgagtggctttgggtatttctaatggctgaaagccctctcagaaaaacagataatcttatctattttagatataaagtacatatgggacacaattatttgtcttgttgggtgaccagaattgtagaaatactaaaaatctaggttcatgcatttatttaatgtactaacatgtcaatgagaaaagctgttgtagaccttaatacatgtttgtgcaataaataaatgactgaaaaaactctagatgaattctctggatgtctgagcagagagaattcctaggaaattgtaagtagtctctaaggattaccctcttcctgatctttactcctatggctgtcccaaattcttgctcagttactagttgtcatgtaaataatcaggcatatggtcgtttctgtgcctactagaaagcagggtacagtattgtcacagagtagcaagagtctgattgttaaattgagacattataaattcatctagtcatgattccctctctcacaaaatagatgagtgagactagaggcaacactataatatcttacatgggtgacttaatgtaccatctaagacccagagtataagaaaactgggcataggaaaatatttacttgattcaattgaatgaatcaataaaaagaacactccctcaccaaaaacaaaatgcatttgtcttatgtacttgtgtcttctttacagcaaggacttcaagactcaagttcaaaatgccaggcattggaagaaaacaatctctctcttcgacatacactatcagacatggaatacagactaaaagaactggaatattgtaaacgtaatttagagcaagagaatcaaaaccttagaatgcaggtattaaaacttccttttaaatatacagtattaccttagttacatcattgtaatcctagcatttagaaaacatatggactgctttccctcacatactgttagatcttaatcactgacatttgagctttataatgcagttcctgaaaatcactttcattatttcaatgtcttatttaatcatgtggttttcatctaataacaatccttgtaacataacatgtattttcttcaaaacaatccaattacagatagttattttgccttctgtaggtttctgagacttgcacaggcccaatgttgcaggctaaaatggatgagattggcaaccactacacggagatggtaaaaaacttgagaatggagaaagatagagagatctgcagactgagggtatgttgatcctacattgcataaatacacaggtcagcacaaactttctagcaagataatgatggcttcaagtttaaagctaccagaaaaaattagctgaaggtagagttttagaaatatgtcat

SEQ ID NO: 44143 - DNA, 2300 bp, Homo sapien
gtttgagaagtatgtttaccatatatattttgggcctaattcttccatcaagtggagcgggaacaagttggcaaaaatgaaggcctatgtcttgccccagacaacactatcaatgtatcctttccagttttcaacgttcccaaaggagtaagtgccagtctggtataaccagtaacaattctccttcagcattttcctacctatcacggctccacaaagggtctttcgacccctgtgaccaaatcctcattatgatgctggaaattctattaccccactagaattttgatcattttgcttaatgctttgtccctatgtaaagattcaaatatccttcaagccagtcattaccaaatatactctactatagattaaatgagttattcaggcttgtcttgcaagctttgattttgttaaagagggtatgaagaacttgaaaacactgtggagagaagatggaatcagcactgaaacatacaaggagaaaatgaaggtggaaatagagagataaaggctatttttcttgttcattcacccaagaagcatttattgccaagcactgaggacttctaatctaggcacaattaaactggtgctaacggatggtactaaccacttctgcatattttattattttgttattcagatgttcttttttaatagatttgctaattccagaaaaaaaaatttagtcaaactaagtaaaagtgccattttagttttaacattttcacttgtgcttataaattgaataagtcctcttatatttcaaaaagtaagataaaattaatagaaaactagcatttatatatgatcagtgaataccttttcctaaagttgtgtatctttttttttgttcttgcagcaaacaggactttgagtctacagatgaggtaagtgcaaagatagttgaaaatcgaatatagtataataacaaagtagattctgatatttgcaataataatattctttcagttaagtaccttactagactgaaaatgcaggtaagtgaaaaaatttatggccattttgcctttaaaattatataaacactacatatttataatagctataaaactagtaattattcacaaaaaaattgttatcagctgtcactttatgatttgtctatgcttattgcaatgtttatttgaaatgttctatttttaatttttgtgtgtacatagtaggtgtatttatttatggggtacaagagatgtttcactgaccacatattctctgctttagaaaactgaaatctatatgattaattaaatagcaaatgtagttttaatatgcttcaaaaccttatatgtgccatgccagtcagcaacttaaagtaaaaatattttcaagtattaatctattacatatgcatattatcttaattgcttttaatagaataatcaaatagagaaaaacctatttcaatgcaataaaaagcacaattccctctttagtgtttttaatcattttttccagtgtactggcatactgcattcattacaattatgcagtaattcctaaattgcctttaagaaatacttcacttcagctactcacttaaaattagttgaagctgtttcagtgttgtggtggcaacatcataatcttccaaaagtcaccacagctctatgtaaattctcagtaaaacctgtaactcccttaatttttatttcccaaagttttccttatttcaaaaatcagcttctagaatgtcatatctgtcactcaacaaaacttccagttttaaaaaatatacaatgaataaagtgtgtaaaggaatttaatagaccattttgcttttaatttcgtctttttaaaaatagaaatggaacttctcattggttgcccaaaggttttccctaaaatgcgtggaattcaggattatttttatactgtttgtaatataattgatttttttaaaataagaactgataaggctataaattaaactcatagaaactgtttctcaaaaagtgaattagtcttttaatattcctaaaatatgtcccattacacaaaagtctgtggattgctgatcttaagattgatatgtatctgttccatggataagcctttttttcttacagtcggaagacattgaatcattgattcctaaaggattatcagagtttacaaaacagcaaatacgctacattctgcaggtgagttggggtcaagagtggatgtgtgaaatcaacactaacaaacagcttcctaggttgcttcccttaattaagaacagaaagtcccaaattaaaatcttatttcctaagagttgaggattctttggttag

SEQ ID NO: 44144 - DNA, 2300 bp, Homo sapien
aaatgaacaattgtggtcaacacctgcttcatagttagatgtgatttgcgtgccagatagtgcttaatctcatttctaatatactatgcctaagcttcaagctctctgtccctcatacccagagatggagaacagtgatgaatgaggctcagatattgggtgaaggtatcagctttacacacaaattgtagccaaactgtatcaaggaagttggctcaaaacactatatatccaagatatgtgaagggcaggtatggtcaccagtttatggataaaggaaatttttttcttcatctcaatctcttgctttatttaataggtcacttcttggctgcagcagatatttacagtattctgtgtgctcacatgaatgtgtgtttgtgtgtgtgtgtgtgtgtgtttaatttatatttttatcatgaatcaaagctgactggatgatcccacttaacccctattctctgttcacacataaagtttattcaaagtgatactgctaatgatattagtaagttattgatctgatattttaccaggctgtttaacatgtcacatatttctaataaaattttaattgattcttgaggaatatcattaaaatgagcaaggatcagatttgacaggtctgcactcaacacacaaatataaatgtaaatatgtaataactaacttaaaagtttttaagggtaattttcagctttttgcacactcctcagccataaaagaaaatctaaagattcctttaaagtctctcatggctagcatttctgaagtgttttttgatgttgacatctagaagatttattagatggcaggatacagaacaatatgagaatttatgtagctgtaaaatggaacaatttgagaatttatctagctgtataatataccagataagagcttagactctaatatgaatctccatatgttaaaatgccaggcccaccatttacaggttatttaactttggaaagtttttcaaactctccatgtctgtgcctcagtttctcacctataaacctcataaagtcacttcaatgatgaaataattataatccacataaaaccccttgaacagtacctgacacagagtgaatagtaaatcataacactttgttcactgggcagaaaaaaaatgctgctagccccctggataacattctcttcctctctagaatggtggtagtatactaggtcctattgcacatatacacattaggaagatactttttactaaagtcactttgaatgagagtattctggatttaagtggtgctgaagtatattgcatagcaaaatctgagggtaagtaggcattatgatcaaaatttcaagtagtaataaatgtaagttgtaaacacatttaaatctcattatgtcagttaaggcatctttcaggacttgcagctcccttaataactagatattaaaaagtcaatcaaactcagtgtttcctagggcacatataagggcaggagaaattcccttgcataaatgaaaaacaacaaatgtgaatgccaaaatgcaaagcatttgtggaatctttaggtttttcttgaccatccacctttctatacagcaattcaatcatttagacaaatttccttcaacaaatgatagaaaagaatacgaggctttgagtaagataaacaagtccatatattagacagagtcactagaaagagaccccttagtaatcttccttaactgcaattatcagatgggttttgcaaagaatgcaaatttatctgtgaaaattggtgtattcctagactaatactcattattttagtctgggaatctggaataataatacttatgctggtaactacctttgctaaacttaagaaccataaaaagacactttcatataacatgtgtgactttttttctctagcaagttttttgcattttcatgtctttgtgaatttttaagcccatgtgcttggaaactctggcttcatccctgacattctacatttctgctcttcacagactcctttacctgctgggcagccttgtagctatctccgtggcaaggcagggcctctcctggcatgtaaacctgctaagtgaatccgcccctaagggcgtgtcagtaccatttcctggagcaatgtcacagggtggctccattttccatttgagctcaaatattttgctgcttcctctgtagctgccagacctgctcttgctgctgctcaggtagctttcttctcttcccggcaccactattggcagaggttttgataagcggtttccacacgtgtgtcgtgtgtctgtctgcctgcctgactgcc

SEQ ID NO: 44145 - DNA, 2300 bp, Homo sapien
tcacaataacatactatatagtaataaaaaattaactaaaattatatgcaatgacaatactttccatcatgctattgagtggaaaaaggaatttatagtatttttatcaagctcaaaaagaggccacactgaatatatcacttaggtgggtagataggtaggtaaatagattataaaaaataaatagaataaagtatatatttgcatatactaaatcttgaataaatctcatttttgcctgcctaattttcatctgttattcaagtatcacttttagaagggacaagaaaatcaatggcaaacttacctgcagaaacactgggggagttctccttggccatataaaggaaacaaaaatggagtgttgccataccgcccaagacagtgaagaaagtttttggtagctttgagaccatctatggtgctgctggctgtctctgatgtcattgcaattgaatgcatgacaatatattggaggttgggggttaatttttgagtctttaaatattcataaaatgtgatctcttcatatcctatgaaaagatgaaattttatcacttaaaatcagaactaaacttctatttaaaaccaccccacaaaaaggagatgaagtgtgtttcacagacctcacaaaggacataggtggtattacattttggacactgatggttgatcttaggaaaaaatggaaacaatctctctctcttatttggagtaatggcacaatttttagctttaaatgatgaattatgattgagcatttcatggatttaaaaaaaactagaaaatattaaataactcaatgggttgtcatagttggcaataatctcactttattatcatgaaacctgcaggataatgccaataatggtactgaaaatattaaacaactatgacaacatgggaatgtattgatttaaaatgataaatatgtgagttttgtaaaacgtatacttctcactgatactcagaaaataaactaaaaaataatgaaatgaatttccatgtggctactggaatcagtcttatggccacataatcacatcaaaacatacgggacccccagaagttactcctttaaaccaagaacagaatataatgtaattggactgttagtggtgggaaataaatcccatgataaaagacaaaaactttacagaaataatttacataaataaaaattatgaaaatttactgagagaattgaattttacacagccactgtggataacaacatgacagtacctagtagacttgaagctttaagagcaaggattagactttcattatttcacagaggaaaaaaaatatcgctgcacttctcattgtaactttataaataaattatcaatagtatattccaattttggataacattttcagaccaatggacttaaagtatatagctctgacactaaaatggcatattcaatttttaacagacaatgaagtaactggccccagatcacataatgaaataggtcaaagccaagaatagaaaccatgccttttctgaatccagtatttttccccatataccatctagcctttttttttcaaacgaaatagttcaagattctatgcaaaagcaatcctggaaaatgataaaatatatagtatttttacttatgagaaaaaataatggaatcatgaaaacagattatcatctatgaagagccagttgacagtagtatttaaataataagaataaaaattaaaatctagcatgccacttcagcaatgaaaatatctgcactgtagccacatggggctatgggagcccttgaaatacagctaataagactgagaaactgaatttattttattttatttcactttaattaatttaaatttaaatagctaaatgttactaatggctaacctattgatagtgcagagttagaatgcattttaaaacagtaataagtggctcactaaatcagagcaagcatattaaaatagtaagaaatgtcaaataattggagagcactacttaatgaaaaaaatacctttatattcatcaggatatttctcatattccatacaaaatgtaagaaatttcattagcattcgcttttctaccatagtaagttgtttgctattaaagacatctgctctggaacacggaacctgaaaaatattatgattttaagttaagaaactgcttcctaatgatataactattccaaattacacttttttcccctttacatataacaggattatcgtttccactctagccaggctttttcacatcaccgtccatcagtactaatggcatctctgctaacttcagagct

SEQ ID NO: 44146 - DNA, 2300 bp, Homo sapien
aatgacaaagtggtttactgaacagtacattatacttctcaggggaatctgttttacagaaaatactaatcaaagaccatatcttaagagagttgtgtaatacaactggatgatctataaaagaaagtaatgaaacatgtacaatgttgctaatgattatggtaaaatgcaagagaaatgcagtaaaaagcgtatcaaaatacattttaaagcattttcatgtaaatatttacaattaatggacactgaacatcttctaaatataagacacatgatagtggtgggcagatataaaggcaaagatggtaagcactatgaggacagggactcgtctcatccatctattaggggagtcaaaatcaagtttggtttagcaaacatttattaaattcctactatgcaccgggcttaggttaggtgcaggagtgaaaaagataaatgagacttggtgtctgtcatgctgtacaggggtttataattatggtattgcatgtctgggtgtgtatttttgtgtggatatatggggatatgtgtactctataggaatcgtcataaatgcagtatggcgggttaagacaaagtctagcaccatgtagggaaacagcccacacacggagacgaaaggaggaggaggtggaagcccagcgacatcctgggaataactgttagctagagaatgggaagatcattccatgctgaaagaacagcatgagcgtggtcagagactggaaagaaaacaatgtctggggaaccacaagcatcttagcggataggtggtgtcagggaaggcccactactgcacattatctttgatttattttgaaactcttgtaaaataactacacaagaaatttctgtcgtcaaaaaagtatcctccttcattcccagcatccttccccttttgctttggtgttgtcagacagcggagtattaaataatcgggggcagggtggggggcggttggagggaagcggtgggaggcgacagaccttgaagatacttatgagagctatgttagctgttagacatagacgacctaaagcccctcatcagatacaatcactttaatataaagaccattttaccttaattatttctacggtagcttatggaaactaatagattggaaactaaatgtaaactaaggagaatcttacatgaacttatctagttggtgcggaaaatcgaattcagactcaacagacgcttatccagcgcaaccatgctttcatatattttttccctcctgtaaagcaaggctaatttattgcccgagtggctgtctggactaactggaacaaatacggacgcggtgggagttccattctggcgaaactagggtgagaggttttttgtgggttttcatcgaggagacatggaaacgaaaaagatatggaatatattctgaaagtattggtgtgaaaaaccatgcctcgagggccaacacgaaagtacagaaacgatggcgggaaacagttttttaggctggaatgaaagtctcctttgttcacagagcaaaccgccttcaatttcactccgctctccgtgtctcctaacaattttgcttcagtattgtcaaggggtatccaagtctcccacattcatcctagctaacggaataaaaatctacatttctttcctacttcaaccctccaggctaaatgagctacagcattcagcctggaaaatgagtcgagcttttaacttacgtgtaaacattttaaatataatactgtagtcgcctgcctggaccttccacccaagaactacaacacccagaatgcactgttttcttttccgccttccacggagggaatgcctaacttgatctcatttccacaagtaatagtcacatgacacgtttcccgtcaagatggcggatactctcccttcggagtttgatgtgatcgtaatagggacgggtatgtgtagcctggtgcttcctggacaaagtttaggaagactgtcttgtttctgttttttctgtcagtggcgagttttgggacaaacatcgtgggtcgagagtgggagggagaactgaaaggaagtgaggtagtccggagtcagcgcgggagttggcagttacagggaggggctgggacccgcagtgcttatcgccatttgagtaggggttgatctggtcgatgctgattgctgaggttggttgctgcggtgattcctgttaatttccttagagggaagtggatgtgcagtgtcatgaaatggagggtcgggattttatcaacggagacgactttggcaagacattatgattccttccttattgatttcaaggtgat

SEQ ID NO: 44147 - DNA, 2300 bp, Homo sapien
atgtagtttatatatctcgtatacatgaacaaatgtatataaatatatatccaaagtatggtagaaatacttttatttatcaggtttttaaccatccatctgtggcttctcattattagagaagattttggaaagttttctgtgtttactctgagaaatccatttgtttccattttctactgtcttatcaagagtctcacaaataatatctgtttcacttctgataatactaaaaacttgctttacataccaaggcaaatgacaaagtggtttactgaacagtacattatacttctcaggggaatctgttttacagaaaatactaatcaaagaccatatcttaagagagttgtgtaatacaactggatgatctataaaagaaagtaatgaaacatgtacaatgttgctaatgattatggtaaaatgcaagagaaatgcagtaaaaagcgtatcaaaatacattttaaagcattttcatgtaaatatttacaattaatggacactgaacatcttctaaatataagacacatgatagtggtgggcagatataaaggcaaagatggtaagcactatgaggacagggactcgtctcatccatctattaggggagtcaaaatcaagtttggtttagcaaacatttattaaattcctactatgcaccgggcttaggttaggtgcaggagtgaaaaagataaatgagacttggtgtctgtcatgctgtacaggggtttataattatggtattgcatgtctgggtgtgtatttttgtgtggatatatggggatatgtgtactctataggaatcgtcataaatgcagtatggcgggttaagacaaagtctagcaccatgtagggaaacagcccacacacggagacgaaaggaggaggaggtggaagcccagcgacatcctgggaataactgttagctagagaatgggaagatcattccatgctgaaagaacagcatgagcgtggtcagagactggaaagaaaacaatgtctggggaaccacaagcatcttagcggataggtggtgtcagggaaggcccactactgcacattatctttgatttattttgaaactcttgtaaaataactacacaagaaatttctgtcgtcaaaaaagtatcctccttcattcccagcatccttccccttttgctttggtgttgtcagacagcggagtattaaataatcgggggcagggtggggggcggttggagggaagcggtgggaggcgacagaccttgaagatacttatgagagctatgttagctgttagacatagacgacctaaagcccctcatcagatacaatcactttaatataaagaccattttaccttaattatttctacggtagcttatggaaactaatagattggaaactaaatgtaaactaaggagaatcttacatgaacttatctagttggtgcggaaaatcgaattcagactcaacagacgcttatccagcgcaaccatgctttcatatattttttccctcctgtaaagcaaggctaatttattgcccgagtggctgtctggactaactggaacaaatacggacgcggtgggagttccattctggcgaaactagggtgagaggttttttgtgggttttcatcgaggagacatggaaacgaaaaagatatggaatatattctgaaagtattggtgtgaaaaaccatgcctcgagggccaacacgaaagtacagaaacgatggcgggaaacagttttttaggctggaatgaaagtctcctttgttcacagagcaaaccgccttcaatttcactccgctctccgtgtctcctaacaattttgcttcagtattgtcaaggggtatccaagtctcccacattcatcctagctaacggaataaaaatctacatttctttcctacttcaaccctccaggctaaatgagctacagcattcagcctggaaaatgagtcgagcttttaacttacgtgtaaacattttaaatataatactgtagtcgcctgcctggaccttccacccaagaactacaacacccagaatgcactgttttcttttccgccttccacggagggaatgcctaacttgatctcatttccacaagtaatagtcacatgacacgtttcccgtcaagatggcggatactctcccttcggagtttgatgtgatcgtaatagggacgggtatgtgtagcctggtgcttcctggacaaagtttaggaagactgtcttgtttctgttttttctgtcagtggcgagttttgggacaaacatcgtgggtcgagagtgggagggagaactgaaa

SEQ ID NO: 44148 - DNA, 2300 bp, Homo sapien
tttggttgaggcgttttctgcctttgctatttcttctcaattgtcctttttttgccccttattactttcttcccacaacagtatcgatgtagcaaaaacattttgatgccttttaaaaatgtctcgtggctgcctatatcccaatctattatgttagagtcatatcactgcattttgaaagcaatgatcatcacaacttcttagcattttaaccctgtacaatttgaaattgaaacagtatgaagagattcaaagggcagttcttaaacctggttgatgaaatgagaaaagaagaaaatatgttgtagaaagaggcagaaaaatccaatttagggtatctgtaactaaataagggagcaaaaagaacccacacatttctcgttgatcctgctaagtacaactagggctgaataaaattcagtaagtttccaacattatttatattttagaagaatatcagagaagttaccataagccatgtagttggtaacgttttgtaaagaaacgaaacctggatttcactttatgaataactaacagcctccagagaagaggagcacaggaaaggaaatatcttggttttagagaatgaatagcttgacaaggagtcttaaaacaactttgctaggccaggagcggtggctcacgcctgtaatcccagaactttgggaggccgaggagggcggatcacgaggtcaggagttcgagaccagcctggccaatatggtgaaaccctgtctctacaaaaaaaaaaaaaagtatgtatatgtgtgtatatatatgtatatatatgtatatgtgtgtatatatatatgtatatgtatacataaattagccaggcatggtggcgcgcacctgttgtcccagttactcggccgaggcaggagaatcgcttgatccccggaggcggaggctgcagtgagccgagactgtgccactgcactctagtctgggcgacagagtgagaatctgtctcaaaacaaacaaaaacaactttgctaaggcgatctaaccaccatatgctgtgtggaaaagaccattccttttccctggaatgtaccctgcttagacattttgttctataagctcttagtacgtttgggacgcttgatgagtgggggaagtggaatcttgtttaggactggagctccaatcactggaccttcaaagccaatggaagaggaaggaaaatgcacgttcaagaatgcaaaccctcgccctttcctcatattccgtgatgactgttttgagtcctaaacaaacatttcctatcaattttagcggggagtagggccagggcaatctcgacactaagggacggggacacagacaagtctcttccaggacagtggcggaagtgccataaaatgaggtgtccatctgccacccacagagcaagtctctctgtttcccaaagtgttcacaggctcactacgcttcctgaatgtcagtgcgagttagcaaccagaactctgatctgagtatgatctcggacgcttgttcctctgcgcgctgggtaggggaaaatttacaccaagcgcacttaggtgggctaaagggctgagctgtttacttctgaactcgctagcgtctttctcccggaagctaggcgaagccatctattagcccccgcagagtttgggagagatgcgcaagtggaattggagctgccacctcactttccacgatctaacccggtgtaaggtggcggaaggggcatggggaggcacgttcaggagtcgcgctttgcgtttccaccccgacaccagcggagcgcggagcggatgggttcacagcataggccactttgagaactctgcgtgacatctgggagttctctcgtctggcagagaggcaagaagcagaggcaccacaccgcccccttctcggactggatctctgttcttggtcgagcctggacccactcaggtagtcggacgccggccagggagtctccacctcctcaccagcggcagccattcggagcgctcgggcgcagaagggctggggcccattggctgtgggacgctgccagtctccggagggggtgtggtgggggtggggtctggggccgcagcgggtcggggctgctcactgtttgttgagcttgagcgtgagccggctgctgaagacttgcgaacagttcggagccagcgagagcgcgccagagagagcgagagtgagggagtgagtgcgaggggatctagaggagtcagggcgagaaagcgagggccggaggacccacgatagagacagagtgaccatggctgtctccgcatctccagtgatctctgcaactt

SEQ ID NO: 44149 - DNA, 2300 bp, Homo sapien
ggatggagttaatgtgtttgcagaggcacctaaagtatcccaaaaagtaaaattggaaggtctaatccaggatgttccatcttaagccttggcaacatttgttcaactcttacttaacgttgcccagtctaaatgatgcttccagtaattttagcaattttaattaagtagacagagttgattacttcaattgcctgcattgccttttgtcagtgattcaaatccagctatttcacatgttcagagctcccaagtgcttcagaaaagttctaggagctaaagagttaaatgactggtgaataaatcttcacaattttcacacttctttactcagtggtgtctcagcatttttcttgaatggagcagtttcttataattttactagaaagattaaaacacgtttgcagtgaaggtagtatgcaaatacatgacatgcgttggatccctgaggtaatctaatgatataatgcagggagatttagtgaaaaataaagtcatagcaccaaaacaattggtagtaaagcaaacagaaaatttcaaagccagttctttggttcttcttcacctgatggctcttatcctttttctctttatcttttccttcttgactccattttctactgccttgtggctttccaaagagtgaggcagggataaaggcttgattttatgtggagacatcttctaaccatttaaaattcacagcaaaaaatgtaatggacttaaaactgccaaaaatgattgactgggagtggaaaatgaagaggaatttctaggaagaaaaatgcttagtggagtacatttcattctggggcccatacttgaaattataaccatccccacttgctgagcacctaataggaactttccaagttgagcaaatagaggtcaataaaataagctccttcccattaataaaagttagcttattatagccttctgcactgtaagctgtcttttcagccaatgattaataccacctagagcttgcatatggagggaaattgaagtagggtgagtgaagtgattattttcaacagtagattacctagaaaaagacaatttaatgaatgaacaggtaggttcatttctggccaaatttcaaatgtggtgtcaaaaataaacacttgaggccaggcacagtggctcataccagtaatcccagcactttgggatgctgaggtgagaggattgcttgaggccaggagttcaaaacaggcctgttcaacatggcaagatcccatctctataaaagaaaaaaaaaaacacacactagctgggcccggtggcatgcctctgtagttccagctcctcgggaggctgaggcagagtattgcttgatcccaggaatctgaggcttccatgagccatgatcctgccactgcactccagcctgggcaatagagggagaccctgtctcaaaacaaaacaaaacaaacaaacaaaaaaataaacacttgaaagctaaggacaggagagggtgctgaaacttacatattcttctcccatatagatccacaaaactgaatcaattgcatttccatttatttaaataatttgcatatatcagcagtgtattcttatcttggtttgtagatgagtttctcttttcttgctggacatagagttaaatctcacttttaaatcccttgaaattgaaatgtgatgagcagatgactatagggagcaggtgtcaaacaatatttaaatgacattttcaacaaaataaatatttgaaccaccctgtcacattggtgatagaataatctgctccaaaaaaaaaaatgccattcattgtataccgcctctgacatttgttcttcaggaattacttacagtttatcttctgagctggagccttttatcagcaaagcagttgaactacagtggaaaaaatggtaattgagtattttatcaaatgcttctaacaaaatggactttgcaacatgtacatgaaaattaaaaccattggttgcagggatgaacaaattggaatgatttattatcagaaatatcaatatgtcactgttcagaaatagaaagaaacaaacaatctcagtctccctccacattaaaacaacccccatcccattcccagacatatgcacccaaagcactcttagttgcagccaaagcagtggaaggtaagtacattttaattctttgtgctagcaaaaccgctaaagaaaaaggagaaaaaagcatcataataatagaccagctgctgcaggacattatgtaaggaaaagagacagtaataaaagaaccatgtcaaaagaaagcagctatgaatgtatact

SEQ ID NO: 44150 - DNA, 2300 bp, Homo sapien
atataatatataatgggatcattttgtattccataagtatatacaattgtaatttgtcaatttacaataaaaattgtaactattaaaagtaaaaataaccaaaagtgagtggaaaaggccattttgaattcaatgttgtaagagttgttttgaggcctcattgataaattaataattgcaagaaaaatgtttcagagctcataagtttagtttggaaagttgttcctaaaaaggatttacagatagtgagccataagtgaacacggataggagaaaagtttaaaatattttctgactccaggatatggagtcagatagggagtacagagaatgtttcctttcctgagttccacgcagaatttaagtttctaggttaggttttatccttatgtaattctgataacactgcattttgtgactatctttatcagaaacactggtggataatgttttctttatttaggaattcctttcattgtgataatcacttgagtgttgtatgagaccttacctacctggaaatgtaatccattgattgtgctgcctttgtactttcttgttaacagttttagatcaaccattataattgaaatcaggagacggacctcaaataaattaacactgcttcttccttctagctcccattaaaattggactttattaaaattaaaaactactctgtgaaacacattaagaaaatgaaaagaagccatagaatgcgagaaaatctttgtcctaaaaatatatgtgttttgagtgtttgtattactgccactttgttttgaggaatgagatttagggagctttttaatatacttcctatagattcactgatgttctttttctgttgtgataagggaaacaaggaaaagtgaagcgattaccaagagtaaaaaaggacgttattaatacttaatacttgtgcgcagaatcaacataaatgctgtccaccatagaatttctgtagtctgtgataatttagaaaaattataagcagggatattttagaatatctattaaagactactgatttctgggcttctgtccaaaattaggcaagattactgtagaggtaattgtttgtaataagtgctacggtttgctcacagtcacgttcacatccatgaagctagactaaattttagtagactctgctcaaactcctttcctcctacaaatttcagcctattaagggataagtagacaacgattttaatgttaccttttacatgatggcaaacctgtggctgccagaagttgaatgtggataataattgagatatattctttcagatatttcaaatgtgtgaaaattatttcaacttgcataagaaaaaaatgaaattcctgaaatgacctaacaatatttgttattaagtatttcttattaaactagaaaatacgttgatattttgataggggagttattatttattgacaaagactttaaattaaagctattaatataagcattcattttagagatttatatctaaaagggtataacatactccaagtcttgttttcttctacagttctgaagcttagagaatctacatcctgccttatcagcacctctattaagtgtcttaaagaaattgtaaagctgtcaactatcaacacatcaatgcattattgttatgatgttacaaaatggttataatgattaagaagaaagttcttagttttgaaatgcaatgatgtttggcttaaagatttgtgtttgttttatgggtaaaaattttgcatcttataaatatttgggaagtgaaagcaaaaacaaagcatatttataattaaatgtgtggatacaggaagatttttaaaatgattaaacaatataaaataacacaggtactattaatggcacaaggagacactaagatataataaaaattgtttttataagaaaactaagaatgaatttaggtactttttaacaaactatttcagataatcataatgtaacaagtttaatatgcactgtctcttttaggactggatctgccatttatgatgatgcctcatcccctacttccagtcagcttacctcctgcatcagttgccatggcaatgaatcagatgaaccatctcaatactattgccaacatggctgctgcagcacagattcacagtccactctccagagctggtacctctgttataaaggtaagaatcgtgatttagaaaaggacaaaggtgtcaatttcatgcaaattttgataaaatatttacaatcccactggatcttcagtagtaactcagctcattgactcagttagttagcatacagtattgat

SEQ ID NO: 44151 - DNA, 2300 bp, Homo sapien
tatcaaaggttagattctgacagatattagttaatcttcatcttatggtaaaaggtacacaggcaaatccccaattatatctaaatcataacaagctcaaagaacatgttagaaaaataaggttatagactcctgatatatgaaaaagtattatttagagttacttaaatggataatttagtacttcttgctcctaccacatgttatttacatttctgttacaacattttatttattctgcctgatatttacagtttgtttcctctatatgtacacacacacacacacaccacacacacacacagatttattataaggaattagatgacatgattatggagcctgacaagtcccaagatctgcagttggcaagctggagactgaggagagccaatggtgtatttccagcgcaaatgctggcagacttgaaatccaggaagaagcagtgtttcagttaaagtctaaaggcaggaagaaatcccatgttccagatagaaggcagtgaggcaagagtaattctctcttattgagggaaaggtcagccttctgttgtatttaggccttcaactgattggatgagccccacccaattagagaggagaatatgctttactcagtctatcaatttaaatgttaaactcatccaaaaaaaaaataccctcacagaaacatcgagactagccaaatatctgggcatcccatagctcagtcaggttgatgcataaattaactatcacacctacaaaaacaagaggggaaagggagaggtataattgaatttaaagaaaaccacagataaaatgcctatcaaaacttagattcattttattctctcttcagttgtttttaaatccatcacatctgagtgcttttgaaaacatagaaatctgtctagactccgtataatatatatgaagaaattgagatgcaaaaaagtaaagtgacttgtccaaggtcacacagttcattaaccataaagtcaaactaaaagcaaaatcttacaacttcagtgttctttctagtcatacaccagtataatttcccctttatcacctgtatgcatgatatgagaactggataaagtacaaactgaatttcaaaatgtcaatgataaatgcattcttgatacatgactgtcttttgtaaacatgtccatctgtacaaagtagtgattatgattcagatctcaaagtactttgggcacagttattcctgaacagtgtgatgatttggaattaattcaaaacatactctgttcatcctctcataagggtttttgaacaaagaaaataaacctttaacactgcctgtgaaagtaaaaggcatgataagaaggtttgtatccaggcatggagccagaatgaactattcattttcaagctgtggtaactgagagaagacatctcttttaacctaactagcttggaaaagcactgctttcttcctccatatgtagactaaaaataccatttctacattcccaaatggcgtgtttgtgtgagtggtcatgggtaaccaatactttcttacatgtttctaaaatctgtcaagttttcaggtaaatattcatatagagactttcacattttcagattaattttgtaaaaactaattacgaacccgcatgagggtactgatgctttcccttaatgaaccattttcaaagtttccataaaaggaatctcaaaatagattataatgaattcctctgtcgcatattatcatggaacaaagtggcacatttttagaagtgggctactgagaaatgaatctagcaggggaggcgtgagtagaaggaatctagaagaaaataagtttaaacacttcgctttggctcacttgcctgggtttcagctgcagctactgtactttgatactgaagaagcagggctagatatttgcaagtccaagcaggagggctgcaagcctgcaaatctaacagctggagagtgttgtggtggctgctttcctgtggtaagctgatttacttgtttaaggtctgacctcatcatcctgtcagcatgggttcccacctacactgttagctgcagccttctgcttctgctagaaggctacaagtattcacagtgtatcataggcagtgggggaggggagagaaagcaagaaagactgctctcggcacttgtgcttttgttagttctacagaagaggcagaaaaacaagagataacaaaggctccgtttcctttctgtgagagaaggcttttgtctttcctcctgctacgatgtcagtgtctggcaagaaagagtttgatgtgaaacagatcctaaggctacgct

SEQ ID NO: 44152 - DNA, 2300 bp, Homo sapien
agccttctgttgtatttaggccttcaactgattggatgagccccacccaattagagaggagaatatgctttactcagtctatcaatttaaatgttaaactcatccaaaaaaaaaataccctcacagaaacatcgagactagccaaatatctgggcatcccatagctcagtcaggttgatgcataaattaactatcacacctacaaaaacaagaggggaaagggagaggtataattgaatttaaagaaaaccacagataaaatgcctatcaaaacttagattcattttattctctcttcagttgtttttaaatccatcacatctgagtgcttttgaaaacatagaaatctgtctagactccgtataatatatatgaagaaattgagatgcaaaaaagtaaagtgacttgtccaaggtcacacagttcattaaccataaagtcaaactaaaagcaaaatcttacaacttcagtgttctttctagtcatacaccagtataatttcccctttatcacctgtatgcatgatatgagaactggataaagtacaaactgaatttcaaaatgtcaatgataaatgcattcttgatacatgactgtcttttgtaaacatgtccatctgtacaaagtagtgattatgattcagatctcaaagtactttgggcacagttattcctgaacagtgtgatgatttggaattaattcaaaacatactctgttcatcctctcataagggtttttgaacaaagaaaataaacctttaacactgcctgtgaaagtaaaaggcatgataagaaggtttgtatccaggcatggagccagaatgaactattcattttcaagctgtggtaactgagagaagacatctcttttaacctaactagcttggaaaagcactgctttcttcctccatatgtagactaaaaataccatttctacattcccaaatggcgtgtttgtgtgagtggtcatgggtaaccaatactttcttacatgtttctaaaatctgtcaagttttcaggtaaatattcatatagagactttcacattttcagattaattttgtaaaaactaattacgaacccgcatgagggtactgatgctttcccttaatgaaccattttcaaagtttccataaaaggaatctcaaaatagattataatgaattcctctgtcgcatattatcatggaacaaagtggcacatttttagaagtgggctactgagaaatgaatctagcaggggaggcgtgagtagaaggaatctagaagaaaataagtttaaacacttcgctttggctcacttgcctgggtttcagctgcagctactgtactttgatactgaagaagcagggctagatatttgcaagtccaagcaggagggctgcaagcctgcaaatctaacagctggagagtgttgtggtggctgctttcctgtggtaagctgatttacttgtttaaggtctgacctcatcatcctgtcagcatgggttcccacctacactgttagctgcagccttctgcttctgctagaaggctacaagtattcacagtgtatcataggcagtgggggaggggagagaaagcaagaaagactgctctcggcacttgtgcttttgttagttctacagaagaggcagaaaaacaagagataacaaaggctccgtttcctttctgtgagagaaggcttttgtctttcctcctgctacgatgtcagtgtctggcaagaaagagtttgatgtgaaacagatcctaaggctacgctggaggtggtttagtcatccttttcaaggttccaccaacactggaagctgtcttcagcaggaaggatatgagcatagagggaccccggttcagggcaggttgaagagccactctcgggacagaaacggactgaagaaaagcaacagtcctgtccaccacaatatactggcaccagtgccaggaccggcccctgcccatcagagagccgttcagaatttgcagcaacataatctgatagtacattttcaagcaaatgaagatactcctaaatcagttccagagaagaatttattcaaagaagcttgtgagaaacgcgcacaagatttggagatgatggctgatgacaatatagaagattctacagcaaggtaagagtttttggtcgcataactgaatgccgtaacttcagttaacttatcctctacaattcatgtttagtgtttaaatagaaagtgtcataataatctctgagtttgtattcagccaatcagagtctctcagaaaccgtctcctctaagtttataaaagaaaacagcaataa

SEQ ID NO: 44153 - DNA, 2300 bp, Homo sapien
ctggaattagatagtgatacaggttgcaagcttttttgaatatactaaaaaacaccagattgtacattttgaaagtgtgaatatgatatgatttagatcctaacaaaaatatgtatgaataaacttttatttcaaagttgttcctatgccacaaccccataatgtagcatagtatactttgggataggtgagcaatgtgacttccttttatgaggtgagaaaaaagaaaattatggaaaggacactgggaaagtaaaacctgtgtggtaacaactgttttgggagcagaccattttttaggagggatatgtatggaatttgaggtactgaaatttctttacatgaaattgatctgcgtctcagatgggttttatgtaactctagcggtatgcatgctatttgaagaccacggttctaacaaaactactttgaaattttacagtgtttcattccttccttcaactttcacctttctcctgacaagcctttaagcaaaaatattccctaaattttcattatgctctaaaatttcaataagctttttaaaatcaggagtgaaatggaaagaactttatttcttccacctgatacattttaatctttagaaaacatctttttgtttccagtaagcattcgtaggataagataattcagccagctggcttgactatccttttactctttaatgaagtgaaacttgaagcagctccaaacagcctttcttaagcatgcttgtaactgaatactgtacactgtaatatacaatgctttcctactgtatcgaagacatttataactattcctctgaatgaatattcttcctaataaccagaccaaatttaaatgtctatagcagatgaatatttatatctgaattggagaatagatcatacttctctaggtctcatgagatatgggcagggctctcccttcaaaatcaaaacaagaacaatacaagagagtctgctgatgggctggacccctttacaatatattttacaggttgaactatgtatagaggacctcacaatatgtattacccttttccttatggttatgcaactatatgagccccatattaaggtattttagaagggaaaactttaggggaatagtttgtaattgatatcagccatttgaaacattctttataacttggctaaaacaataaaaagtaggaatgtctcataaaatcgcagaatttttgcaataactattcaataacacttgttctaaaaataatacagacatataaatataaacggactaactcaaattgcttctgattctgttttgtaaaattcattacagatattttcaaaaagagactgtttttttttttataacaaagcaaataagtaattattcatttgtggactcttggcaacattttcttcctcttgagacagtgccaggggtcaattctagagataatattttgggcaaatacatctttaccagctaatgtagatacaaaaaaaaaaggcataaaagttcagtgttcttcttacaaaataaacggacaattaagcttaatgctttttttatttaccaagatgtttacctcctcacaatgacagttacttgcatggccaattgtatgattcttatacaatatgacataatgttctttgagtcataatgaaagttttttcaactttatacaggtatgatttaaaaattaaaattgtatgtgtttaaggtgtacaacgtaatattctcatgtacatatacaatgtgaaatgattaatataagatttaaatgcaggcctaagatgataaagaagtgacaagttgctgttctttacaatagtgttattcactgtttatttgttacagtcatttttgataacctaatctggttcatttcagccatcttattagtgtttacagacagactctcttgcgtatattagcctcaaaatgtgctccaaatctgctgaaaatcatagctctactagagaggaaaataaaaaaaaaatgtcaactagttgacgtagtttttactttatggaacttataatcattctttgctttttcaaaccatctaggagtcctgcaattgaaagaagataccattgaaagtttgctggctgcagcttgtcttctgcagctgactcaggtcattgatgtttgctccaattttctcataaagcagctccatccttcaaactgcttagggattcgatcatttggagatgcccaaggctgtacagaacttctgaacgtggcacacaaatacactatggtaaaatcaattgcttcaactgaacttgtagtaaaaatatgttaatgttata

SEQ ID NO: 44154 - DNA, 2300 bp, Homo sapien
aaattgcagttgcttaggactaagatggtttgtgggacccaacatgaactttctctctagggcaatgttattgcacaatctccaggtagctccctatattacgctaagggcccattagcatcaaggcattctctcatggctaggattgcaagagtttcagggggaatgtggaccactggggatctctcactaaccctttacttgcattatgggggctcaccagtctcctagccaatccctgcctagcgggctgccttacttcctttttcttccttgcttcaggtgttttctgtcactttgctgttgaattccaatgtgctttcttagataatctattagaagtatgattatctgttcattattttgaggagataagtaacagatgcctttggtcaaacatcttgaagccactctgccgaagattacaaaatattattcaacaccatctttatcacatgaaagattatagttcaatcaattactttttgttaatgtaagtatttgtaaatgttgacagctatgttctctacattgatagaatatcacagcattttatgaggcaattctaatttatgtgtgtgaaaggtagagggttgtaccaccactgctaacatcatctctcatcccatgccctctgcctgggagctcaaggacctgcccattcacacacccactgccaccactaccagaaccaaggcaagatgcctgtaggcccaagaattggcccacatggattcaatagcactggtgacaatgtttgtcagcctggggctcaagaacagatcatgataaaatgtactcttactaaattatagatcctatacaataatttatttggtattaatgtgttaaaatgaaatgtctaagcaataacttaaaacagactgaatctatcagtgaaccatttttttgggaaacactcttctagagctttccatgttgcctcatcctcaattagtgttaaatatttcgttaggtgaagtatcaattcctgttactgcttctcccactgtaaccctttgaaaagttccaggttctgggagccaattgagggtctcataaattatttcaaccacaatggcaaacataaaagcaagcacagtatagctatctgccccaagatattttctgaaataagggactgctcactaaggggtgagtaagggacttattgtagccccttagtcacccattagtaagcaatccctagctgctcgaaaacagtagattttattattagtcatcaaattgttgtttatggtcttaattggacattttctgagcctgaactgtaaaatatggaacctgatatcctatatatacatataaaattatatttttaatatttcaatttggtcttccagagagagcttttaaaatcccaatgtgtatgttgttatgataatctatttttcttgtcttcacagtactggtagaaaatcttttacatccatatgatgaatctcaatttattttttaatttctgcagtgtcaactatgtcagcctttggaaatcaaatgacatcagtaaaatcataaaactccttgtttatagatttcagaacataatgctttatctactttgactttaatctgtacttgagagcattcaaaatttggttatttataggagtactgcttaagtctatttttgacaagggatcatttaggtttccaaacttctttctaacttctcttagaatttgagaattatctaataacaggtcaatatttatcttattttgtaatcaaatattagcaatgagagtgtattggtggtggtgatgattacatgcactttgctcatttgaaaacatcaataccaacatcaaaattaaacaaaacattaaaattaaaacaaagttaaactttgacattaaacatttagagaaggaagtatttaaaagactatcataatcatcactttttaagaggtccactctggcactgtaccaagccagggattatctatctcttgatttcttcttacacaatacattttaaattctggcttaagccactcagtcaattgttcccttacctgcagctgacattttaccgatatatacacacattaatgttataaaattacttcttggtctttccgcactacctacagaggggtccatagggggttgttctagattcccgtcgtaacttaaagggaaactttcacaatgtccggagcccttgatgtcctgcaaatgaaggaggaggatgtccttaagttccttgcagcaggaacccacttaggtggcaccaatcttgacttccagatggaacagtacatctataaaagg

SEQ ID NO: 44155 - DNA, 2300 bp, Homo sapien
agcttcacggacacgaggacatatctcatgttttcagatagtcctcttttgatggccaacacacatacacgcacattcatatgtacacacacattcatatgtacacacacaacacacatacaaacactcacaagcatatatgtcatgtaacttggatgtccatacaatacaatttaaattttgtggttcaccttcactactgttttgacccaccagtattcctggtggctgaatactgttctcttgtgcatttatattcagtttagaatttctactcctgtccttttaggtcacgtatatttttctcctttatatttttgcttccattctaacttccggagcaccacatacaattgtctttattttctagcatccagtgatttgttaaacattgtaatacttgctacttctcagggtaaacagatataatgagggtgcctttagtctctgttgtcatatttctaaatttcgttatggctattcttcacttaggagactattccgtggtgggaacaagacatagatgcccattctcagagatctcattatatatatttcccttgtttattttctaactttttcttcttcctgctcttctcagaggatcttcgtagatttgtgaaagggaggaattgcagcagagaagtgattctgcttgattatatattttatcaagtcttcttggtttatacttggaaaagaaatggaaactttgacattttaaaaacagaaatataaaaatgtaatgtctttacaaatctgaatcttctgtgacagcttcccaaaagcaatggatatcactatttcaaatttctgaaaagtgaaggctcatggaatgaacaagtatatggaaacaaattttatctatataatactatatattatgtatataaacatatatgtaatcagagtgttagtcacatagtatttgttcaacaaatactttaataaaaattttggtgcagttgcaaagcatattttttttagaaaatggtttaacctggatgtattgttgttgctctttctatcaaaatatttggaataataattgtatttagattgcttgaatattctatgtataggtcaaaacttgcagtaaatattctttcatttttattaacaaaagcatagtgtttgaaaaattatttacagaacatttaggcattttcattgatattctgtcattttctaatatagaaattcaaagaaaaaatcaaactcctctcctgtggaggaatagctagtacaaaaatctaaaatattcattattttattataataaaaagtcacctttgaattattctgatttttgcatggctttcaagctgaaccttgtaaatgaatagtttgacagaactctttaatgaagggtaattacaaaaacaaaatatggtttctaaattgtaaaattgagcactagacttaaatatagtaatcttattctaatctctttagaattttttatattttattgaactaattgatgttcatagttatatagatcaaataaatattattttcatgcatttaaaatattttttgagcatctaacatgtgataagaattattgtattgatagtagatgcagtagtgggcaaagtggttataatcctcacagggttttcagttcagtgagaaagataaaatttaatcaaacaatactacaaatatatattaaacctatgacaaatgggtgatatttattaaacaattacttcattactagaacaatttttaaagcaaaacccccacataagttgctaacattgtttatggctttttaaatatttaggagattataaatatatggtccaccgtcactcataaaatgcaattgtatcttcctattttatggcatcatatatctcactgaatcctctcaattcctttcccctaaaaaaacccttgtctaatccatacctatcatactttgctccaacctgttcccttaaatgcctttttttgttgttaccacagcaaatcatgttatcccaccatgcacattctcttatgggagagtttcttcatcttgatctattttttttaaccttctggataaaaaatgtgattgacttaaaaatttatcaaatggggccgggtgcggtggctcacgcctgtaatcccagcactttgggaggccgagatgggcggatcacgaggtcaggagatcgagaccatcctggctaacacggtgaaaccccgtctctactaacaatacaaaaaattagccaggcatggtggcgcgcgcctgtagtcccagctacacgggaggctgaggcaggagaatggcgtgaacccgg

SEQ ID NO: 44156 - DNA, 2300 bp, Homo sapien
taaatttcagattaacaacatttttattaaaaacgtatgggggccaggcacggtggctcacgcctggaatcccagcactttgggaggctgaggcaggcggattacgaggttaggagttggagaccagcctggccaatgtggtgaaaccccatctctactaaaaatgcaaaatttagccaggagcagttgcgagcccctgtagccccagctactccggaggctgaggcagaacaattgcttgaacctgggaggcggaggttgcagtgacccgagatcgtgccactgcactccagcctgggtgacagagacactgtctcaaaaaaaaaaaaaaaaaaaatccctaaacatattgtgtccggaattggtgggttcttggtctcactgacttcaagaatgaagctgcggacccttgcggtgagtgttacagttcttaaaggcggcgtgtctggagtttgttccttccgatgttcggatacgttcggagtttcttccttttggtgggttcgtggtctcgctggctcaggagtgaagctgcagaccttcgccgtgagtgttagagctcttaaggcggcgcgtctggagttgttcggtccttctggtgtgttcgtggtctcgctggctccaggagtgaagctgtagaccttcacgatgagtgttacagctcataaaagcagtgtggacccaaagagtgagcagcagcaagatttattgcaaagagtgaaagaacaaagcttccacaacgtggaaggggagcccagcgtattgccactgctggctccccagcctgcttttattctcttatctggccccacccacatcctgctgattggtccattttacagagagctgagtggtctgttttgagagggtgctgattggtgtgtttacaatccctgagctagacacaaaggttctccacatccccactagattagctagatacagagtgtgacacaaaggttctccaagtccccaccagagtagctagatacagagtgtcgattggtgcattcacaaaccctgagctagacacagggtgctgattggtgtgtttacaaaccttgagctagatagagagtgcccattggtgtatttacaatcccctagctagacataatggttctccaagtccccaccagagtcaggagcccagctggcttcacccagtggatcctgcactaggccgcaggtggagctgcctgccagtcccgccgtgtgcccgcactcctcagcccttgggtggtcagtgggactgtgcgctgtggagcagggagcagcgctcgtgggggaggctggggctgcacaggagcccacagaggagggggaggctcaagcatggagggctgcaggtcccaagccctgccccttggggaggcagctaaggccctgcgagaaattgagcacagcagctgctggcccaggtgctaagcccctcactgcccggggcttgcaggccagccggccgctctgagtgcgggtcccctgagcccacgcccacccggaactcgtgctggcctgtaagcgtagtgcacagccctgattcccgccggagcctctccctccacacctccctgcaagctgagggagctggctccggctttgggcagcccagaaaggggctcccacattgcagtggggggctgaagggctcctcaagcgcggccagagtggccgccaaggccgaggaggcgccgagagtgagcgagggctgcgagagctgccagcatgttgtcacctctcaatatgttatcatatttggtacatatttatactaaaaaagtattgtttataagaaattcaaattttactggtgtcttgtattacatctggcaatcctgtcttcacactgtttcaatattgggaatattgcatatagttaggattttgtgtgtgatacggcaagagttataaactcatgggtgttcccagccttaactctttgcctgccatctaaagaagattttgaatttgccatttcagttattccctccccctacagtctgaagagggttctaggttgctaggtttccatgttttgtgggcattgtgatgcagagtcaaaagaactgtgaaacaggagtaagtggagaggtagagggcagaagaaaaggggtcaagaaggcaggaccccgtgaagcacacctttcctaaggattttgacgaatgagaatgaagataaactgtgagttgaaagtgaaagagaaagcataagggatcttagtaagtgcttcttagcttgtgtatccattttagaatatacgtaagaaattattttaaagttagctttggtttcttgattt

SEQ ID NO: 44157 - DNA, 2300 bp, Homo sapien
aatctgcaattcgttaaatatgtgcaattctacgtcaatccttgagcagaggcctgaatccccatacatagaaagaacatataggagtaataagtgagggagggtaagttactacaagtcatgctgacacacaaaaatactttcagcgagcatgaggcataaatgtgttggtgagaaacagttgcaggaactgagtttttactatgcatagaaaatcttatcttctgtgtttcaaaagcccaaaagtccagtggaaatagtagcattcttttctagagtattccaaaggagaccttcaattgtacccaacatacccaattattggttattgggagctttactaagttgttcattagatttgattgtgttattcagtaggtctcccttacaataaattttaagtgatgaaagtcagtaccagtaaggaagattaccaacagccaaaggatcagtagacaacattctgaaatccagcccagtgacaagtaagaactcttaagggcaaaaggaaactgtggataatatatgctgcttcagacgatagctaggactctgaaaaatatatgaaattaaaaataaataataccatacagtattattaaggagtcagagttgatgctggtggtaattgtcttcaaagtgaatcatagtgttcttgaaaaaagtcaagccttatttttcagctactagaaatgaaaatttgaaatttacaaattattttcatttgacttaccgggtgatttccacatgctggaaatatcaagaaatatttggccggctgcggtggctcacacctgtaatcccagcactttgggaggctgaggtgggtggatcactggaggtcaggagtccgagacctggcaaacatggtgaaaccctgtctctactaaaaatacaaaaattagctgggtgtgggggtgcacgtctgtaatcccagctacttgggaggctgaggcaggagaatcacttgaacctgggaggttgaggttgcagtgagccgagattgcgccactactgcactccagcctgggtgacagagcgagacttcatctcaaaaaataaaaaattaaaaaaattaaaaaatatatttaaataaactgtctgtgatggccattatttcttgaattctatcttattccacttattccacattactaaaagatccctgaatttctgactgaagtttaaagagaaacatcacaactagatatcagagtccaaggaagagacacaaagacctcagtggtactgacaggcaatagcaaagtcattcaaaagacaaagattttggctgggtgcggtggctcacgcctgtaatcccagcactttgggaggccgaggccaaggcgggcagataatgaggtcaggagatcgagaccatcctggctaatatggtgaaacccgcctgtacaaaaaatacaaaaaattagccgggcgtggtggcagatgcctgtaatctcagctactcgggaggctgaggcaggggaattgcttgaacctgggagatggaggttgcagtgagccgagatgccgccattgtgccactgcactccagcctgggcaacagagcgagactccatatcaaaaaaaaaaaaaaagacaaagattttaaggccatagagaagaaaaatttaagcagcaaggcatcaaaagcaaaagtctagttcaaaattattattaatatctgctttgaacatggaagaatggaagaggggagtcaaagtacagtagttacactcttttattgaggttagtagctaatcaacaatttgttcctgatatatctagatgagccagtgagacaattataagtaataacgggaagaacaataccagagtaaaatcaaataggaagaaagtggtaggcgtatttacactaatagaaatagagttcgtcagttagtggaaactggtgacaacagcagagaaaactctggagagctataaactgcgtgaaatcaagtgcattggaagttacagaaaatacgcaagaacaatgggaaaagaactccaggaagtgtaggggaggggcagcgtggagaagaaaggatgtgacgtcactgagataaccagctcggctgttagcaactctgttagcaacgctgtttgtctttctcggaaacaacaggtgagaattccccttacagacctgcccatgctttctaaagtggctctcccaaacctacctttgtcctaactcagttgtctgtgattctcaatatagtaacgataagcctcttggaatatggaggccgctgcggacggcccggctgagacccaaagcccggtggaaaaagaca

SEQ ID NO: 44158 - DNA, 2300 bp, Homo sapien
tctttattgtgttttcttggcacctttgtcaaagaccacttaactgtacatgtgtgggtttatttctgggctctttattctgcctcattggcctatatgtctgttttttatgacagtgctacagtgttgtaattactgtagctttgtaacatgttttgaaatcaggaagaatggtgtctccagcttttttcttcgttctcagattgctttggttattcagggtttttttgtgactacaaatgaattttaggttgttttttctatttctgtaaaaaaaaaatgccattgggcttttgatagggattatattgatcagtttggatagtatggagatttaaaaaatattagactttagggttttctacagataagattatgccatctgcaaacaaagattaatttacttttttctttctgattttgatgcttttatttccttctctggcctaattgctctgcctaaggtttccagtactatgttgaatggaagtggtaagtgtagagaagtgattattttgaaaacgtgtattataacaaatcaattctaactataatcttagagaaaatatgtacaaataaatttgaatatggacaacatttagttggttacaggaacagatgaaaatattgatttgaatcaatgatgagattgtggaaattggatttatgttgttattttactattttcaataaggcagttttaaaaatgagaaaagtccaaaacagactagaattctaacccattgttaattacgcataaaagaaaatatgtttataaaaatatattcaaaatgcaataaactaggcagatgttcacaagtgtttccacatgttggtcactctggtcacactgtaaaacccatttattagtctataatatcattgttcatatttgccttttctcaaaatctccatgtcttagttaaccaagaacactagaaagcaagcaaaaaaaaaaaatagtaaagaaaattactaagtttttgagtaaataatgaggtttaatgtcaactctacagtctaatagacactataaaatgtataaagtgaatgaatacgttaatttagcctcttattctgaggacttattaggaaaacacccactaaggtaatgtccttctcttgcaatctttttttcccaggatcttttccagcctaagagtagtgatagatgttttgtttggatttttctggaggggtaggaattgtggaaggagcctcttgaagtgttgtttgcgcatgctagatatcagtgaatttctgaaaacacggtcaaaatttctctccaaaagggtttctcaaatactctgaagagagatattgttgagaaactgctgagttgagtccagtctgatggcactgtttccttcaagggtttcaagttgacaactcatgatgaaattcataattgtgtaaagtgcatatatcttaacatgtttatttcatctgtaaatattaattacatattttgtattgattctgtggcttttatctctttaactgagattttgtaactgtaattctcgcggcagctcaacagtttcaacgttttgtggcactaaacaccatcaaaagccattatatggctctccaatcattaaaaccttagtattatgggatcagagaaaagatctctttgcctaccacctgaggaaaatattaccattatgttggagattaatgaagtaaggctaaaggccaaaggcaacatggtcctgtgttctacttgaccctgtgatcctttagcactggattgggaggccaggacatttgtaaactttgactttccaatgcactcaggaaagtatgcaacctatccttttccctaagcttaaatgattttgataattagttttttaaaacttattatttttgcccaggtcgtcatcttcttatgtgatttttagatgttcggcttaaatatagtgttttaaataataaataacatttaaaatataagaaacatctaaaagccatcttagatttttctttctctccttctctctctctctctcattctctccccttctctctctctctctctctctctctctctctccccccttctctctctctctttttttttaaatcttggtacagaggaagcgggaagttacttagcacggttccgggtttctcgcgccccgcctgtcccccctccctatcactgctactggctcttggtccctccgttggactgtcctgcggagagaaaccccagcccatcggtctgcgctgggaccgcccgccgcgcatctgcccttcttcgctgactccgccccgcatctggccagacccgc

SEQ ID NO: 44159 - DNA, 2300 bp, Homo sapien
ggtgacaaaatagttctcttctcctgcctagggattaaatggaaatcttcagaaatcaattaattggtatctaatgtggatgttatgaataattcttagtatttgaaagcactcccatagcatgcctgtgccacactgtccctggatcaatcagtgattttatttgcattgagttcctgccatctcccatgacacagtctcatccagtattgcaatccccaagagtcagagctgtaaccatttagcagcttctgatttcccctctcagacatttcctagctcccaagaagagtgcaatgcatgtgctggatactgtgaataatgaagggacggttacaggaggagcaaaatgtaatagcgaagtgtctcctcacacctgtgcaagtaaatatttctctgttttctttcatgcagacctgcattgagctgcggtgctgatgtttctcctagtagcatggctttcggtataaaaatatgcaaaaaagtgacgtgaggaatatttgaaccaaggttttaaccttcaaaatatcaggaatgggaaaggaggcagctaagaagatggagaaggatatactggggaaacaagtcataaggatttgcctttcagttaaaaaactttccctgaagcagctattagagaaaagcaacttattataattctgaaaatttttccttcttgatgttctatctctatgcagatgtcatctcctcttccattcagtagacaaaaaataaaaaatggatactgtgttattggtgctctgaaacattctctactttttctccttttatttcaggaaaaagagccacctcctttcaaataattgcacagcaccagaaagataagtttttctacaggataagcacggaaagtggattttccccataaaatcgtacacctttctggagagaggaatttagaaaattcacctggttaattttctggcgtctgggtaaatttaaggagttgttccttgaaacaagaataagagttgaccagctggggtggttttgatgttgttactactggttttttaatcacatgccaggaacgggggaattggcccctacttccttatatccacgacccttcgaaggcataaaccagccacattcctcctggtacctttagtggtccttggggacctggcacccggatgcccacccagccgtcgcccaccaggcagccagagctggctggcaagcaccaggcatgaggctccgggctggtttcctccctctcttgccccctttcctaccttggaaaagcgccgtccatgcccgcgacgctgcctggtctctggcagcaatgccacctgactcactcctgcttgctgtctggggtagccaaatgctaggtcgctagaacttctccttccctccttcacacacacacacacacacacacacacacacacacacacacagcccttcgctgctgtcagaggattaatctggaaaggcgatcgaagtaccagaccccgctcacagttgagtatgatatatgcggacagcctctcagctccaactgtgactttgccaggcttctgcccctactacccctagtctgccttaagtatcctttgtatgagaaaatggtgctgtgggatgcttgttctctagctggagtcggcagccagcggtatcacaagaaaaacacacaagaaaaatcaaacttctctgagaaaatgtgaatgggtgaaacttaaagggaagcctaagagaagagtgagcagaggaccgaggagaacattgtatgcccagggttttgctcaggaaagctagcagcccgaaagcggcgcgttttcttcagcagcgggtcccgcacgcgagagtgctgccagcacgctttctgcctccttctccaggaggcgagcagtaacttcctaagcttacctccatctctcccccgcccttcttgctggttctccgtcagcggggaggggccgcccccggatcgatgggggatgtgaggtgcagggagtggggaccagaggggggtactcagcagttggtgctgcgccatcccttcccagcaggcggcccggacactggttcacttctctccccacgccttcccctggttcaccccccttccttcccctttctccccctcggttaagtccctccccctcgccattcaaaagggctggctcggcactggctccttgcagtcggcgaactgtcggggcgggaggagccgtgagcagtagctgcactcagctgcccgcgcggcaaagaggaaggcaagccaaacagagtgcgcagagtggcagtgccagcggcgacacaggcagcac

SEQ ID NO: 44160 - DNA, 2300 bp, Homo sapien
tcgttattaggtaagtaaccggactgggtacctgtacagggtgctgtcagggaggcgtgaggtccacacttagtgcgcggacactgcccgctgcctgcccctgaggtctgaactatgacaacggggtggttttaaagacgcttctgctattctcccttcccccttctcttcccgggaggtaagagaaagagcaaaccccggaggtgagcgcagggagaatatctttttgcactaccaccgctgcgcttggttactttgggaaaactctcacttttgtcagaaatgtgtcggcgcatgaatttccccgacattggctgtgcaaaaaggtctctccctttaatgggtacagccagcttcagcgaggctgagggaaactctaagattggggcgggtgttgacaaaagagcacgtcccggactcccagactcgcccggctgagagattggagctgaggggcgatgcctctagctgagaaactacccctggcctccctgcgctcctctgggggctcgggtttggatccctgccaggctggctccaacccttgagggtacgacccttggcgcagagaggagagccaggagagccaggagcgcacagggttcccggtgctgtttctcttggcgctcgcctccccgcccttccttcccgccctatttttatggggctgtactcagccagcacctgctggatgtggagatggtaggtgtgagaaatactgcctattttttaaaaatcaacttataatctagccgaaaaacggcatcattttctcatttaaaaaaaatgacttttctaagagtattgccagacataaaagggttcctctttctctaaagaaatgacttgtaatcccttagccaaataaataaatcaataaaccgcccacctatcccataaataggtggtgttttctaagacagaacccagaaacagttcacgtcctcacaaaggaattctttttcttaaagcgcgtagcgataaaacggctcttttttttcgagaaaagtaatgtaccttttaaaagaggttcatcggaaaatgtgactttttaaaagcgagcagccgcaaacgggtgtattttttagactttagaagagcggagcggcagtccgcccgggttgcggctgggactcgcatctgagcgcttagtcgcaaaaggactgaggggtaggaggagaggtcactttctcagagtgtatagccagagccgcttccttgcctctcccagggaaagacttttagagcttaaccgaagatgggcccttttgcttcagaatgatttattccgcgttcctctgcttcacccgcctgcggcttagggtgtggggcgctaggctgctcatgtgaagcgcttacgggtgagccctagcctctccgatgcaaaatgtgggctgggggctgggaattgctatttgcgccactgcggcacacacccacaaagcaaaaaccgtggggaagaggggctaggacaaaagaaaaagaattaaagctcagcaacaaacaaaataaaaatttttaaagtgtccttttcttgtgtggaaacatcacaaaatgggatttaaacccagcctaggatctgtttgtacgaagaaaagtgtgtggaagaaactggttgaaaatccgggtagaagggggagggggggcagcaaagatggggaggaggcgatggtgtcatagcagtcgcctgtgcgctcttagcgctgcaaccaggaaacaacctgaggagcatgcagagaattccgaacgctgagcacacctgagaacatagaggtgctttgtgacttaaagcgacctaggccccctaaaaagtaaaacaggtgtgactcaaaatagaaaaggaaacggtacttgcgggcacccgcgcaacttggtaaagactgacggaattccacttttaatcttgtttgaaacaaactctcgcaatcccagcaggaaattccagcgccagggctggcctttcctctgtgggtctgtgtgtgtgtgtgtgcgcgtgtgtgtgtgtgtgtgtcgcggcggggctgggggtggggaagcaattcgaagcaagtcgaagtaatagtgtatgtacacgtttccccctttcttgcctttgtctggttcatcatagagagagcgcggaccgtgtgcgggcggtcttgacgaaagaaccgagagatggatgcgctaaggtctaaagatacctttctccctcgactaaattaagaattgccgcgacagttcccaaaagctgagtcccgctgcagctgccaggtcgccacactcgccaagcggcgagggagcgcctttgcctaccaggc

SEQ ID NO: 44161 - DNA, 2300 bp, Homo sapien
gtccaggtaatgctgggtttcagcagctgaaagccctggcagaagggattgcaggtttcacattcttccttctcttggtattcaaaactttatttttttttttgcgagatagaaattcttgatagagagcttccagactgctggtggcagggaagaaatctggttaagagattcagaaagcagaaaattctttttctctgcgcaagcagtccacaacagcatttagctaggatttataagattcttggtggagcaaggggaggcacatcgacaaaggagagtttatataagccactggctttgagctacattgaaaaaatatgtatggcagccacgttttcttagtgggaaagaaaattattcagggaatgaaattttgaaggctaattctctccaagaatcttgcttcacataatttaaaggaggtgtcatccctgtatttgttcactgaagagtccacgaactttaattagtcacctactgtgccagacaatgtgataaatggtgtaattgaacataatggagagaggaattaatttttgttaagaggttgagaagaggttcataaaggagagagaggtctgtggctttaaaaatagtcattcctagtcagtggctagccaagaaatgtatctggaaggtcatgccctgtacagaataagtaaggaagggcatgagggcttgatgtcttgttacaaagtttagaggtatatgtgtgttttgtagacctagaacatctttgaatatttttttccagcaaattcgttaaagtaacaacaacaaaatagcctgagaaaattgggcaatagatagcacacagtagaaatattattgttgtttgcatttaaatgaagaattgaatacattgatgtattacagtagagagtggaagcaaatatgttaagaagataatgtaacatccagaaaagaggactaatgaaagaatagggcctaaagctaatcagtataactaagaaagaaaagaaggctactttggggaataaaatttctctttaggcatcatcatctatccactcagatctttttactcatctcagtttccccatccagccttcgaaaaattccccatcttccatctatcgagtaaactccgtttgtcctggggagacccccactccttcagccactttcaagcacattcatcttcacctcaccccattttctacacacatccctgcatcatctctgaaccttacatcatgtaacattttacccacttcagccttctttctacaaccagttagagcctcttaatcttgtctttttcctccctttaggcactaacaaatagctctatctcgcttctttttcctcctctaagtcagctattccccgcccctttcccatgcattaattatcctgctaatttgtccactcatttcccccttttacatcctcctccccattagccaccttgcattctcctatctttcattgacctcaaagaagctaaggggaaagaaaagccactctactttaaacttgcttagatttgccaaattttcgtcatcaaggtttcttcctttctgtgtcttttgctgttttagttcacacaagacttttagtggaattccttcaatttgttatatatttttattatgcctgcaaatgtctgttttcctttggttgtggctggggattcaaatattttactttggggagtatttccaacctttctgaagttctcactgacacactcctgacactgtttcgctgcatcccatcctttctgctgtattctcttcccatgggtaattccttttatattttcagtgaaattctttcttatttttattccctcctccccccctcctcctttttttctttttgctttgtgggattggtatagcggctcaagtttaaatattttgagaagggacccccctcagcagaccccctcatcccacacacaggattttaaagcctgtgtcaacgtgtgttcatgtcaacatacagttaccaatcttcagaggcaaaggaacccctgtttgttttattttaactgcactcttagaaaattctttttctgtgtgtatggtaaaggtgcaattctcatatcgttcttctctctacattcagtggaattgattcaacatcgctgggaattgggaagggaagaaagagtacgctgtaaaaatacatttttcatcaaagacatatatacatattacctttgggaaaaataaaatactttggaacatttaattggattggctttatatgacaacattccaaattacatgtcattgtctgagcagagttctattatttgaagactt

SEQ ID NO: 44162 - DNA, 2300 bp, Homo sapien
gtgcagcacaccaacatggcacatgtatacatatgtaacaaacctgcatgttgtgcacatgtaccctagaacttaaagtataattaaaaaaattaaaaataaagatagagtagaacagatttagaatggattgagggagggtgacttcttggaactagatcgctctattaattatgttgtgtagagatattgcgacatgcatgcaatgcttttatttctttagtttgctttattttgtttttcattttggggggttatcccaggaattcaaggttgttttatcttatttttttttaatttaacttttattctgagttcaggggtacaagtgtaggtttatgtaagtaaacctgtgtcatgggggtttgttgtacagattatttcgtcacccaggtattaagcctagtacccattaatttttcctgatcctctccctcctcccatcttccaacctccaataggccccagtgtgtgttgttcccctgtatatgtccatgagttctcatcatttagctcccacttataagtcagaatatcctgcaatgtttttaaaaacagtctgtagtattcttctgccagttgtaataatgtgtaatacctaagggtaagataagaatagagcgataattttaattccaattgtcactgccccatttttatttctgcttatgtttgcatgacatttataaaatcacataaacatccaaaacttcttagatatgctagattcacagcatatagaatacatatatgtgtgcatattagctggtagtatcaatggggtatttttaatctcaccttcataacagagtataaaaccaaaaattcacaagactgaattttgagcgagtttttatattatgtaatcccaatgcacatcattgtacaaatgatgctaaaaatactataccacaggcaacagtgtttttgtgttgtttactaggataaataatgtcttcagctctagcattactcactatcataactaacatattttatgtatgataccaactgcttaacataggaaagtcattgaattcatagtatatatttttaaaatgttgtgataaaaattaatgagatattttaagtctactcctgacctaaactatcttgattgttgcaacagatgcatttatttgattattgattgtaaataggaagatttctttttttccaattttgtgtattccaacattggcatatgcatagtttaaaaaatgcggatgtgcagctatgcaatgggacagttatttcatataacacattgcttggcataaccagagcacaatatccataacaagttatttatatcatatgtagtcctcctgtttttagaacaattactaaaacttgttgatgttatcgattaccaataaatattgagaaattccttaactggatacctatatgcattaatacatttctggaatggaattttaaataaccatctgaccactgagttttcaaaactgctaaataccttaatagttgcattaaccttcatttaattataaaagtatgacatctgataggctttagctcagtgtgatacaaatttaattttgtttatataatatatcatctacaaatactatccagaagaagcacattagaatgtttaattatactagagattaaaagatatttaatatataaacttgagaataaataaaatagagaataagaattgagaattacgaaaggaaactgaagataaaatttgcagattttaagaaaatcaaaattcctcattgaattttgtcagaagagttcaagaactgaaataattttaaagctttcagtgagtgaaaaataatagggagaagtagcaagagagattgatttttgactcactttcaactcggtactgtttttaaatgcctttcttattttcaagcccttctcaagctgttccttgaagttgtataattcctgttagtctatagatgtgaaaacccatttttatatgaactaccttctgcgttctataaacataaattctcagggttgggatgtcttctagtctaactctcccattgaatgtttggacgtcatctaccaaatccatatatctaaagcaaatatagtagatctaatctggtggtccagtacctccaaagatatggaatacactcctgaaatatcctgaaaacttttttttttcagaatcctttaataagcagttatgtcaatctgaaagttgcttacttgtactttatattaatagctattcttgtttttcttatccaaagaaaaatcctctaatccccttttcacatgatagttgttaccatgtt

SEQ ID NO: 44163 - DNA, 2300 bp, Homo sapien
ctgaaaatatgcccagggtggtcagggtacagcttgtttttacatattttgaggagacatcacacgtcaatcaacacatgtaagatttacattggttccatctggaagggcagactaactcaaagtgatgaagggattgaggagggggattgaggggtggcttccaggtcatagatggatttaaaaatgttctgactggcaattggctgaaagagagttatcaatagaaaggaatgtttggattaagttaaggggtggtggagacctcgattttatcatgcagaggaggcctccaagtaataggcttctgagagaatagattgtaaatgtttcttatcagatttaagatctgtgttgatgctaatgctggtgggatgtatagtgaggcatgtgccttcccctcttctgtcatgtcctgaactggtttttcaggttaactgtggaatgcccttggccaagaggaggggtccatttgatgattggatggccttagaatttatttttggttaatagtgccacacagctaaatccaagagagtgtcttagaaaatgtaagtgatatcttgttaactatagacttaattcagtatttgaattatttaaaaaagataacccaataaatgataatatggcttttaaaaatttttcccagtaggaagtttttataatattttaatcaacaggtatttgaggaatgccaaatcaaatagtagatatcaaaaacttagtaaaatatttattaaagattaacacaaagtgtctggagttgcacaaaattgataaaaatatatactgtgttacttccaattttgctccatattcacatattttaaaaatttgcaataattactttgctaagatggcaagaacatacagaaacaacaatgaaaaagaacaaaatgtctgagtaaacatagccagaattgttcaatagtcataagaaaaatatttaacataatttaggacaaaaatctaggatggaataaaagacatgatgtaatcttgggtagaaggattcagcatcataaagctgatgattctctctaagttaacatcaaaattagtgtgattccaacaagaacagcaacatttttagagctagataaattgattctaacgttaatctgattcaacaatcccatttctagaaatatggataaatgatatgtgtgaaagatttttcattacagcactgtttaccattttatcattttaaagttgaaaataagtcccaatatccatgtataagggactgtttataacagctatgagataacctacaaatatttgtttatatctacatacagaaactctggaaacatatttgagaaactaataagaatgattaactgtagagggaagtgtcaggcctctgagcccaagccaagccatcgcatcccctgtgacctgcactatatgcccggatggcctgaactaactaaagaatcacaaaagaagtgaatatgccctgccccaccttaactgatgacattccaccacaaaagaagtgtaaatggccggtccttgccttaactgatgacattaccttgtgaaagtccttttcctggctcatcctggctcaaaaagcacccccactgagcaccttgcgacccccactcctgcccactgagcaccttgcgacccccactcctacccgccagagaacaaaccccctttgactgtaattttcctttacctacccaaatcttataaaacggccccacccctatctcccttcgctgactctcttttccgactcagcccgcctgcacccaggtgaaataaacagccatgttgctcacacaaagcctgtttggtggtctcttcacacggacgcgcatgaaatttggtgccgtgactcagatcgagggacctcccttgggagatcaatcccctgtcctcctgctttttgctccgtaagatccacctaggacctcaggtcctcagaccgaccagcccaagaaacatctcaccaatttcaaatccggtaagaggcctatttttactctcttctccaacctccctcattatccctcaacctctttctcctttcaatcttggaaccacacttcaatctctcccttctcttaatttcaattcctttcattttctggtagagacaaaagagacatgttttatccgtgaacccaaaactccggtgccggtcacggactgggaaggcagccttcccttggtgtttaatcatttcagggacacctctctgattatacactcacgtttcaaggatgtcagaccacgcagggatgcctgacttggtccttcacccttggtggcaagtc

SEQ ID NO: 44164 - DNA, 2300 bp, Homo sapien
gctctcgtacttcaaaacacatttatttcacccacgtaactcattattctcatttgtcatgaaatatttgtgcactgatagacaatgaaaattggcatcttcctctaggatttttatttcactgatggcaggttttgaactccatagatgattttcaattcaaagtggaagaaagaacttgtgagttaatttcaaacttctgagtaacttctgttcagtatgatgtttactttactgcaatcgcaggtcaactgttcttcagtcctaaaatacaataatccctaatcagatatatctgtttcaagaactaaaattacttctaatttacaagactcgcttcttataaactattccatcaacttaattctactcctacaaagctcttttgtgtaggttcacaaataaatcattttacgcctctttgctttcagaataattcattcaggaatgactcagagtaggttcgactaatgcatgacgtcttttaatttcatgtaaactaacaatattcaatttcatttggaaatattttatatcacctgaacctatggggtacatatagtaagttttctttccatttctttagctatctttaacattcacatcgaataattttctaagatctgtaactatgaaattctattttatcttactgctatcaatgttatttatagtgtaaaaataattatattatctttacatttgaatggactacactggccttgagtcaaattttttaacacggtattaaacattgcatgtttagttactgcaagcatcatattagtcactgttaaatgaggtaaaatctatttttccttagctcacttcataattctctactgtatatgattcatcccttcatctggaatctgctgtagttgagcttccattgtgttgggtatggaagaggtttgttcacactgacttactgatacaacagctatcgaataatggaaaagatgttatgatttcttaagatcatcagtccactcctagacattgcctgtaaagaatcatatagattttaaagaagacatgtgaagtgtttaaatggaaacctctgtagctttcaaacaatgggaaattggaaatattaactcaatctgactacatgaccttaccatcatttggagaataagctatttccagttgccctacaactgaaacgataattttcttcatcattatcatgactttctcctttatacaataaaaagttttaatattgaagatgcagtatcttatatttgtactccatctactgatcttggattctaaatggattggagcttttgccttgagtaaatgtattcctacaaaaaccatagaattttagagagaaaaatgatattagaaagacattatatacccaaccctctcttttgattgatgagaaaactgatgccaacttagttatgaattacctggatttacatgaacaagaagtgaaactggagcttaggtctcttgattcattttctggagcttttcctactccacaaactccttttattatgaattctgtactccaaatattactataaatgaagaattcaatgtaggatttttttttcatcactaaggcaagtgttagttaacaaatacagtcaaggagaaaatgaaatatttgaaattagctgaagttatactaaaggcacaaagaaaaattctcagacattagtaggtactcagtaaaagagagaaattcagcatcataaagctgtaaacgccttgataaatgtgaggtcaatcaataaaataatggcagtgaactcgtgtggctcatagcatagcacagaagataaatctgaaagagaaacagcaaaatgttgtgaacaatagcagcatcgttgaaataaatagtccccatttatactagtctgtagttagagttctaatgaattaataatttttattgatttcagtttctaaaagaaattgctattcttgtcatctttatctgccttggaatctgataaaatctaagttgactacttctcattaaaagaaattattaggccgggcgcggtggttcacgcctgtaatcccagcactttgggatgccgaggcgggcggatcatgaggtcaggagatcgagaccatcccggctaaaacggtgaaaccccgtctctactaaaaatacaaaaaattagccgggcgtagtggcgggcgcctgtagtcccagctactgaggcaggagaatggcgtgaacccgggaggcagagcttgcagtgagccgagatcccgccactgcactccagcctgggcgacagggcgagactccgtctcaaaaaaaa

SEQ ID NO: 44165 - DNA, 2300 bp, Homo sapien
ttgcaatcttcaatttcccatccccaagaaaagaagggatcattgtgatctggttttgcctttattatatatgtcttcaccagcacctcatttctgaagtatgggttgggtagaaaatgaaattcaaaggtgtaacttacaggctggccaggttttgagaacttcaggctaacatccgacaagaacttcagaatgggctcatcatacttctgaatcataggcccgagcttgtcaacattctttaaaacaatcagccaatagtcaggaatgcctttagggtcttctcttttaggctttcccttcctagctcttttaagatctacactgtcctgaagcctttcctcaggaactcttttatgagtctctcttactgcagcccttgccttagcctctgttgctttaggctgttctttatcatctgcctttacctgggggacttctttaggatcttcttttacttcaggggttgcctccatacagtctttagaatctgctttttcttcagcctttacctcaggaatttctttaggaacttccttttcttcatccttcacctcaggaatttctttaggaacttccttctcttcagctttcacctctgggttttctttagggttttcttcttcctcaccctctaagggaggcatttcactaggggtgttatcctgcacctcctcatcactgctgaactcctcatcctctgaattccattcacattcttcttctgtaggctcgtattctgcattgatgatttgaaaccgcctatcatacagaggcttgttgagttcagcatattttctttcaagatcatgaattgcttttaagaacagggtatctaccttgtcacattcatcttgaatgtttctaagcgcttgcacacgatttctaactgcctgaggcagcctatccacgaaatttgttcccaacggggcccgccgcgcccttctggaaggctcaggtaccctcttctttctatacaagcggctgcggctgctagtgctgccgctgctgctgctgctgctgccgctgccgctgctgctgccactagtgctgctgctgctgctgctgtcactagtgctgctgctagagctactgctgtcagattcttccccagaatcactagtcgagctagccatctcctcttcggcaaccccatgggcgacaggttccgagaccattttaaaatctgcttctgccatcttgcaagcctacaaactctaccagggagaccgcgcgaccagagatgggcagaaaatgactcacggatgcttgagtggcggcggcggaggcccgggctgcggaggtggcagcggcgatggcagcagcggcgcagagcggagctggagctggggatgcagaggccggcgctgaggtggcagcggcagtggaggcttgggcgacagcggtggcggcaaggcctctcccggctgcagctagagtgccgagatgtaccgcagccgaatggcgcagtatgagaccccgagatctcttctcgttttagatcgcgagccccctccccttgcagtcagacctcccgttaatttcgttcccagtgtgcctttagttcgctcctcatttgctggtccaccttaattgacaaactgtacgcccaacgaacggccaaacgccactactcctggctccgcccaccttcccagacgccgctcgctggctgaggtgcgaccccttggaaggtgtccccctgccccccaaaaagtctatatttatagttttataattaaaaaagaaaaaaaagcgtagacatgaggtaaaaataccagccatagttcctaacaagggcaaaagaggcgtgtcttccttctcccatccgcccaccctgaattcccgtttagtttgtcacgggtctcttgacaaaaagctgtaaaaaaaaaaaaaaaaaaaaaaaaaaattgaatgaaaatggtccaaatggcgtcattgggtagtgtgactatggacgatttaaaaacaaaacgattttctctaaatattctatgagcatgcatttttacactggataaaaaaggggagagtcggttattggcagaggagggagggactagacagcaggcgtattgcattccacgaagctgatttaataagtgctgtctgtgatgtttggcaagcctggtttatatccatctacaaggtttgcgaacccatgttgccgtgagtcagttacaccatttttattatatttctctttttaggctggcatattatataccccaaccttgctgctaacttgccacgtagcccttctcaatgcttgtaacaaccttgtagataaaacaaagagg

SEQ ID NO: 44166 - DNA, 2300 bp, Homo sapien
aaaaatatattagttgaataacaaaaaaatgaactttatgcactgttggaactgtaaattgtgataataattctgcagagagtttggcaatatgtatacaataataatttcataatatgaaatgatcatccccaagccatccatttctaggaatttatcttatgaccaattttcacaagtgcatagaaatacatgctttaggtatccagggacactttgattatagcaggaaaatagtatgtatttaaggggagagatggtatagaaatggccaccctataacaggaatctggtcaaataaattaaggcaattatttccatggaatatgcacttacttaaaaataagatgtcgatcatttgccatgaaaatatagccattagtaattgataaattaaatgaaaagattacaaaacataatatggtgtcacatagataaagcagtatacataaataggcaggtatgtatatgcacaaggaaatttctggaaggaagtgcatcaaaatgctagtaattcttatcatttggtggttaagattttgtgtttttactactgttggaattttctatattgttttatctttgcaatgttcacagactttgacaattagagataaacaataaaagtaaatgcatttatgaaacagaaaagcgtttcctaacttttaaaaaacgtgattacatgacaaagcacaaattctataaagattaatctaactttaatacatttcctcatttgaaatgaataatttatcatatttcatattttaatttaccacttgtattctatgaccaggtttagatagttaatgcggttaagtatgtaattgtctacattagtatgccaaattacctctgtggattttcctgtttccatagaattatcaagataattctctaaaataaatctttaaatgactgtatcctgtaaacttttattcagatggagatgagtaatttttgtcattctttaaaatgtgctaaatatgatccttacctttcaatgaaaagtaaatactcgtcttttttattgtaccaagggagttgttctgtagcagaaaaaaaaatcctgtaaataaaaataacaaatactcgtttttaaacttcattttgcaaaagtttattcacatattactggacttgtaaatcatactatagtatggctagaattttacaacattagaaggaaattggtggcagatgacatcgcatacactgacagaagatgcacattcattagcacaaattccccctcccatcccactgttcttggaattgaaacctgctgcacaaaagtataacgcaaatcatttgctttttaacaatactacctaacatttaatacctctttgttttatctacaaggttgttacaagcattgagaagggctacgtggcaagttagcagcaaggttggggtatataatatgccagcctaaaaagagaaatataataaaaatggtgtaactgactcacggcaacatgggttcgcaaaccttgtagatggatataaaccaggcttgccaaacatcacagacagcacttattaaatcagcttcgtggaatgcaatacgcctgctgtctagtccctccctcctctgccaataaccgactctccccttttttatccagtgtaaaaatgcatgctcatagaatatttagagaaaatcgttttgtttttaaatcgtccatagtcacactacccaatgacgccatttggaccattttcattcaatttttttttttttttttttttttttttacagctttttgtcaagagacccgtgacaaactaaacgggaattcagggtgggcggatgggagaaggaagacacgcctcttttgcccttgttaggaactatggctggtatttttacctcatgtctacgcttttttttcttttttaattataaaactataaatatagactttttggggggcagggggacaccttccaaggggtcgcacctcagccagcgagcggcgtctgggaaggtgggcggagccaggagtagtggcgtttggccgttcgttgggcgtacagtttgtcaattaaggtggaccagcaaatgaggagcgaactaaaggcacactgggaacgaaattaacgggaggtctgactgcaaggggagggggctcgcgatctaaaacgagaagagatctcggggtctcatactgcgccattcggctgcggtacatctcggcactctagctgcagccgggagaggccttgccgccaccgctgtcgcccaagcctccactgccgctgccacctcagcgccggcctctgcatccccagct

SEQ ID NO: 44167 - DNA, 2300 bp, Homo sapien
atcaaagagctgcagaatacacattcttttcctcagcacatggatcattctcaaggtcaaaccatatgttaggtcacaaagctagttttaaaatgttcaaaaaattgaaagaatatcaagtatcttttctgagcacaatggaataaaactagaaattaataacaggaagaattttgaaatctacacaaacacatggaaattaaacaatatgtctgaatgacgtgaatgaactgattagccagtgggttagggaagaaattaagaaagaaattgaaaaacatttttgaaacaaataataatggaaacacaacatacgaaaacctatgggatactgcaaaagcagtactgatatggaagtttacagctgtaagtgcctatattaaaaaagaggaaaaacttcaaatatacactctaatgatgcatcttaaagaactagaaaagcaagagcaaaccaaatccagaattagtagaagaaaataaatgataaagatcagagaagaaataaataaaatggaaatattacaaagatcaatgaaacaaaaagttgttttgttgaaatgttaaacaaaattgaaaaacctttagctacactaactaagaaagaaagtgagaagataaaaataaataaactcagaaatgaaaaagaagacattacaactgatactgtagaaattcaaaagatctttactggctactatgagcaactataggccaataaattagataatttggaagaaatggacaaattcccagacacatacaacctacacagattgaaccaggaagaagtccaaaacctgaacaaaccaataccaacaaatgagatcaaagccgtagcaaaatgtctcccagtaaagaaaagcctgggacccactggcttcactgctgaattctacccaacatatgaagaagaactaatatcaatgctactcaaactatttcaaaaaatacagggggaaggaataatttcaaactcattctacaaggccaatattaccctgataccaaaaacacagaaagacacataagaaaaagaaaaaggccaataattctgatgaatattgaggcaaatatcttcaaccaaatactaacaaaccaaattcaacaatacattagaaaggtcattcattatgaacaagtgagatttatcactgtaatgcaagcgtggttcaaaatactcatatcaatcaatgtggtgtatcatatcaattgaatgaagaataaaaaacgtgattattttaattgatgctggaaatcatttaataaaattcttgcaatcctagtctctgataaaacagactttaaaccaacaaagatcaaaagagacaaaggaggccattacataatggtaaagggatcaattcaacaaaaagagctaactatcctaaatatatatgcacccaatacaggagcacccagattcataaagcaagtcctgagtgacctacaaagagacttagactcccacacaataataatgggaaactttaacaccccactgtcaacattagacagaccaatgagacagaaagttaacaaggatacccaggaattgaactcagctctgcaccaagcagacctaatagacatctacagaactctccaccccaaatcaatagaatatacatttttttcagcaccacaccacacctattccaaaattgaccacatacttggaagtaaagctctcctcagcaaatgtaaaagaccacaaattataacaaactgtctctcagaccacagtgcaatcaaactagaactcaggattaagactcactaaaaaccgctaaactacatggaaactgaacaacctgctcctgaatgactactgggtacataaggaaatgaaggcagaaataaagatgttctttgaaaccaacgagaacaaagacacaacataccagaatctctgggacacattcaaagcagtgtgtagagggaaatttatagcactaaatgaccacaacagaaagcaggaaagatccaaaattgacaccctaacatcacaattaaaagaactagaaaagcaagagcaaacattcaaaagctagcagaaggcaagaaataactaaaatcagggagaggaggagccaagatggccgaataggaacagctccggtctacagctcccagcgtgagcgacgcagaagacaggtgatttctgcatttccatctgaggtaccgggttcatctcaatagggagtgccagacagtgggcgcaggccagtgtgtgtgcgcaccgtgcgcaagccgaagcagggcgaggcattgcctcacctgggaagcgcaaggggtcaggg

SEQ ID NO: 44168 - DNA, 2300 bp, Homo sapien
tccctgagcctctgacactccgatagttacctctttcatgtgcttcaaaggcttcctgttcatatctgttatagtgcagtgcagttctttaatggtctgtctctcccagtaggctctgaagttctaaaaggcggaaactgtgtcatcttcatccttcttactcatgacactctgtatcacctagtgtactctaaggagctgaagaaatgtctactgggcagattactgaaccatgtttgcgcttggagggccctcagctatggaccacacctatggcacaaacaggaattacgcattggctaaacaggtcatgtctttctgaagcacccattttgactcaatttttcaggagaggagacatttatataaattgtgtttgtgtgtgtgtgtatgtagtgagttgaattcaaaatatacactaaactttaagtaagtaaaacgggaacttcaacaaagcaaagttaccatggggctccttgagcaccctgtttgggagcatgtattccctcttctctgctgtcctttggtagcttgccaccttaggagtagagaagtcacacctccatgattaaaaagaaagtcagccgggcacggtggctcacgcctgtaatcccagctctttgggaggccaaggcaggcggatcacctaagctcaggagtttgagagcagcctgaccaacacggagaaaccccatctctactaaaaatgcagaattagctgggcgtggtggtgggtccctgtaatcccagctacttgggaggctgaggcaggagaatcgcttgaacccgggaggtggagattgcggtgagctgagattgcacctttgcactccagcctgggcaacaagagggaaactctgtctcagaattaaaaaaaaaagaaagttaatgacaatgacaaagctagaattaaagctgttttcagatatctggtgttcttttcattctactgcccaagttagctgtctccttgcacctatagcatggtcaaatgcatcctaatgcactctcaataaatatgttcagatacaaattccattcagcatattaaatttaggccgaaggggagaaggtcaaaaggagtcatagtctggagatatcttcagtaataggtgtatggcatgtttatagatttcatatttaaatttactttataggtagctttcctagcatatgtgctcctattctatgatggtggttcattcaaatcctacccaccccgtctaatgttctcagtgtgtacctttacttttaaagggcatcatttaaagaggatggaagaaatacagtgtgggtactatattttgtcctgaggacaaaatgctaggtatgacgcaaggacttaagactatcgtcccaacagtgccctgctgctgcacaaaaacacctagcatttgtctagggattttcatttacaacaaagctttgacacacatgatcttattcactccccacaacaactctaaactagttcgggaacctgaaaatagcactcaattcaattgctagctgtatgtaagtgttttggttatagaacctaacaatcccctagggattaagcggtgggcgcctgctgcttcaacaaccctgcagcaagggaataaaggaacaactgtatttcttcggtcacaacgtaatcacgacaacagaaagcactcactctttccactctgacccacacacagtctgtcgaggcaattaatcagcactcccggtggttttcctataggatgccagttcccttgccaatcaagtctttccacagactgtagcaggaccacacccccggagaggcctcagggagggaaggtgctgtggcccacagaagtgaaagctgatactcaggttgacccgccagtgaaacttacaggcggatcttcccgggcctcagtttccccatctctaaaatgggctacccttcctttctcttgactagttccctccctgttctcgctgggccactaggaagtgaaatcagtgcctaaccgcagctgaaagtgctctgttaggctccagtcaccgcgccgggcatgctcagtagctggggccggctcggctgcgggagtaggaagcagctttgcgcgcccgggcggccgatgcgggcactttgaagaatcacgtgtgttgaggccctcttaaagagataggcacctacttttccctccaccctaaacaccgccctgagggcggcggcgaccgtggtaattgcaactgctcaggggcagggcttgccccagcgccgagtagtggcaacggcgtggttgcgtcgggggtgcctgggagcctggagtcccgggggc

SEQ ID NO: 44169 - DNA, 2300 bp, Homo sapien
tcaagatttcctgactaaaaatctgatgttaataaaacagcagcatctgattgtgaagtcgtaaacttttaaaaatatatttagttagttggatctctagtaatgtacaattttaagaatacaaatgttaacatagagccagaagttaaatatccacatttacatggaaatctatttgtgggatcagataattattatatatttatttataaagcaaattaagtatatttgctccatgattttattcttttttttttttgtgagacagagtcttgctctgttgcccaggctggagtgcagtggcacgatcttggctcactgcaacctctgcctcccaggttcaagcaattcttctacctcagcctcctgagtagctgggactacaggcacgcaccatcatgcctggctgatgtttgtatttttagtagggaaggggtttcaccatattggccaggctggtctcgaactcttgatctcgtgatccacctgccttggtcttctaaagtgctgggattacaggtgtgagccaccgcgcccggccgattttattcttttaaaacttgaaaggtatatataactttatgttcttctataagttttagatatactcttcacatatttctgtaattttgagatagcaaaaagtgaattattttaaccagtaaaagaagtgagagcattaataaacttctcaaaactctactaatttaggctattaactaactacaaaggattgttattaggttacttgccaatggtggattccagtaactgtggttcctttattaagcctttaaatcaataacacccaaaataaaatgttttataaagaaaaataaaatttcaataaaatatcaaaacattcttggccgggcgtgggggctcacacctataatccctgcacttcagggggctgaggcaagtggatcgcttgagtccaggagttcgagaccagcctggccaacatggtgaaaccccgtctctaccaaaaatacaaaaaagtcagccaggtgtggtgatgtgcgcctgtggtcccaggtattcacgaggctgaggtgggaggatcacctcagcccgggaggtggaggttgcagtgagcccatatcccgccactgcactccaacctgggagacagagcgagaccctgtctccaaaaaaaaaaaaaaaaaaaaaaaacaaaaaaacaaaaatccgggatctatttatgtaactactagaatcttaagttcagaatttactccataagagtatataaaaaacttactgtgattttatccatgtttttcctaatatataataggtctaagtcttgtacttttctgtcctgtccacagagccttgaaaataatttagagctcagtcattcagtttggatttatgtataaattgaaatatattaattacttatttatagtgcacttggcaaaatgcccagaaaattacaattttaaaacaacaaaaaattttttaaaagccagtgttaagatgtgacttatcttagagtatgataatcgttgaaagacgattgtcttgccatttcttccaaaatgctcctaggttttttgttttttgttttttgtttttttttttgagacggagttttgttcttgtcaccgaggctggagtgcagtggtgctgtctcggttcactgcaacctctgcctcctgggttcaagcgattctcctgcctcagcctcccgagtagctgggattacaagcctgcaccaccacgcctggctaattttagtatttttagtagagacgggatttcaccacgttggcaggctagtctcgaactcctgacctcaagtaatcaacctgcctcagcctcccaaagttctgggattacaggcgtgagccactgcgcccggcctgatgctcctagttttaatggtttgaatgaacaggggacgtgagttcttgagaacagtaactacggtggtgcatttttcccccctgcacgtaacgtacagcactctaccgttttgccaagcactttgtgctcctaaaatttctgttgcattgttgtttgaatgaatgaataaatgagtcttttaaaagtaattgtagaagttgcagcattaagaaataaagaggggggctagtaaaaatgcatttttatagagatgttgggaaaggcttgcttgaaattacacgtgggacttttaatagataggcgctttgaccagctaagcaacagggctcccctcgtgtgggacttttagaatgtagcaaccactgacacacagggaaggattatgcgatcaggtgagaaggtggccgaccctgactggctggaag

SEQ ID NO: 44170 - DNA, 2300 bp, Homo sapien
agtgctgggattacaggcgtgagccaccgcgcccggcccaggtaacattttttaaaaggtgttcattttttaaatttggccagaagagacagatgcacttgtaaaaatggggtactccagcgacaggactttggtagcaatgaacccaacagattgcactggccctgcaatgaattttctttgctagatagtgatatcacagaaaaagcactgaagattctgggatagaactttaaaggttttatcttgtgcatattaagtaaggttttactgttatttctctttttacagtatttatctactaataaatgtgatcttaacatctaagaaaataaaagtgctaatatttcagttttatgtctagtagtgtcatccttcaaaataaatgagtatgaaaataaccattaaagttaaaagttttagaatctagttaactgggaatatatcggaaaaccacaaagttatgaaaaggcttctgagtgactgaaattatccacagactggtgaccatgatgttacatttaactgttcaagagactcttagttgttcttcatactctgatttgcgtgaaattctgacaacctaggttctttgatttctcaaaacctgcttgattaaatggaaaaggaaagctaccatgaggtcagcacagtctcaacaaaaattacaactgtaaagcagcatagagaactattatagttcagaccagtacagtaatttgttgggcatcgtgacattacagagagataaaaaatgtttaaaatattaaattgtgtgctgttttttaagcaacaaggctggttatacgttaaaaattattgttgtatttttaattaagttctaacaaatttaaaaggggtactgtgcccaaaggtactcagttacctggggaacatcatttatgtgaaagtatccatttctcagcaactatgaataaataagaagttatcctcatatggcatgtttttcatcctaagaacatccatgtgaggcagaagtgtgacaagcattttattccacttagggatgattaacctggccccagctgtgttttccttatttaaccattgactagactgaggttataatccaatattatttactctagacccgaagatgacttgaaaaaaaccagatttgtaatatgtattactatttattcttattcttgggaccagacccattactaaagacatagaagagcaattagagtctatttggcttcatttacaaacttttagtaggttggctatttatcagcacactatatttagggaagtttatatcataatttgtctatagtcgtacttcttactactgatttttctctgttgaatttattatcctttgacaaatactaaatcttacccaaattttaatgcaaaagtgccttttaaaaaattttgcagtatgtgagtggtcatttttaaggccagaattacgctgatggattacagaattaggatatgttttaaaacctctgacactttaaacaaattgaagcaatagccatgcatattaagtgtgtatgcttttataaaatgggtcttttaaaatgtgttgcataaatagatccttggatagtcttgtaatataagtggctctgtccagttttgtaagctgttatagctatcttgactaaaagtgctgtagtaaattcaagacattgcttgccacgtaatgtgaagaaactcatcccttattgaaattgagaacctgtggatgcgtagaaccatttctgtatccatgaatgtaggactaatggctcatttgtttttattaactttagaaacaatagcataagtaaatagaaaaggttgataagtatctttcaacacaagcatgaatccctgcaaactagattatgaagtcactagatgtagttgattacatcacaatgggtttggtactgtaacacccagaccatccttaagcttaggcatgcttgtcctaagaaagtgtagtggctgcaggattttttaaaacaactccagaaaaaagacctagttcttctaatatgttgaatgttttctaaagcaaattgatctgcatggttagaaaggcattcatgagtactttctctccttttcaggccacaatattataaaataattgaggaatgtgtttcacagatagtgctacactgcagtggtatggatccagacttcaaatacaggcaaagattagacatcgatttaactcatctgataggtatgtatcataatcctcattgtcctctgattgtgttttgtgccttctgtattataagcactttttaagtgaagaagttcagtaagaa

SEQ ID NO: 44171 - DNA, 2300 bp, Homo sapien
gtgaacaactaacaatacaaaggtattttcaagttcaggtgcagctggtaggctgaccagtggagctgagctgaacctttattttgacatggcaacctcttccaagttactgaatcaatcctcttgaggatgattatgacagccagattagaatgtgaaaccagtccctttttagtagtattagattcttagaggtcatgcattcagttctgggcaattactgtcagtttaaacattcaagaagaaagaaagaagtgtataattagtcaagcagaagcatatagaacctgagcagtaaagattctatgggaaaatagacagaatgggggaacagagaagggaactattgtcattttcattgacactattcatagttgggtgttaaaatatcttagacacttccagtttgtactttggctaaaaacagagcaagacatgggggaaatgatggagtagcattgtcttcttctggcactatttattcattcattcattcattcgttcgttcgttcaacaatttatgtacctggcactctgcttggcatttgcagatacaaagattaaccagattatatccccatcctcaaggaggtcacggtttaggggaacagatgtggaaacagttttaaatataataaaacttgataggtaataatagagccatgtttctcaaggggctatatgtttcagaaccagggccagagagaaatagtttgaaagatcctatcaatattatgctaccttatatcgcagagaaaaaataggcatattgctttcttaaaacaggaaataaagattcgtaaaaatgtggctgctggtagggataagatgaaggctatggaaaccaggagcctgaactctccactggggatgaatgtccattccagtgtctttgcaagggtcaggggagggggagaaatggtaggacatgcaagatgttgatcataaaagggcataggtttaaggaagtcaagaaacacttttgaatttaggtataaagaaatacctatgggaactatccaggctaaaatactacctggggttggagggaaagagacagctaaagaaactgcatttagggccacaaaccttcaataaggagtcagagtgtaagaaataaagagcaaatgaagcaggggaagaaaaaagccctggtgccccctctttgcaagcgcacggctaccctgacatccttggaagttaaagaacagtgaatgctgtctacagcaacagtggtgctgagagccacagctctcggggtatttgggatgtagtgctggaagccctggctttcaaacatggttctttcacaaataaggtatgatcatctctgtagacctcatagacttacgaggctcaaacaagttgctagatgtaaaagcatctgtgagctcttaaaggatatgtgcttgtgtgtcgaccctccctgtcccacaaccccacccaagataatcaaaagccctcaaagataagtgagataattgagttagaatgcaccaagcccctcagaaggaagttagagtatggaaatattaataagaatgacccatatttgcttcttgctgataatgcttttctttaaaggaatgacaccaagagagtccaactgttgtaatgccctcaactgttgtaagtgggctgcagtgccacatttttagcagccaagtactttgtttccaattcaaaagcaatagttcatttttttgcaatttcttgccagaatctggagagagacacctatataaatgttgcatgaatacaatgatcatcttcttcctattgtttgaggccgtataccagatatcagctcatgatgagctgttggtcacatctggccaaagcccttcaggaaactttgagattgaaatcactggtggagcagagttcacgaagggccaaagatgaagaatgtagtttctctaaaagtgaaataatgggacaataactgtcagccaaatgtctcggagagctcacagtcccttttgatgaaattccatgtttcttacttgaaagggctgcacccatgattaggacttcctcctcttgatcagtgactcagacctgagtcagtcagaaagcaaaaccaggcctgacccagccagtcccatcaagcagagaagtagacagcttcaggggaggcaggggtgagcagagctgccaagagcaaaaagaaaccattcatatcaccttagataccacggctcttcctactccaggtgcttcctggagaggtatagatgcaaaactataggagtctttagaagaagcaaccagccggactgtcttgaaacgcgatcaga

SEQ ID NO: 44172 - DNA, 2300 bp, Homo sapien
cccttcctctgctggccccgggaccgccatccgactcaaccctataaccgggtgcccgcggcgcttgccagtaactgactcccgtctgcgacaccccctttctcccgaacaggcctcgaagaggccagtgtggcccccccagaccccggagggcgcattccaagcgggtactctctccgcagtgaactgggagcgctggggggaggtctttgcgcatgccaggtgcacagacagcgagttcgccagcctcagtgccggtgcaccgcggcgggccgggcagtgcctgaaaggctgcgcctcctccgccctctttaccttcgcctcaagtactgtccggactcagcggtgcgtcctccaggccgcgcagacgccgcccgacccgcagccctgggcggctgccgacagtcgcgcccggctaactttgaaggggtaaaactgagtagccgggctggagggagggggctcggggccgcgcggcgctcccttggcccctcggagcccccggggcccccgcgagcccccgccgcgtccgccgcaacctcagcattggagccgccgcgggtgtcccccgcgcgccgccgggccgccctgggcgggacttctcccgcggcctccggggccacggggcgcgcgcaacaggcggcccgagccggcgggaagctggagcgccgacggcgtcggtctcggaggggtgtggagaggcgaggccaggcagagccccgtgcagccatggagtcgctcctgctgccggtgctgctgctgctggccatactgtggacgcaggctgccgccctcattaatctcaagtactcggtagaagaggagcagcgcgccgggacggtgattgccaacgtggccaaagacgcgcgagaggcgggcttcgcgctggacccccggcaggcttcagcctttcgcgtggtgtccaactcggctccacacctagtggacatcaatcccagctctggcctgctggtcaccaagcagaagattgaccgtgatctgctgtgccgccagagccccaagtgcatcatctcgctcgaggtcatgtccagctcaatggaaatctgcgtgataaaggtggagatcaaggacctgaacgacaatgcgcccagtttcccggcagcacagatcgagctggagatctcggaggcagccagccctggcacgcgcatcccgctggacagcgcttacgatccagactcaggaagctttggcgtgcagacttacgagctcacgcccaacgagctgttcggcctggagatcaagacgcgcggcgacggctcccgctttgccgaactcgtggtggaaaagagcctggaccgcgagacgcagtcgcactacagcttccgaatcactgcgctagacggtggcgacccgccgcgcctgggcaccgttggccttagtatcaaggtgaccgactccaatgacaacaacccggtgtttagcgagtccacctacgcggtgagcgtgccagaaaactcgcctcccaacacacccgtcatccgcctcaacgccagcgatccagacgagggcaccaacggccaggtggtctactccttctatggctacgtcaacgaccgcacgcgcgagctctttcagatcgacccgcacagtggcctggtcactgtcactggcgctttagactacgaagaggggcacgtgtacgaactggacgtgcaggctaaggacttggggcccaattccatcccggcacactgcaaggtcaccgtcagcgtgctggacaccaatgacaatccgccggtcatcaacctgctgtcagtcaacagtgagcttgtggaggtcagcgagagcgcccccccgggctacgtgatcgccttggtgcgggtgtctgatcgcgactcaggcctcaatggacgtgtgcagtgccgtttgctgggcaatgtgccctttcgactgcaggaatatgagagcttctccactattctggtggacggacggctggaccgcgagcagcacgaccaatacaacctcacaattcaggcacgcgacggcggcgtgcccatgctgcagagtgccaagtcctttaccgtgctcatcactgacgaaaatgacaaccacccgcacttttccaagccctactaccaggtcattgtgcaggagaacaacacgcctggcgcctatctgctctctgtgtctgctcgcgaccccgacctgggtctcaacggcagtgtctcctaccagatcgtgccgtcgcaggtgcgggacatgcctgtcttcacctatgtctccatcaatcccaactcaggcgacatctacgcgctgcgatcctttaaccacga

SEQ ID NO: 44173 - DNA, 2300 bp, Homo sapien
aaaattattttccttgagacattaggatgtggaggtagtcatatgtacatgccccattttcctgcccagctgcgacctcccagttggctccatcgctgtagaaaaaaattgtccaaaatcaagactagagagttggacaaagtcgagatcattaaatgcctactatgtcacaataagtggcttggattttatagacaatgaatagatactaaaggattttaagcaagggagagattatcctcaaatttgagtcttagaaagatcaccttgaagacaatgtatgagagacaaggaaaacagaattctattgcaatagtaaaagtgactgagaacctcaacttaaacagtggtgattgacaatggagagaataggattgcagagctaattcagaggcagaattaactggacttaataattgattagccatggggatgaacaagacaggaagaaatcaaggatcatctggaagtttctattctagagactgattattgtgtcatttagtgagagaggtaataccaaaaaaaaagtgcatgtttgaaaggagagataactaattcagttcgggatatatggaatttgaggtgtctgttgggtattgtagatgtctagcaggttagatggacatatggatgtggagctccaagagaacagcctgggtaaaatatatggatgtgaaagttctcaaaaaggatgacaaactaaactggggtgttagcagtgagcacaataggaaagaacagctttcaaagatataaaaatttagaatagataggatctagtgattgattggaatagataggatctagtgattgattggataaagggaatgtgaaaaagagacaaaacctcagatttttggtttgaaagacaaacctcacatttttggtttgaaagacaaacctcagattttggtttgaaagactgggtgcgtgacaattccactattataagctaagttatgttccctcaaaattcatatgttgatgccctagcccccagtatttctatatttgactgtatttggtgatagggtttttaaagaggtaattaaggttaagtgaagtcatatgaatgggaccttatccaatataactgatgttcttataatgaaaggagattaggatacaggcatacatagagggagaatgtcatgtgaatatggagatggtcatctacaagccaaggagagaggactcagaagaagccaaccctgataacaccttgatcttggacttctagcctccagagcagtaagaatataaatttctgccatttaagctactcagtctgtggtattttgttatggcagccctagcaaactaatatagccaccaactaaggttgggaatatgaggggaaaaagtaggttaggagaaggtgttgaaagaagactttgatatagaacatgttgagtttgagattcctgaggtatatccaggtggagatgttcaaatggccttgaaattaaaagatataactgggttacaggtacagatgtggaaatcactgatatgtaggtgatattttcaactgtaggaatgaatgatatcatctacgaagtctgtgtaaagtgagaatgatcatcaagaagagaaccataaggcatgtgaacattaaaaagcagactgaggaagaggacccaagaaaggagaaaaatcagagacagaagatgaagagagagagcttagaattagtctttattttatcctgttttcattataattagttaagtacatattgatagcaccatttaaagagctttaacttagtgaaggaggcaatatcttattcatttctgaatctcaaacaccaagcacagtgcctgacatttaatatccctgcaataaatatttgttgaaccaaatggaatcgaaattaggacttcattcccttctttgttttgtttgcttatttctggagtgtgcagcatgtattgccactgatattttaagttcatagtgaaaaatcatttcaatgtgttctaggcttggtccccttccaacccaacccccaggacaatagttttcattataaccttctgtctttgccattctggatggaattctgtgcacagaagttatatacatatatgggtatatctatgtaacaaatcgcagcacaggagtcccctgggctccctcaggctctggtatgacatatttgagccatataaattcagcttctcctctggcatctgttagccgactcacttgcaactccacctcagcagtggtctctcagtcctctcaaagcaaggaaagagtactgtgtgctgagagaccatggcaaagaatcc

SEQ ID NO: 44174 - DNA, 2300 bp, Homo sapien
agcaatagtggttggtatacagtcaatacttattatcacagtcattattaatactttaaagaatacatttatctagtggcctagggaaatacttcttaaattgccttaaacgggattagatgcccctttggtctgggtttgtacccaaacccaggcctaggtttgaactaaattgaatttctcggtttggtggcattgtgggggtggggagatggaagtgggtgtagcagagtaggaggcaatggtgcaaggtgttgtagccataggaatatgaatttccatgtcagcatttggtttaatttggcaccgagtgttattcaaacaaagcagcgttgtgagtggtagaggaagggagaggaggaaagtcaacacattcttggaaataagatgtggcttttgctttgctattttgttttttcttcagctacagacatatttctttgctcttgggctcacactgtaaatccctttcagtacatatctaagtttcagagaaacttctctttaagatgacaagaagttatcaagacttcccttgatccttgtttttagtataagaacccttcagttggggtcatttagcctagggagaaatctttgcatatacttagacacccccctccaccatgttgaatatttggtatttcctaacgactttacctcaaagtgtttgaaggtgtatgtagatgtatcgtttatccattctctccatgtatttgtgtattaggcctttcaaattttagtaaaaattttagtataaagcctggcaatgcaataattaattttccaacagttgctgccttgcacctcagacgtctggcaagatgttataggaactggtcctaggtcaatattcgaagcacagggaagctctgtgtgaccaagtcaatggaactttcctgtgttctggtcctgaggtgtatgtttaaagcaacgtttcaagcagaaaagtttgagtattcatctctcctccacaaatgcaggtctttttgcaatggcaatagagtaaatagccacttgtgatattaagcttgtgtcaatgatgaagggttggattgcatagggaactgatacagccttctaaccccgttcctctagagataacacaaactcacttaacactcagtctctgccttcaaagagctgacgctttagttgagaaatcagaccttaacgcacctcctgtgttgtaacaacatagaccaatatattcacaatatataacattaggttttaatctctctgtaatcagctgggttttgatgggaaaaaccaggtggctggaatgtacagtgcctttctgttttaacatttaagaggaggtcacactcaccagggatttttccattgcactctctctttttaaaagtttacagcgaatagctgaacttacatttcactattatgtaaaaatactttccctcaactttccaattacttaggggataaaaaaggagaggaatactggggttttgcaaagtcctgcaggtaaattctaaagtcattattatctttaatacctagcttagaaattctttcaacaagtggtgattattttcctccattcacatctccccttcctaacccataaaacaatgttcacaaattgaaaagcacacaagtgagaaaaaaatcagcctaattccaccagaggtaaatttcactgttcctttcagtttttgtctaagcacacgtgactgtatgtattgctttgcaatccgctttctttttgcaaatatatttcttgtgggtattttcccatgtattttcttaggtcgcttttaacctcttcattcttttccttctctctagggcaccaggggccagggaggcccaatctcagagcgctgcgggctctgctggtgatagaaacaatatggtgaagttataaggagaggggaggggtggggggcgggaaagattccttaggatagaaaaaaaacaatgaagaaagctccacttgaagacctatgaaatttccgacactagaacctttgtatatagttttcggtaaccttcggcagggggcgctctgaaattgttgccactttccggacagcctcccatactttaccctctacaaaattgtacagtgtttccggcccttctcagttgtggacgctcgtaagttttcggcagtttccggggagactcggggactccgcgtctcgctctctgtgttccaatcgcccggtgcggtggtgcagggtctcgggctagtcatggcgtccccgtctcggagactgcagactaaaccagtcattacttgtttcaagagcgttctgctaatctacactttt

SEQ ID NO: 44175 - DNA, 2300 bp, Homo sapien
agaccgtacactatgccaagagggagccagtgaggggggtctaagaaagaaaaaactctggtagaatgtattactttgcttgttccctctctctctcatattcctctctctctctctctctctctctctctctcacacacacacacacacacacacactctcacatactcaaacacacagacacacacatttaatatattcactattttctcacacacgagtttaaaataaactcctatatctgattttctggccctaccctatttattcagctttgttttctatctttccctgaaacctcttagcagttagcctctccctcctctgacctaaaggtgaactcttgttgatggcatttcctttgcctgaggctagaccaaggcccacctcttctcaggtgaccccctcctctgacttcctcctagcgtccttaaagtctgtaacacagcttttggcagtctattacggtagggagttgtattgttttctaattgattgtgtccctcttctctcccctactaaacataaactctgggagctggagagtaagctccataagatcaagaatcacacattacttgctcaccactgtatctgcagtgcttagcttatagtagatgaccagtaaagattccctaaacacacacaattgtaattaagaacatgcttgtttgatgtctgtctcctctgttccatgagggcagggatttttgtccattttgttcactgatgtttctcaaatacctagaaccatatgtggcacataatggatgctcaacaagtatttgttgaattaattatggattacaatgcctgggattttgtctgtcttgttcaccactacatccaccactcttgacatggtagatacttgataaatttatggaatgaataaggccatgacgatcacgtcttcttcttcttcttttttttcttctgagacggagtctcactccctcgcccaggctggagtgcagtggcgtgatctcagctcactgcaacctctgcctcctgggttcaagcaattctcctgcctcaacctcctgggtagctaggattacaggcgtgcaccaccacgcccggctaatttttttttgtatttagtagaaacggggtttcaccatgttggccaggccgatctcgaactcctgacctcgtgatctgcccacctcggcctcccaaagtactgggattataggcgtgagtcgccgcgcccagccacatcttctttacgtagctattacactgttaagcaaatggtagacactcaatacatatttgtcacaggtgaattggaaatgaagcaggctcaggcttgcttttgaactttgtattctcataagtacaattcttccccttatgactgagaaggggttaccaatttgcttgcatacacaggagaaacaccctttctacaacagcttaaaattcttccttctataaccactgattttccaagagatggaaatgtcaaccgtgaggggagggagattgtaagtagctgctctgtgctatggcagaatagtctcattatcagatactaaaatgaaaaaatcttgctgagtgaaatgtagccctccatcagagaccactgggaagcagctagatttgctcaaacagcctcccagtaaagcctctccaggcatgctttccctccattcttagtgtgggaaatcagtcttgatccttcgggcaagaagtacatgttttttgttttttgttttttgtgttttttttgtaaacaatataatcttaacagaaactgaagtccagagaagttaggtcactggcatgagggtttcaaagcgtatctgacgtgataccatatagattgcaagacagttcagagttgggagtctaaggaattacaggagaaatcttagggaatgtcaaagtcagctacagtcttcccctctctttggtgtttgtgagtgtttatgaaattccttttcattcaattcttatgtcatgctgagtcataaaaagaagtgttcttcagtgcaacacatctctggaggccgcttaagccagcctctgtgttagtcatcactatattcacaggcttggagccagtgccattcacacttccccctcttctgcagcagacggactgagttcctctaatccctgtgttccttctcccccatctttctaaaacccttctctgagagaggaataactatagcttcagggataatatagctttaaggaaacttttggcagatgtggacgtcgtaacatctgggcagtgttaacagaatcccggaggccgggacagaccaggagccactcgttctagg

SEQ ID NO: 44176 - DNA, 2300 bp, Homo sapien
gaagagtaattcaacatgccagctgctgtgttagtgactacggttgtgtagatgagtaaaacatatttgctttcccttgaggagcttaagtttttgcaagaaagacagtcatgtgctaaaaggacacagatataggagtggtgaattatgtctggttacatttgggagagctttgaagaagtaacattaaaactggatcttaaaactttaccagacagaaaaggagcaggatgaggagagaagagcattttcagaagaggggataacatgcgcaaaggttttaaaaaggcatggtaatgtggggttgtatgtgagtgtgtcccttattttagtgggactggagttctggtacactagatgtaggtgtggggctggagttggacatgaggtgggagcctgactgaagagggccttgaacttaatgataaagagtttcacttgatcccttggcaatgtgtggcctacgttctttgaaaaaatatacctttggcagagtcacatctagaaggtttgggggaatcaatgaaatccccaatgagggtatgtagcatgactagagaagagaggcaagtatagaaccagagagatcagcaacattttaaaggatgaagagagaaagaaacaccagtgaagtaaaaggttatcaggagagagcttcaagaagaaggggcggaggttatcaacagtattgaaatactacagggaggtcagaccagatgaggtctgagaagacatggccaattggcattagattgcattttcagtggatcagtgaaagcagaaaccagatttcactagaaactaggctgagtgaatgggcaaagaagtagaggtggtaagtgtggactttttttcctcaggataattgatggtgaaagaaagtagagacatggagaatagcttgaagaagagataaggttaaagggagcttttcttttagaagtactttttcaaagagatgagattagtatatatttagactgaggggaagggacaagtggagaaagagatatttaaattgggaggtgaggattgaaattgatgatgtctgaagagtcctgtgaagtaggggtggaatcgagaactcagatggaggagttccctcttttttaaatcattgaacaaatatcaggcaactttatgtctctaagcctcaattttctcatgtacaaaatgaggacaaaaatagtgtgactctcctagggttgttttgagaattaaatgcttaacatggtatctggcacatagccagttttcaataggcatttattaatattgtggttgttattaatacagcacctattgcttactggcaggcactgtgctaggcactgaggagacaggacaggcacggttctgttatggagctcgctgcctttaggagcaagcaaagaaagtgctgcataaacaaagctcaagataaatctagaggtggaaggggctcacttgctatggctgacatcccttacaggtaaaggtggggaagggggagagctccaggtgtggatcaaagaagccaagaacttgacggctgccaaagcaggagggacttcagacagctttgtcaaggggtgagtccctagaccagccccaaattaaccagtttcagaacaagagagctaagagaagaatttaactttctctgtggatattatccagtgtgtcttaccactcccggcaaccaaatttgttcctgaaattaggtaatgacaaaaccttcaccacctttgcactggtctgggctgtagacttgataatccaaagaggagggctgcagacaggttctgacttttgtctgactcatgttcttaattaattctgggtgaaaatctgtgtcttctgactgtctagatttgggaactcagggctttgtttcccacagtttttaagctttccgaaaattacagattacctactgacttaatttatctagaaatcatgtttggctaagtttatagatattactattggttttatttaaagagataaattgtctagtagaaacaaagccaaatatttaaaacccattttcagtggagcacagaatagcctcactaatactattatattcattttctctctaggttaaaggaattgaatcaggtgaatgatctagtagaggtagtgggaactctgcttcagcagattcaaggaggggcgtgtgtagtaggatctggatgtgggttcatcttcttgggctaggcctgtggtaggggaaaggggaatttagagagataactgtccgctttgagtaggctgttgattactccccgccctctgccagatacctccttcccatg

SEQ ID NO: 44177 - DNA, 2300 bp, Homo sapien
gaatggtgaatccattgccttgagtggcatgttgtcatttactgatataagaaatactggaggaggaacaaatttaagagaaaagatggtaggtttaactttggatgtgttgaatttgaggtgtctgcaggacattcaagtggagatgtcaagaacacagaactcaataaagcagtctgggtagagttatagaattagagttgtgaccatatatatggtaattaaagccaagtgagtgaaaaagattatttgggggagggagtatatgtatcctagccctgagaatgtctgactttcagaggtcagatagcagaagagtggcctacaaaggtcactgaggagagggcaaaggagtaggaggaaaagcaaaagagtaaaatgtcatagatgccatagaaagtttcaaggacgaggaaatggttaacggtgttaaatgtaggggagaagtcaagcaaaataaggaccaaaaataccttacttatttatggatttattgacactgagggtcattgtttgtgtatctcattgagaagtttcagtgggggaaggaagccagactgctgagagctaagaaatgaatgagaagtaagggaataaaaattgcaatttcacctgtgaagtacattttcaatacatttgcccataaagaggacctgaagagggacctcctgtgtagggaggttctttttttaagatggtagatacttgagcatgtttaattgctgatgtgaaatgagggggagagggatgggagaggcagggagaggaatctgcaattactgggtaggtataaacattttcaagtctattgatacatattgctcacgtgctttctaaaagggtttttaaccaacatatgctgctatcagcaattaagacagcttgtttggtggctactttgtcatcattaagtgttattaaaaaataaaaaatatctttgccaaagaatctcattattgttctaatttgcttttctttgattactagtgagttggatattttaaccagttgtgtccttgagtgtgtatgtatgaatttagtcaacgcttttgcccaaaacgtttctattttagacagacatttatttgccataaaaggccacaagtcaaaggatcagaatggtattatattttatttactcaaattagatagttcatactcttttatcttcttagaagtgtgagacaatttgacaacttttgactcagctgaacgaaagagacaggtgatttcaccgtctaagagagtgaccaacagatggaagtaagtgggtgaggaggcacgtctagtgttagacccctatcctcagtccccaggctcccattcctaacctggaaggacattcctcttgtgtctcaaggctttgggtcccagagctcccttttgggctgagtggccccctgctaaggagcccggggcgctgtgcggcccctttaagagtccagctcctccccgctccagggaaagttgcagctttttccgcctcccgggagggtgagaagggccggctgccggagctgggttgcgatcttcccggagccggagaccctcccttgaaaccggcactgggacttctcgatctctggaggcacctgttgcaagtgacaggtaggtcaacagccagcggccggcccctcgccctcggtccggtgctccttctggacccccagctccttttcgctgctgaagcgcccccacccccatctcggggtcgtgcgtcttccctacccgctctctggtcccccaatttttccttctccctagctgaccgcgtctcccctctccccgtccgcctctcccgaccgcatccccaggcttggactcccgtctgcttgggcggtccctcccggccacttttctttctccagggcttcttctggccccttccctgacccacccagcactaatgcggtctgtgcccctctgggagccgcctcccctctcctcttcggctcccctcgcggggagtgcccgggcttttcccgccagcccgagctggtgcccctcccgagagctggccctgggggcgggggcggggccgagctcctagcgggaactgcgccctccaaggcgtccagtcaccttttcgtgggttcctctcacagcgctcggccgtcgagcggggtcgctaacccgcactctcttcggacctacgacatcgcggcttctctggcgttggccagtcagccacaggtaaaggctggaggctggttggctggagtcctgcctcagtgggctccctctgcgcttggggctggggacctggctgtgtgctgtggagctgctttatattgccgctc

SEQ ID NO: 44178 - DNA, 2300 bp, Homo sapien
tcacatcatcttcaccaggagtagattccatctcaagaaatcactttcttggttcacacaggaagcaactccttggtcagtcaagttttatcatgagattgcagcaattcagtcacatctctgggttccactttttttttttttgagatggagtctcgctctgtcacccaggttggggtgcagtggcaggatctcggctcactgcaagcttcacctcctgggttcacgccattctcctgcctcagcctcccgagtagctgggactacaggcgcccgccaccacgcctggctaactttttgtatttttagtagagacggggtttcaccgtgttagccaggatggtttcgatcttctgacctcgtgatctgcccgcctcggcctcccaaagtgctaggattacaggcgtgagccactgtgcctggcctctgggttcaacttctaattctagttctcttgctatttctaccacatgtgtagtgacttcctccactgaagtcttgaacccttcaaagtcatccatgagggttggaatcaacttcttccaaactcctgttaatgttgatattttgcccttctccgttgaatcatgaatgttcttaatggcatctagaatggtgaatccattgccttgagtggcatgttgtcatttactgatataagaaatactggaggaggaacaaatttaagagaaaagatggtaggtttaactttggatgtgttgaatttgaggtgtctgcaggacattcaagtggagatgtcaagaacacagaactcaataaagcagtctgggtagagttatagaattagagttgtgaccatatatatggtaattaaagccaagtgagtgaaaaagattatttgggggagggagtatatgtatcctagccctgagaatgtctgactttcagaggtcagatagcagaagagtggcctacaaaggtcactgaggagagggcaaaggagtaggaggaaaagcaaaagagtaaaatgtcatagatgccatagaaagtttcaaggacgaggaaatggttaacggtgttaaatgtaggggagaagtcaagcaaaataaggaccaaaaataccttacttatttatggatttattgacactgagggtcattgtttgtgtatctcattgagaagtttcagtgggggaaggaagccagactgctgagagctaagaaatgaatgagaagtaagggaataaaaattgcaatttcacctgtgaagtacattttcaatacatttgcccataaagaggacctgaagagggacctcctgtgtagggaggttctttttttaagatggtagatacttgagcatgtttaattgctgatgtgaaatgagggggagagggatgggagaggcagggagaggaatctgcaattactgggtaggtataaacattttcaagtctattgatacatattgctcacgtgctttctaaaagggtttttaaccaacatatgctgctatcagcaattaagacagcttgtttggtggctactttgtcatcattaagtgttattaaaaaataaaaaatatctttgccaaagaatctcattattgttctaatttgcttttctttgattactagtgagttggatattttaaccagttgtgtccttgagtgtgtatgtatgaatttagtcaacgcttttgcccaaaacgtttctattttagacagacatttatttgccataaaaggccacaagtcaaaggatcagaatggtattatattttatttactcaaattagatagttcatactcttttatcttcttagaagtgtgagacaatttgacaacttttgactcagctgaacgaaagagacaggtgatttcaccgtctaagagagtgaccaacagatggaagtaagtgggtgaggaggcacgtctagtgttagacccctatcctcagtccccaggctcccattcctaacctggaaggacattcctcttgtgtctcaaggctttgggtcccagagctcccttttgggctgagtggccccctgctaaggagcccggggcgctgtgcggcccctttaagagtccagctcctccccgctccagggaaagttgcagctttttccgcctcccgggagggtgagaagggccggctgccggagctgggttgcgatcttcccggagccggagaccctcccttgaaaccggcactgggacttctcgatctctggaggcacctgttgcaagtgacaggtaggtcaacagccagcggccggcccctcgccctcggtccggtgctccttctggacccccagctccttttcgctgctgaagc

SEQ ID NO: 44179 - DNA, 2300 bp, Homo sapien
ccactaagtttgtggaaatttgttacacagcaatagaaaactaatacaatgaggacacagcaagtgcttaataaatgttagcttttattattactaactcattgggatcagctacacagttgtaagaaggctaaagtaaaaattatttatgcaaggctggcagtgcaacatagcattcagatccagggtccatttggtctaatatggctgatattaagtgtttctcaaggggagagacattattggcattcagtggggggaggggttcatcctgtagaactgccttggacatggcagtccatttatcatctctggcttctcttcccctagcagtagtcattgcaacaactgaaaatgccactgtacatttccaaaaatgctcctccacaagggttgagaactttgagaactactttaagggaaatttcataagaaagcatgcgtgtcttaaatgctgccataaagctacctcaataactacaatgctactcaaattacctgaccctaagaatcgccagtggcacttgtttaaatataacgattcccaagttctttccctggagtcccattccatagggctggggtggagccccaggaatctatactcttactcaaagaccccaggttaatcttttgtttatgtaagtttgccaaacactgagttagaaatatactcagccgtacatgcatttagcaaaagttcaccacaacggaacaatgacacaccaaaactctttgaaactgtgccttctacagagctgtaaatctccttttggaccattccattacacaaggtgtcctcttggtcacacagtgattgcaaatgggactctagagtcatggaaatgggtatactcttctcaaactttccatctttaccagaattacttcttaaagtgatatgcttcatggtgtaaactagcacttattaattttttctaaatatttatcatatttcatatacttttattttggagatggagtttcgctcttgttgcccaggctggagcgcaatggcagatctcggatcaccgcaacatccatctcccgggttcaagcgattctctggcctcagcctcctgagcagctgggattacaggcatgcgccaccacgcccggctaattttgtatttttagtagaaaaggggttctccatgttggccaggctggtctccaactcccgacctcaggtgatgcgcccgcctcggcctcccaaagtgttggcattacaggcatgagccaccgcgcccggcccatatacttttaatacatgtggaattaataaaaacgtccatgcctccaattccgtggctattttaccgtcttcctttttcggacaagtccctcaaaggtagcgctcttggctccttcctttgcttatcccctaaccctgtcctcctgaggtgccccctggatttcctccaaccccggcagggtctgcctttccgggatgatacaacgacctgccctgcatgccatatcccaggcgcgtgggcaccaaagtgtggaaaaaccgatgaatgacgttttctgtttccgatactctgcctgccagaatcccctgccgcaccgccccaccacgaagcacatggaacccacggactacacgaggacagaggtctgttctccctttacctctcccatttctttaactatgcttctctcggctggcatgccctttcctcatctcactccacacacgaacaggtttagcaaataatatgcacgctgctgggacgggcccaagcatttccctcccttgatagggcggaactaaaatgcaagccccacagttgtcagcaaaggacttccctgttaccatggtaaagccgctgcgcctttattgtggttgaggagtacttgcatcaacctaagagaaaattaataagaaggaagtctgcaggctgaaacccttcaaattagcctggactcgcctgcatctggctcggaacagagttaatctcaggagtgagaatatagccctccggtggacgcaactcgcgcctgcggctaacagaatgtctccaggggaggggctctgcgtccgttccgcccaggcccttccggctcacgcgccgtacggaagcgtgctcagcgctgggcttgtgctccgtacggaagtgtgctttggcgcaccggaagccgactcaacagagctatggcgggtttgactgtgagagacccagcggtggatcgttctctacgttctgtgttcggtgagaggaattcgttgtagtcaagcttcggggagggactcccctctgcaccttctatctcatgaatcgctaccggagccgctg

SEQ ID NO: 44180 - DNA, 2300 bp, Homo sapien
atcacatgaggccaggaggtcaagaccagactggccagcacagcaaaaccctgtctctactaaaaatacaaaaattagccaggcatgatggcgcttgcctgtaatcccagctactcgggtggctaaggcatgagaatcacttgaacccaggaggtgaaggttgcagtgaagggagatcacaccactgtactccaacctgggtgacagagtgagaccctgtctcaaaaaaataaaaataaaaataaaaagtacttttcaaaaatgatgctggggcaattcgttttccatatttaaaagtagtaaattggataccatacatgaaaatcagctccaggtggattcaaaacataaatgtaaaatgcaaaaatataaaatttctagaagaaaatataaaagagtatcttgatatctgggtagtgatggatttctaaaacaagacataaaatgcataaatcataaaagaaatgactggtaatcagagtgcattaaaattaagaacttccatttatcagaaaacactattaagagactgaaaagacaagccataaacataagcaataaaagattagtataagattataaacagaaccctaagaatctaaaagcaaaagaaaaaccaatagaaagatagaccaaaaagtagaataggctcagaataggctcttttaaaaagagaaaactcaaatggccagcagttgaattaaaagatgctcaaactcattagtaatcagggaaatgcaaattaaaatcataatacgatagttttccacacttacttgaattataaaaacaaaaaagtctggaaaataccaagggttggtaagcatgtagaggaagtagaactctcattcataactctctgtagtatacatttaggtggtcacttcggaacgggtttggaattacacagcaaagtagaatatgtgcaaatctcaggaccctggaattttactcctgggtatataccttagagaaactgtagcatatgtgtgacatttgatcaacattgttccatcatcatatccatcagtagtaggatgaatgaatacattaatgtatattcattcatgcaatggcatattagatagcagtgtaagtgaaccgcaattacatgtacatgtatgaatctcaaaaacccaatgttgaaagaagcaaaccacagaagcatacatacacactgccaggtttcatttacaaaaagttcaaaaacaggaaaaactaaacaatatattgcttagggatgcaattatagttagtaaaaatataaagaaaaataacagaatgattaccccaaatttcaggatagtgattacatccggtggggtagaggaggggaagaagatagatgtgatcagggagggaaatacaaagagctttaagatactggagaaaaatagtctattttctttaatctgagtagtgaacacatagatacttattccttaaaattattctttaagttacatatgtatgttttatatactcttctgtgtatatttcaccattttagaaaagggaaaaaaaatcagtgcccagagctgaacacacaactctagtaaatctatcatactagaagacaatcatctccattcttttgagtgctctgcctctgtttattttgaaccaaagtgcacttttatacttgttaaattttctcttgctctatttggcccttcttttcacttgtccttccagccagtcaagttctccccaaagccatcatcatatatgtcaaccacagatcatcctccaggggaactggtatgctaaagtttctgagctagccaggctgaaatccaaatggcagccggcagatgtggcaacagtttgaaaagtgcactttgaaacagcttccttaccacacacgcttccctccctacttctcctgaagtaatctgtttacagacccagactaataatcttttttatgagaaactttagcaaatcttttatctaggaaggcaatgcttcacattaggtcatgttgataagatgatgagagagaatattttcatccaagaatgttgctatttcctgaagcagtaaaatccccacaggtaaaacccttgtggttctcatagatagggctggtctatctaagctgatagcacagttctgtccagagaaggaaggcagaataaacttattcattcccaggaactcttggggtaggtgtgtgtttttcacatcttaaaggctcacagaccctgcgctggacaaatgttccattcctgaaggacctctccagaatccggattgctgaatcttccctgttgcctagaagggctccaaaccacctc

SEQ ID NO: 44181 - DNA, 2300 bp, Homo sapien
ttgtgtgatcctataaagagccagcttgccagatgtccctagtgataataaatgttattttcagccactacatgttgggggtaatttgtaacacagcaataaataaataaaataaataaatagtatcacgtaatagaagattttcctgttccaaccagaagataggttgatcctgttaccataatattaggccaactatttcatgtggattttttatgtaaaggacttgctggagttcctaaagatcagagcatgtattaggttggtgcaaaagtaactgcagttttcgtcattgcttttaatggcaaaaaccgcaattacttttgcaccaacctatacttgacccactttacaaggaaagactgtgtgactgttttggtccctgattgctaataactgtatgtgtcatagaattcagtctgacaattactttcattttaatattctacctagtaaggaggttgtaggagaggtgacttatggccctcgcctacctctaatattcagacgcttcttaaatctaccaaaaacaacgagtttaggtccatttgcaaagccctaggtaatctgacttttatctacctctctgaacttacctctccccacctaccctcacttctgtccagcaactctggttgtattcatttgctgggatgccatagcaaagtatcacaaattgagtggtttaaataccagaaatgtgttgcctcatacttctggaggcagggtttgttccttatcagggtctcactctgtcgcccaagctggagtgcagtggcacaatcatggctcactgcagtctcgacctcctggggtcaggtgatcctcccacctcagcctcccaggtagctgggaccacaggcatgcatcaccacgcccagctaatttttgtattttttgtagagatggggtttcaccatgttgcccaggctggtcccaaactcctgggctcaagctatccactcacgtcagcctctcacattgccgggattataggtgtgagccaccacatctgcctgggtttgttccttttgggggctgtgaggaagaatctgttccatgcctgtctcctatcttctggtggtttgctggctatctttggcattccttggcttatagaagcatcaccctgatctctaccttcatctttatatggtgttctccccatgtgcatgtttgcattcaaacattccccctgtttttagccaggcacagtgcctcacatctgtaatcatggctactcgcaaggctgacgcaggaagattgcttgaggctaggagttcgagaccagtctggatgatctaggaagaccctgtctctgaaaaaatttaaaaaaataaataaataaataagtaaaaaaaacttgccccctttttataaggacacagtcatattggattaggagcctaccctactccagtatgacctcatcttaactaattacatctataaggtacctattttcttttttctttttctttttcttttttttttttttttgagatagagtcttgctctgtcacccaggctgtagtgcagtggtgcgatctcagctcactgcagcctccacctcccgggttcaagcaattcctgtgtctcagccttcctagtagctgggactacaggcacgcaccaccatgcccggctaatttttgtatttttagtagagatggggtttcaccatgttggccatgactggtctcgaactcctgacctcacttgatcagcccacctcaacctcccatagtgctaggatcacaggcatgagccactgcacccagccagttccctattttcaaataaggtcatattctagggcactagaggttatgtcttcaacatatgaatttttggggagacacaattcaacatataactcttgccttcttgctgttcctctagcacactaagctgattttcatttcaggtcctttgtacatggcaagtctttctgtctagaaccctaaagaagcctggctgttcccgtctcagcatacacatgttatctcatatgccaccttctcaaaaaggacttccctgatcactctatttaaaatagcctctccagatacgtttgtcagcttgctcctttctgcctgtggatgccaacaaagaagcatcattaaagtctctcttctcccttccgtcgtgtctaagtcagagtctcctaaagagcccgaatagctgaggaagctcttcattggagagttgaggtttgaaacaaccgacgagagcctgaggagccattttgagcgatggggaatgctcacagactgtgcggtaatgagagatccaaacac

SEQ ID NO: 44182 - DNA, 2300 bp, Homo sapien
caggtgcccaccaccacgcccagctaatttttgaatttttagtagagacaggatttcaccatgttggtcaggctggtctcaaactcctgatctcaggccattcacccaccttggcctcccgaaatgctgggattacaggcatgagctaccgcgcccggctgactctctcatgtttagggggaccaactcaccctatcccagtgaaatgggattaattggtcaccttgcctgagattcaccttgtgaacagttacctagagcagccccaagaggttctgcaccatatactggtggtggagaaccttgtcccagttggaatgtcccaactaataagaaaaagaacactctctgaagttgttctcaatagtgttgacctccttcatgaaatggaaaggagaaaggagcagcctcctagcccagctgctagcataggtgcagaccaagatgcggagtctgcttcagaaggtgacaacctttagatgttgaatctgtccctgaatcagccctggggaaaggaggcagcaatcatggaaaccttaaaaaaacaaaaaacaacataatgacaggacaacctggaggccattattttggtggctgctacttggccactcctcacatagatttgttttactgacttcctgcagcaaaaggagattggcacaggctctgctacataatcatcattattattattattattattattattattattattattaagacgtaatcttgctctgttgcccaggctggagtgcagtggcgtgatctcagctcactgcaacctctgccgtccgggttcaagtttttctcctgcctcagcctcctgagtagctgggattacagtcacgcaccaccacgaccagctgatttttgtatttttagtagagatggggtttcaccacgttggccaggctggtttcgaactcctgacctcaagtgatctgcctgcctcagcctcccaaagtgctgggattacaggcgtgaaccactgtgcctggccttcatctatattattaccaggaggcagatgtgttctctttttctctgaggtttagaattatgcaaatgaagatatgaaaacaaaagctcagtgaggtggggaggattacacttaagaatacaggtaattttcaaagctctttaagacacccctctcagtttttactaacagctctctcttggctctttgccagtctgtttagaatttggcacctcttcataacctttcaaccaaagacctgtaagttcattctaaagctcctatcctggcctcattttgcaagtggagaaatcaaggcataaaatatgagctttcagtgtctgtgggctgaccttgagtcttgacctttatcctgttctatcttccctccgccgaaaactctgaccctattcctcccaggttcccccttcatgatattatctggagggcaataggacctagggaggttccaccctgcggcggagggagacacacctgcctaacagcgtgggtagagtgagtgttgaagcaagtcacttaactagttagggagggcggggtagaagtgggggcctgctgctcctagggaggagtaaagctgtggctcctgcctgggtctggaggtggtggtcagaagtgcttctgaagagcggcccaagcccctttttgtcccgccactccacaacgagcatccctcggctggccgcctgcccgggaactctccggctggttttgtttggccgcagccgtcccgcccatctcgcccgcccccgccgtcccggtgccttagtttttgaagctgccgacctctcgcagctggaatcgcagaccaggcaggaccctggcagcagacggcgtccaagagtttggcgacctccgtccagccaggttggcgccccgcacatcgtgcctctcactagcaaagtttctccgaggagaagcagcccctccagccttttcttcatcctgtagagcgagcgcgctctgcttctgtccctcaacactgcattcggagacagggtggtgacaatactccactcccgggccaggcggtcttgggggcggggcttgggggaatccgaggagctatcctgagaaccctggactcggcaaaggtcctgagagcgcgcaggtgagcgggccagctgatagctacagcctagcaatagctaggatacctaggcactgaactgaatcccctcttctgccctccttcttctgcgcccgctcttctgccctggctcagctctccgctgacttgagaggacacactggtcaggactctttgtgaggagctgctgagtgtcggtgcccccga

SEQ ID NO: 44183 - DNA, 2300 bp, Homo sapien
gaaagaaaacaggctaggatacaagtttggctatgggcttgggggaaaacacacatcaagtctgttctggtcaaatagatacataagtcaccctagctgaaggcctggtctgtgatccaattcaaaatttagaattaagagtaagtatgtgggccggatgcggtggctaatacctgtaatccaagcacttgggaggccaaggtgggtggatcacctgaggtaggagttcaaaaccagcctggccaacatggtgaaaccctatctctactaaaaatacaataattagccgggcatggtggtgtgcgcctgtagtcccagctatttgggagtctgagacagtagaattgcttgaacctgggaggtagaggttgcagtggtctgagatcgtgccactgcactccagcctgggtgacagagcaagactctgtctcaaaataagaataataaaaatttttaaaaacctacaatgatgagagtatgtcagagggaggagtcaactgaaagagctccccaggccaaagttggaacgacttgagcaagaaaataaagaggtattgattataatcagaggataaaataaatatatgtgagcccatactgtataaatgaatgatttaataaacaaatgtgtaagaatagacagaccccccccccatacagaagaattccaaacaacttttgtagatactccacctcaaggaggtggaggataactccccattctataagtatggccaatgcatactgatttccttctaaagagtacaggatagaaagtagggggagtatctttacagtggagaaatctgataaacactgcctcggccaggtgatcaaggttaacatcatcagtgataagtcatgttgacagcatgtatccttgatatgatgtgatgaggatggcacgttacctctgtggccttcctcccaagaacacataacttcagtctaatcatgagaaaaacatcagataaacaacaagtgaggggtattctacaaaatacctgatgaacactcctgtcaaggtcatcaaagacaaatagagtggctggatgtggtatctcatgcctataattccacccctttgggaggccacagtgggaggatcacttgaggccaggcttcaagaccagcctgggcaatatagcaagacccttctctaaaaagaataaaaaataaattagccaaggatggtggtgcatgcctgcagtcctaggtacttgggaggctgaagcaggaggattgcttgagcccaggagtttgaggctgcagttagccatgatcacactactgcactccagcctgggccacagagccagaccttgtctccaaaaaacaaaacaaaacaaaatctgagaagcttaagttaaaaactaaggaaatctgaatgaagtatggactttagttaataacaatgtattaatactggttcattaattgtaacaaatacagcatcgtaagatgttaacaatgagggaaattgggtgttagggatggttactcactgtactgtcttagcaatttttctgtatatctaaaaccattctgaaaaataaagcattttataaaaagttcactaagtatgatacagtttggctagaagagatagagatacgcagagcagaggcagtttctctggtatctgaggtctgcaagacctttgacctaatacagaccctgaagccagaatgcctaggtttgaattctggctttaccatttattagctaggtaacctttggcaagttatgtaacccctttgtgaacaacttcatctctgaaaagtaggaatgatagcccctactttgtcatgctgtagtaaggattaaatgaattaatgtgtataaagtgctttaatgagccctggcacaaagtaaattctatataaatattttgtaaaatgaataaaaactatgatgacttaaagttcctttagtaattatctataatcatacaaggtaaggagatatgagtttggttgctatgaaccaggtagtggttgccacagacatgtcagtaccgtgacaaccattattaggacattgccatagcttttataaatggacaacctaagctgtgttaatctgacaagaaggctagaaagctcaatgcgtcttcctattactctgcatatcttatgtcttccatccaaaaagaatcaacttatcagataaataaccacctcatggtaagcaaaatatgtcactatcttcattttacagataagaaatttggaaatggtaggtttagttgaggtgatttcacttcaggctacccagaagaggcactagaaataaaggat

SEQ ID NO: 44184 - DNA, 2300 bp, Homo sapien
ccttttcagggaaaggaatccaatatatctagagaaatggagttcttcagattatgaagtggcttttgagcttcatcaataatgttggactttattttaaaagcaataggaagttggctgggtgcagtggctcatgcctgtaatcccagcactttgggaggccaaggtgggtggatcatttgaggtcagcggttcgagaccagcctggtcaacaagatgaaaccctgcctctactaaaaatacaaaaagaaaaaaaatgagccaggcatgatggcacacgcctgttatcccagctacttgggaggctgaggcacgagaattgcttgaacccaggaggcagaggttgcagtgagctgagattgcaccactgcactccagcctgggtgacagaatgagactgtgtctcaaaattactaactaaataaaataaaataaaagcaacaggaagccaatgacagattttaagtaatggagaaacatgagatttgcattttttcttaagagggtcttgctatattgtccaggctggtcttgaactcctgggttcaagcaatcctccagcctcagcctccccactagctggtatttcaggtgtgtgccatggtgctagaatgaactggggcaagagtgaatacaagcagcaacagttgtgaagatgactattgcagcaataacctggagagagatgatggaagcctgcagggatggcgactttgtgaaaaattggatgaggccaatagtacaggagaaggactcaaaaatcattcccagactctggcttgggtgactgagtaaactgttatattcattaagactgagaatagaggaggaagaacatgtttaagggaaagatggaaagcattcaacattagatatattgagtttgaagaatctagaagatatccaagaggaagttaccttataggtagttggatacaggaatgaaaaggaactctgttttctggcttaagtgattgatatagatggtattgccatttgctgatacagggaataaatggaaaaaaattgcttttttgaaaatttcattataaaaataatataacccatcacataaaatttaaaaataaggaaaggaaaaaatttatgcaactaccataaaccaacactttcggaggccgaggcaggtggatcacctgaggtcaagagttcgagaccagtctggccaacatggtgaaaccccatctctactaaaaatacaaaaattagctgggtgtggtggcaggcgcctgtaatcccagctactcaggaggctgaggcaggggaatcgcttgaaccgggaggcggagaggttgcagtgagctgagatcacgccactgtactccatcctgggtgacagagtgaggatccatctcaaaaaaataaaaataaaataaatctttctggctgctcctccttgggctagataattcttatagatagcaagggttcagctggaagatttctttgatatacaaactaaccaattcagagctatattccctctatctggcatggacaccccaagagacaacattccagtgtcctaatcaccccatggccaggtaccagacaactagggagcacccctataccttattcaaagtagccaatcctaaactgttcactcagccctgcattgcctttcccaaagaaactcaagtaacggcagtggcctaaaccttcccctcttctgtcttctgcctcctgcccaccctggtgtctttcccatgtagtcctatgtggcataatatgtctcctgtctctaggacctgtaagcataatagactttgttttcctgagcctctcctgtgtctcctcttgtggctatacctgacccaccatctaaaaaaagaatagaaaacattatatagtagctttaacagccatatttttctaagaaggaggcttctctagaatgtttgattgagaagaattaaaaataccagttaacctgatatcactttgtgaatcagacaacacttactaagttacacatccttaggcctttagattatcaaaacataatctaaattgttgggcaagtacccaagaacaactccagagttgatgaaatcatggactagagaatgttaaatacagtcagttttcaatatccagtttattatgttatactagattttggagctttttgcctccacactacacagcacaattataggtattcagtctctctgaaaatctcctttcccttagggtctctccaataaccaattcttcctccacgggtgagagttaattggtgctattgctcctagggataactacattttctttttttt

SEQ ID NO: 44185 - DNA, 2300 bp, Homo sapien
gtttgaccactccccactcctggatctggactgtttcttcctgttgctgtcagccttggttctagtttatagtcttgtctcctccgtttctgcttatggtgtggacaaatgaccttttttaagcagctggtaataattttacattgactggagcctgtgcatttgctcagagatgctacaatttttagatatttctaagacttctggattcttgaggtagttaaggattaaaaccagaaacagtcgaggttttttaaaagcagggtaagccatgaagtgaatacagggtgactgagtgatcatcagatgagattaattcttttgggttttcttggttttaaggcatctcgaatgccccttgaaaatgtagttttccctggtggtgggcacctgtaatcccagctactcgggaggctgaggcaggataattgcttgaacctgggaggtggaggttgcagtgagctgaaattgtgccactgcactccagcctgggtgacagagtgagacaccatctcaaaaaaaaaaaaaaaaagaaaatgtagttatccctaggagcaatagcaccaattaactctcacccgtggaggaagaattggttattggagagaccctaagggaaaggagattttcagagagactgaatacctataattgtgctgtgtagtgtggaggcaaaaagctccaaaatctagtataacataataaactggatattgaaaactgactgtatttaacattctctagtccatgatttcatcaactctggagttgttcttgggtacttgcccaacaatttagattatgttttgataatctaaaggcctaaggatgtgtaacttagtaagtgttgtctgattcacaaagtgatatcaggttaactggtatttttaattcttctcaatcaaacattctagagaagcctccttcttagaaaaatatggctgttaaagctactatataatgttttctattctttttttagatggtgggtcaggtatagccacaagaggagacacaggagaggctcaggaaaacaaagtctattatgcttacaggtcctagagacaggagacatattatgccacataggactacatgggaaagacaccagggtgggcaggaggcagaagacagaagaggggaaggtttaggccactgccgttacttgagtttctttgggaaaggcaatgcagggctgagtgaacagtttaggattggctactttgaataaggtataggggtgctccctagttgtctggtacctggccatggggtgattaggacactggaatgttgtctcttggggtgtccatgccagatagagggaatatagctctgaattggttagtttgtatatcaaagaaatcttccagctgaacccttgctatctataagaattatctagcccaaggaggagcagccagaaagatttattttatttttatttttttgagatggatcctcactctgtcacccaggatggagtacagtggcgtgatctcagctcactgcaacctctccgcctcccggttcaagcgattcccctgcctcagcctcctgagtagctgggattacaggcgcctgccaccacacccagctaatttttgtatttttagtagagatggggtttcaccatgttggccagactggtctcgaactcttgacctcaggtgatccacctgcctcggcctccgaaagtgttggtttatggtagttgcataaattttttcctttccttatttttaaattttatgtgatgggttatattatttttataatgaaattttcaaaaaagcaatttttttccatttattccctgtatcagcaaatggcaataccatctatatcaatcacttaagccagaaaacagagttccttttcattcctgtatccaactacctataaggtaacttcctcttggatatcttctagattcttcaaactcaatatatctaatgttgaatgctttccatctttcccttaaacatgttcttcctcctctattctcagtcttaatgaatataacagtttactcagtcacccaagccagagtctgggaatgatttttgagtccttctcctgtactattggcctcatccaatttttcacaaagtcgccatccctgcaggcttccatcatctctctccaggttattgctgcaatagtcatcttcacaactgttgctgcttgtattcactcttgccccagttcattctagcaccatggcacacacctgaaataccagctagtggggaggctgaggctggaggattgcttgaacccaggagttcaagaccagc

SEQ ID NO: 44186 - DNA, 2300 bp, Homo sapien
agtggaactaggctttctttaaatcaccaaccttaaaatttgaaaactatgttgagtaaaaatcaaggacatcttatatgaaattatagcaaaagtgatcaagtacaaccttaattgatcttacctctcaggtagcactgtttttttgtataattcccccctttactacataatttgtggtttgtttgagaacccagtggacccagaacacatgcattatgagaacaaaaggacctagtaaatcagatggtgtttcctgttatggcagcaattggctttaaggatttttgagatcacaacaactaaatcaggattgcatttgacttgtatataccaggaggaaatggaggatctgactaagccataatatagttggtaccaggttatatgaaaaaatatagaaatgatgtgcttatatcaggacattaaaagtaagagtggaatcatagcagcttagtaatacattaggaattcacagaaagggaagattattttccataaataaactgaagttctaaataagaatacctttcctgttcagtcattcataaaatttttcaataatatttattgaacacatatgtcagactaaggaaacaactctagctccatggagcttacagttcaagatataattgatagcatcctctgtaaagttacagggcagggatcatgattcttttttttttttccgagacacaggttgcccaggttggagtgcagtggtaagatctcggctcactgcagccttgaccacctgggctcaggcgatcctcccaccccaccttcttgagtagctggggctacaggcgtgtgtcaccatgcctggctaattttgttgttgttgttgctgtttttttgagatagagtctcactctgttgcccaggctggagtgcagtggtgcgatcttggctcactgcaacccgcctcctgggttcaagcaattctcctgcctcagcctcccaagtagctgagattacaggtgcctgccctgatgcccggctaaattttgtatttttagtagagacggggttgccatgttggcccagctggtctcgaactcctgacctcaaagtgatccacccgccttggcctcccaaagtgctgggaatataggcttgagccactgcacccggcctaattttttttattttttgtagacaggccatgttgcccaggtggtcttgaactcctggacataagcaatcctcccacgttggcctcccaaagtgctaggattacaggtttgagccactgtgcccagtcaatcatgtttcttatatcactgtatttgtctgcaagggctgccattacaaaatacggcagactgagtggcttaacagaagtttatttcctccttgtctggaagctagcaagtctaagatcagagtctccactgatttggtttctgctgagacctccctcctcggcttgcatagacaccttcttgctgtgtccacacatggtctttttctttgtgcacccaaccttggtgtctctgtgtgtccacattttctcttataaggacagcaggcatggtgcggtggctcacggctgtaatcccagcactttaggaggccgaggcaggaggatcacctgaagtcaggagtttgtgaccagcctggccaacatggtgaaacctcgtgtctactaaaaatacaaaaattagccaggcttggtggtgggcatctgtgatcccagctactcaggaggctgaggcaggagaattgcttgaacccgggtggcggaggttgcagtgagccgagatcatgccactgcactccagcctaggtgacagagtgagactccgtctgaaaaataaaaaataaaaaaaggacatcagtgagattggattaaggcctgccttaactgcctcattttaagtaaatcacctctttaaaggccctgtctcaaagtatagacacattttgagtactggtggttaaggcttcaacataggaatttttgggggacacaatgtaacacaaacaatcacctagcatgagtaaacagctgtgaaacttgctagttttgcttgtgtaataattcggttctcttcctagtactatgaagtattccttcgacagtctccattggagccctgccttgtatttcatgaaggtggatactggcgtgagctcacagtccgcaccaatagccaagggcacacaatggctatcatcactttccatccccagaaattaagtcaggtgagcctcacaagatgttaagcaaccttaacttttactactactaactataactgtaattggttttttggaagtttcagggcatatag

SEQ ID NO: 44187 - DNA, 2300 bp, Homo sapien
cttgcaacagtgagccgagatcgcgccactgcactccagcctgggtgacagagcgagactccacctcaaaaaaaaaaagtaagaaattacagaaagaatgtggacgaactcagagtatatacaaaaacaggttttagtggcaagataggttatggaagaaaggaagagacttggtttgtgaaggtggccttgtcatgtagaggaagcctccttccgaaagaatagctggtaaatgcttcttttcaaacttttaaagatgtcagactctcaatctctcctggatccaggtaaggcatagaaatgggaagcttggctgtattcaaggaggttctctacagatgcaaatttcccccatctcagtcctctggtcctgaggcagccatttcaaacatatggcaaatacatttattttggggtaaaatatttttattttcttcagaatgtatgaacacacagtatatcaacttattttgaatgataatagctaactttgtgtacttactgtattctaagcactttgtgtgtattaactcatttaatcgttgtcacaaccgtatgaggtaggtaaaattattgtggacattttttttcagatgatgaaactgaagcactgagtaattaaataacttgctcagtggacacagcttatcagtggcagatctgctgggggtggtggcttatgcctgtaatcccagcactttgggaggccgaggcaggcggatcacctgaggtcaggagatcgagaccagcctgaccgacgtggtgaaactccatctctactaaaaatacaaaaattagctgggcgtgatggtgcactcctgtaatcccagctactcgggaggctgaggcaggagaatcgcttgaacctgggaggcggaggttgcggtgagccgagatcacaccattgcactctagcctgggcaacaagagcaaaactctgtctcaaaaaacagaaaaatagaaaataagtggcagatctgggctttgaatcctattctgactgactcaatgtttgctgctatttgaagtattgggccttgtttaatttactactgtactcactaaggctaacacattgccttgcacataataggcatgttatgctttgaataaatattaatacatgaaatgttgactacaaagtgttttccacttgagcacaattactattaagcataaaaattaaatatcattaaatgtacgttcactattttttttttttgaaacggagtttcactctttttgcccaggctggaatgcaatggcatgatctcagctcactgcaacctccaccacctgggttcgagtgactctcctgcctcagcctcctgagcagctgggattacaggcgtgcgccaccacgcctagctaatttttgtatttttagtagagatggggtttcaccatgttggtcaggctggtctcgaacccctgacctcaggtgatccttccgcctcggcctcccaaactgctgggattacaggcgtgagccactgcacccacctcggtaggttcactttgctgtaaattttactctattaaagcaacaatattttacagcacacagatgtgtgtatacttcaagttttcttactcgtggctgggctaatgactcctctaaaaattagaggtattactgaatgtagtccaggaggtagtgaatcaaccaaaaagagacatctgtcctctttttgagttctgtagttgaagaaaaagattatttctgagggtttaggatttaatagtcttgagtgggatccagtgaagaaactataaagtatttttctgatgcagtgttaaaagagaatgaatgcttgagaaaccccacggcccagaatagatctggcttttaccaaaggatgccatttcacggaaccaccctgtttctcatctcccaatcttccaacccgttagggatctgatgtctgcaattctatcatgagaaaactattccttgagttggaagacttaaactgcaagcacccctgggatggctaacgcagttaacactgcagtgtgaacgtcttcgtgagtctcttatgtagatccaccaatgggacggtgaggaaagagcaggtggtgggcggggccccggggaggggaggagaggagaacttagagaaggaaggcggcgggtgtcagggctatgagtgcttttaaggaaggtctccatagaaggttcccccagcaaagtagggaggggtactccccgagaggagtcgaggtgccggagcctgctgcctcgccgacgctgggaggagccccgtgtcccgccgcgcttgccaagggttggctgcgcg

SEQ ID NO: 44188 - DNA, 2300 bp, Homo sapien
gagcaagactttgtctcaaaaaagcacaacaaaacaagcaaacaaaaaactttgctccccaaatggtcagggagactgatttgagtaataaaactctggtctcccgcatgtgggctctgcgtgaattactctttctctgttgcaattcccctgtcttgatgaatgggctctgtctaggcagcgggcaaggtgaaccccttgggaggttacagtttcaccatgctggtcaggctggtcttgaactcctgacttcaggtgatctgcctgcctcggcctcccaaattgctgagattataggcgtgagccaccacgcctggccatgcatcacatttttatttgtaaaagtaaaaaccatggaaacaacatcaatatctagcaataggatgcaaaatgaatgagaactatagtacattcaagtgatgctaaagttttatacaatcattaaaaatgattgtttagggctgagcatggtggctcatgcctgtaatcccaatgctttggcaggccaaggcaggaggatcgctggagcccaggagttcaagaccagcctggttgacataaggtagccccatgtctacagaaaataaaaaataaattacccgggtgtggtgacacgtgcctgtagtcccagctacttgagagacttgtagtcccagctacaagagagagcctctcacttgagcccacgaggttgaggttgcagagggagaccctctgcagggtctcaaaaaaaaaaaaaatcgtgtagggctgggctccgtggctcatgcctgtaatcgcaacactctgggaggccgaggcggaaggatcccttgaatccaggagttagaaatcagcctggacaacatcacaaggctctgactccacaaaaaataaaaaaattagccaggcatggcggcatgtgcctgtgatcccagctactccggaggctgagatggaggatcacttgagtgagactttgtctctaaacaaaacaaaactctgtgtgtgtgtgcgtgagcatttacagtgctaaacaactttaagtaccacactaatagtgaaaaatattacaggagaggcagcagagcaattgttaagagcctgggccctagaaatgactgcctaggtttgaggcctggctctccacttactagctgtatactcctgggcaagttacctaccttcccagcccctcaatgtgcccattcatagcatggggactcatacctagtccatagtgttgctgtaaagattaaattagttaatacaagtagagggcagcgtctagcatctagtaaacagttgacaattattggttattgttatagaaaattggaggagggagaaatcatatctaactgacaatggatcaggaaaggctttatagaggaggtgacattaaagaaaaggtttaatgctaatgaagagtgatggtggggggcggggtcaaaagatagggagttaaaggtagaggaggtggtaaggcgtaggttgtgtgaggccgtgagtagatagatgagtggtggcgtgtggcagtgggagccattgaaaactaaatctccaaagagagacaggggtcaaaatgtggagggccttgaattccaaatttaaaactggagttaaccactggctatgagagtcattaaagatttctgagcaagagaaagaggaagccttctttggcagcattgaaggctgacaaatttgcagttttatccttgagtgttacgaacttcagaaacaactctctgagggctaatattttgatttaggaaaaggaaagggggacacaaaggaagagatggaaaaagggagtgaataactgaaggatgataagtgggagggggagatgaaaagtgagcccggtgggaaggtggcagcaaagcctgtcttccctaattcctcattcctggggtcacttggtgactgaactcatacataacctcccttctccccatttaagatttgaagtttccgtctttcctttagggcttcatttaacttcgagactgtccttttggcctgtgagcacacgtagggcattaggacccagcgtttgttgtagtgagagtggttgaatctcgatctctcaatttttctctcgagctccctcctctccctttgtcattctagctgcctgctgcctccgcagcgtccccccagctctccctgtgctaactgcctgcaccttggacagagcgggtgcgcaaatcagaaggattagttgggacctgccttggcgaccccatggcatcccccagaaccgtaactattgtggccctctcagtggccctgggactcttctttgttttcatggg

SEQ ID NO: 44189 - DNA, 2300 bp, Homo sapien
gttcacacggggaaagcgacaggccctttaacttaagtctcggccagggagaagccacctttattgtgaaatttgcggtttcacattttcctacaaagtcccgacatctggggtcagcctaggcaaaataatcactataattgatcatgttaaattcaagaaccgagacacgaattgtcccgttatacgcaaaatgacgaatgtgaacattcttatattcttagcacagtgggaacgccagccaatcagctgactccagcagcaacggcccactcgctgctctcctcacaggcccaggtgggtggggcaagccgctctccgtaattggttctacgccagcgtcgtcgcgcgcgccacctcccgccaccgagcctcccgccacctctagccaatcaggcttcagctgagtgcgttgctccgcccagccgcccctctgggtctgcgcggaagcgcatgcgtggggtggagtcagcttctttgaattccggaggcggcattcggtggtcagaggcctgtgcggctgcaggtagagtgtcttaggtgaggaggtacttttaagcaccgcgcgaaatgggggcgaagagaatttttttacttttgagggtgggactatcctgcaaggtgtgactgcggtcgggttttccgtagccagtttcgcaccagggatccttgggaagcgctgggatggttcaactgggtggggtcagaagctgctcccctgcccttctttcctaggaacctaggaaataactcggaacctgtaacgtcccactggtttggacatattcctctcctgatctggcctcatctgttccagggaggtgggattgagtaagtgtcattccgactattcctttagtttttcctatttgcagccaaaaacttagaagtcatttttggttcctcttcccttttccctacatccaattcttttatcacggcctactttgtctaactccaaaacattgcacgaatccaatcattttccacctctacaccctaggcctagtgcaggctacagtcaaacctcttctggacttctgcgacagccttttatttggtttcttgccgctccttgacctctaacattctcgtctctgcactgcagctaacatgatcgtcaaacacaaatcaggtggtattgctcccctctctaacctttcccccttcccctatgttttcccatgacatttaaaatccaaactccttactctggcctgcaaatcccaatatgaacttagtccctggctacgttctgacttcatcgctcattaccttttacctctttcattccactccctccagactgatgttactactgtttcttttcttttctcttttctttctttctttctgtctctgtctgtctctctctctctccctccctccctttctttctttctttcctttctttcttctttcttttgacagagttgggccaggcgtggtggctcacgcctgtaatcccagcactttgggaggctgaggcaggtgtggatcacttgaggtcaggagttcgagaccagcctggctaacatggtgaaacccagtctctactaaaatacaacaaatagccgggtatggtggtgtgcgcctgtaattccacctacttgggaggctgagacaggagaattgcttgaacccgggaggcggaggttgtggtgagccgagatagagattgcgccactgcagtccagcctgggtgacagagtgagactgtctcaaaaaaaaaaaaaaagaaacaatgtctcactatgttgccctcagcttcccaaagtgctgggattataggtgtgacccaccttgcccagccaagctgctgtttctttaacacataaagctctttttgctttaaggtcttagtcttagcatgtcttcctcttctctctccatgaaatactcttccaccagatcttcacagggctggttccttcttggcattcaaatctcagtttaaaggtcacctcagagaggttttctctgaacacttattacaaagttacaatgtagcttcccatctccacttcatttctatcacatcactgtgtattatattcattattgtttacttttcttccttttttttttttttttttttagacaaagtcttgctctgtcacccaggctggagtgcagtggcgcaatcacggctctctgcagcctcgacccccggggctcaagctattctcctgcctcaccctcctgagtagataggactacaggcacgtgcggctatgcctagctaattttttaaatcttaagtagagacattgtctcactgtgttgcccagactggtctt

SEQ ID NO: 44190 - DNA, 2300 bp, Homo sapien
ctacgttctgacttcatcgctcattaccttttacctctttcattccactccctccagactgatgttactactgtttcttttcttttctcttttctttctttctttctgtctctgtctgtctctctctctctccctccctccctttctttctttctttcctttctttcttctttcttttgacagagttgggccaggcgtggtggctcacgcctgtaatcccagcactttgggaggctgaggcaggtgtggatcacttgaggtcaggagttcgagaccagcctggctaacatggtgaaacccagtctctactaaaatacaacaaatagccgggtatggtggtgtgcgcctgtaattccacctacttgggaggctgagacaggagaattgcttgaacccgggaggcggaggttgtggtgagccgagatagagattgcgccactgcagtccagcctgggtgacagagtgagactgtctcaaaaaaaaaaaaaaagaaacaatgtctcactatgttgccctcagcttcccaaagtgctgggattataggtgtgacccaccttgcccagccaagctgctgtttctttaacacataaagctctttttgctttaaggtcttagtcttagcatgtcttcctcttctctctccatgaaatactcttccaccagatcttcacagggctggttccttcttggcattcaaatctcagtttaaaggtcacctcagagaggttttctctgaacacttattacaaagttacaatgtagcttcccatctccacttcatttctatcacatcactgtgtattatattcattattgtttacttttcttccttttttttttttttttttttagacaaagtcttgctctgtcacccaggctggagtgcagtggcgcaatcacggctctctgcagcctcgacccccggggctcaagctattctcctgcctcaccctcctgagtagataggactacaggcacgtgcggctatgcctagctaattttttaaatcttaagtagagacattgtctcactgtgttgcccagactggtcttgaactcctaggttgaagggatcttccagcctctgcctcccgaagtgctgtattacaggtgtgaactaccatgtccagtcttagttgtatacttatttattgactctcacctcccccttcagtgtaagtgtcatgagagcagagatcttgattgttttattattttatccctggtaactagacttgtgcttggcaaatagatgacatttagtaattatttattaagtgaataaatgggaatatttgtctcctgaaaatgcttagtctggccaccagtttggcttttgaactgtgcagctttaacttagcactgacaaatttaggagcataaagattaaaagcaaaatcaaggagaagtggggaaaataggagtggagaaagtaagattgagttattgagatggattagtttttttgtttgttgtttgagacagggtctcactgtgtcacccaggctggagtgcagtagtgcaatctctgctcactgcagccttcacctcctgggttcaagtgattctcctgcctcagcctcccgagtagctgggattacaggtgtgtgccaccatgcccaactagtttttgtattttttagcagagacggggtttcctcatattggccaggctggtctcaaactcctgtacgcctgacctcaagtcaggcccacctcggcctcccagagtgctgggattacaggtgtgagccaccacgcccggccgagatggattagttttggacccacttatatgacatagccattctaagagagaacttgcatatgttgcctgtactcttactggttttttccactagaaagctagttcagctgatgaatgttaccttgtcaggttgtttctatttctatttagggcaaggactttctgagaaagtcaacctctagactttgtttcctggattgttgtcaacttatttattgtatgcctgttgtatgctagctattgtatactaaatactggaaacacaccctgtctctgtggagaaaaaaggactgtttggctgattaatgataacttaacacttgtttctgtgtagaacatatgcagtaatgtcacctcaaaagagagttaagaacgtccaggcacaaaacaggacttcacaaggtagtagtagttttcagaccacgctttcagcctggaaagtaaaacaggatccaagcaactcgaagaacatctcaaaacatggacaaaacaatccagtgggagattatgaacatgctgatgatcaagctgaa

SEQ ID NO: 44191 - DNA, 2300 bp, Homo sapien
gccccttcagaaatcaaaggccttttctgcacctgcatgggggcctgcctattgctatttggaccagataggaagggctacttacacagctctgaaagcttgatgacaggggcaattggttcctatgtcgcttattttgaagaggagatcaggccatatttctagccttttgctgaagctagcaacttaagtttttaaaatttcacctcaaaagaaaagatatatatacacactattttctagctgaaggttttcaataatagtaatgatcatcatgatgaccacagttattaatgatgtattatatgtatcaaaattgctaaaataatagatttctaatgttcttgctacaaaaaaaatgataagttggtgggatgatgaatatgttaattggctgggctgaatttttctgcatagtatacatagatcaaaacatcacgctggagcccataaatatatacaattattatttgtcaattaaaaataaataataaaaatacttcataaaaaaatcacataataattttaaaatggaactgaaaaaaaacagtaattctgggtcctttagacactttgtaaacactagtcctagatcctatgtaaatactagtcctagatcctatgtaaatactagtcctaggaagtattttctttctttctttctttctttttttcttttttttgagacagagtcttgctctgttacccaggttgggtgcagtggtgcgatcttggctcactgcaacctccacctcccaggttcaagtgattctcctgcctcagcctcctgagtagatgggattacaggcgcacaccaccacgcccagctaatttttgtatttttttggtagagacgggggttttaccatgttggtcaggcttgtctcgaactcctgaccttgtgatccgcctgcctcggcctcccaaagtgtgggattatataggcgtgagccaccacgcccgaccctaggaagtattttctaagttccagtgccatcagagcttataaaatttttagaggcaaatcagtgaacttaagcaacccactcccaaccagtctttgtctctctccatatacaccctgttcccagagatggagggaggaaagaagaaagctgcttttatcctttgctgtggcctgggactgctggggctttaaatctttgtatgtttgtgtaggagggtgaggatggggactttctgactgctattcatccacctattcattcaatttactcattcaacatatatttattaagtaacctactgtgtgctgggcacttggtaaagggatataatcttatctatcctgccagtggcttctcccaggtctctgagggtgtttggagctcataccctcttctctttaacaagcgtgacagttaaaagagtaagggctggtatggacaaaagcaggaaggtgcctggggtagtagtcattgaggtgagtcatggaggagctgtattttcctgaattattcaagatccattttgtttccccaatttgttgaggctttttctacacgtgagatctaagagggtgtgaggatgagacttaggggtgactggcagactgtcctgagcccaaaactgtaccttgagtaccagtgatgattccagaccacagtgtttcaaccctcaacacagaagcagaatcctggactggctaccgaggggcccctgccagctgctggctccaaagttggttttgtctgtgggctagatcggtgtaagttggggtccaggctgctcgctcagcagcctgattgatctccagggctcttttgtctcctcctccccagtggaagcctctccccctcttcccctctccccctctccccctctctccctcttccccctctccttgtctccttctctccccctctgcttctcaggctcttccgctttcctcctctgcttctaatgaattgacatctccaagagccgccacatctctggtagttttacaaaactgtccttgctcttcctgcgtttgcccagtcaagggtatttttgcctgaggtcggaatgatgctgttagtcctggtgatatgattgcatagcaacacagagcagctctgagaggggaggaggaggagaagaaggaagacagggaagtgggagagacagagggagagtgtgcatacagcagctgtcggcatccctgtctcagggacttctttgctgattcacagaggcagcccagccccggcctcccagcttacagctgccgcctgcttctcagacctgacggaatcagaaggtaggccacagaaaaattatttccaagccttggcctt

SEQ ID NO: 44192 - DNA, 2300 bp, Homo sapien
ctcagaagtgtgggcctggctgggcacagtggctcatgcccacaatcccaacactttgggaggccaaggcgggtggatcacctgaggtcaggagctcgagaccagcctggccaacatggtgaaaccctgtctctactaaatatacaaaaaaaaaatttagccgggtgtggtggcaggtacctgtaatgccagctactcaggaggctgagatgggagaatcacttgaacccgggcagcagaggttgcagtgagctgagatgcgtgccattgcactccagcctggggtcaacaagagcaaaactctgtctcaaaacaaaacaaaacaaaagtgtgggccctaatacccaaaatgcagggctctacaaatacatcccaaatacatggaaaataagattagaaataaagtcttggttcattgtaagaacataaaattgaaaaacaaataatgaaaacaataaaaaataataaaataaaaacttgggatccagcaatcccacgtctagatgtatatcctaaaaacttgagatcagtgtgtcaaagaaatatccgcacacacatgttcactgcagcattacaatagctaagttatgaaatcaatctaggtatccaacaagtgaatggataaatatgtggtatgtgtacccagctgaatactattcagcctttaaaaagaaggaaattctgtcatttgcaacaacgtggatgaatctggaggatattatattaagtgaaataagccaggcagaaaaagacaaaaatcacatattctcacttatatgtggaatctaaaataattgaactcatagaagcagagagtagtgttggttattacaggctggagtagcgggaggggcattgaggagatgttgatcaaagaacagaaaatttcagttaggctggtccaatagtagtgggatattatcacaacttattaacattaatgccactaaagttggtatacaatctcccacttccaaatttggcttttaaaattaaaaaaaatgaaagttgcagttagggggaataactgataagtatttaaggtgatggatgtgctcattagattgattcagtcatttcacactatatcataacatcattgtgtaccccataattatatatgattataatttgtcaaaaaaagattaacttggaagaaagtattcacttcaccaaaggtatatatatatattttaaataaaaagatccatcttaggagttcttttaaatagcttttgggggcattcgaagtaagtggtgattgtgaggattatatgaaatgatagacctaatgcactcaatgtagtactgggcatacagaatgcacacaataaagggtagtaatgaatgaaagggtagtaacgaataaatcaaatcagattttatgttctccataaaactccatctcaaaaagaaaaaaaaaagagactccgtctcaaaaaaaaaaaaagaactggattccatgctgggcgcggtggctcaggcctgtaatcccagcactttgggaggctgaggtgggcggatcacttggggtcaggagcttaagaccagcctagccgacatggtgaaatcctgtctctactaaaaaatacaaaaattagccaggtgtggtggtgcatgcctgtagtcccaactacttgggagactgaggcaggagaatggcttgaacctgggaggcggaggttgcagtgagccgagatcgcaccactgcactccagcctgggcgacagagcgagactctgtcttgaaaaaaaaaaaaaagaactggactcctaacttttccccagggtagctcaaagctgttgttgctggctctagagtcataaaaaactgcctggtctcccatggactgcttaatttctactaatccattaatgtaggtgaaatattgaaaatcaagcccttgtttacttcaaatcatcacagaacatttatgcaagtggtttctaggcgaatttcagcttttggtttgcattcttccctacagaggttagtttgcttaggtagccaccaacgtgttgttgaattgtagtcttttacctgagagtctaagaatatgattaagaagacgaaatcatgtttcataacagctcttatttcatttgttcatcaaattacatcatgtaatttggattgactttggaaaatctacacatattggagaggagctaaggtaacgtctagaaataattaagttatgtcaaataaggtattgtctaactgtacacacatcattctagtgaggattatgggcaagatcttgtataatttagccagtactaccagaagtggtcaggaga

SEQ ID NO: 44193 - DNA, 2300 bp, Homo sapien
tggcctgttttcttgcataacccctgatgtagccccatggcacaatgccaaaatgaaggttagcagatagattctaaaagggatcaaaacaattttgtcttggtctgaagctctgataatctagtttaattgaatgaaaaaatatcatgtcccaaaagaaaatgattgtagaatagtcttccgaaaatatttattccctgcgattaagtttgggtgagtgttaggcagtggagacgtggctgctacaatcttgaaccggcaccggcaatgtcgttaacagtattacgtcttaaagacataaaagaaaccttttacatttacgaaggttctggaaccctccaggtcacatgactacacaggaagccattttacaaccccaacgaggtgggccatggagtgccccgagggacagctccccatttcttcagaaaatgattcaacaccaacagtttcaacatcggaagtaactagccaacaagaaccccaaattcttgtcgaccgtgggtctgaaaccacctatgaaagcagcgccgacattgctggcgacgaaggcacccagattcctgccgacgaggacactcaaacggatgcggacagcagcgcccaggctgctgcccaggccccagaaaacttccaggaagggaaaggtaggtggttttttaagcttgttcccccagccgaggaccttctttcggagaaacaaactgcttttagttcgattcaaaatttgtttgaattgcggcccccttgaggagcaatgggcgacgtaacctgtgtccctctccagaggatgtaaaatgttgactctgttgaggagaggggagcaaccgatcgtgttagagggctttgggcacagattctagttgttcagtgggtttgcacggtggcgtgtttgtcactaggcgaggtcaccgtgcctagggacaaaccgtccgacctaatggagtcgaggagcaaccaaaagcgagcaactcgctttttttttttttttttttttttgacggagtttcgctcttgttgcccaggctggagtgcagtggcacgatctcggctcactataacctccacctcctgggttcaagagattctcctgcctcagctgcccaagtagctgagattacaggcgcctgccatcatgcctggctaattattattattattatttttatttattttttttatttatttttttttttttgagacggagtctcgctctgtcgcccaggctggagtgcagtggcgggatctcggctcactgcaagctccgcctcccgggttcacgccattctcctgcctcagcctcccgagtagctgggactacaggcgcccgccactacgcccggctaattttttgtatttttagtagagacggggtttcaacatgttggccaggctgatctcgaactcctgacctcaggtgatccacccgactcggcctcccaaagtgctgggattacaggcgtgagccaccgcgcccggcccaactcgcctcttaggagtatcactgtcccctggtaaaaatcttctggcgccctgaaggttgcccctgtgtaaaggtaattttttttttttcggacagagtctcactctgtcgccaggctggagtgcagtggcgcaatctcggctcactgcaatctccacctcccgggttcaagcgattctcctgcctcagcctactgagcagctgggactacaggcgcgcgcaaccacgcccagctaatttttgtatttttagtagagacgggggtttcatcatgttggccaggatggtctcgatcttttgaccttgagatctgcccgccttggcctcccaaagtactgggattacagtcgtgagccaccgcgcctggccaaggtaacttgttttgaagcctcggtcttgcttcgcgaggtccctgagcagtcgcgtccccctcagccctcccctcggcgctcccctcggcgctccgcgcctttcgagccttcccgcccagcacgcggtgagcgggccactgcctcgaagtcgtgctccagtccgctgggcagcgcggccgcggaggcgtggcgaggcggggaggggccggcgcgcgccgcttttactgtccaggcgccggcagcccagcgttcgcctctacgttccgcgcgggagcccacgcgcggttcgtccggaacccacagaccagagacgcaggtcccagccttttcggtgtcggcgccagttcccggaggagcgggtgagtcgggcggccgaccgggcggccgggaccgggtcagcgccccgccagtgtgcaccccgccgcggtgcaccccgcagccctccc

SEQ ID NO: 44194 - DNA, 2300 bp, Homo sapien
tgtcacccatgcttttgaggtcttaaaaaaaaatttgcccagtccaacgtcctggagagtttccctaatattgtcttttagtagtttcatagtgcgaggtcttacatttaagtcttggatccattttgagttgatttttgtatatgatgaaagatagggctaattaaccttttaaaatctgtttgctaatctgaaaacaaaaatcaataaacagaatcataatcataccaaactcagagggcaattgtgagggttaaatgaataacatacgaagcactagcaaagagtctagcacataaacactcagtgaatgttagctattaatgaccttaggacaattcccgatacctaataaacttctattgaaggaacacatgcaactgcatatttgctataatgatgaaactgaagcatagttagggagggggaagagtgctttatagggaaaggcatgcaaaagaacttattaaaaagaaactgcagcatgacagactagaacccggaaacacactctctgtgtacctgataatatgatagtatgtataggacagttttttctgtatttgtacatcatgttgcttcttggatcaactctcctctaccaaagagaaaccataattcatatcctttcctttcttccactttatatttccccgtttccttaagaaggggctggaactctggcaataatgaaaaagttacatatgtgtatgctctaactagattgtaaatttctgaaggataatttttgcctccttcccatgaaacacttaaccatattttaagcatttaataaatgtttcaaatccgatctggcacactaaattctcaattaacatttgttggatgattgaatttataagtgagcagttattgtgctcccctcctctacccacagagatgctccctgagacacttttgtcaggagtactatttcctctccctctccctctccctctccctctcctccctctcctccctctcctccctctcctccctctcctccctctcctccctctcctccctctccctctccctctccctcgttcttcttttttttgacggagtctcgctctgtcacccaggctggaatgcagtggcgcgatcttggctcatggcaacgtccgcctcccggattcaagcgattctcgtgcgtcaacctccctagtagctgggattacaggcacgcgccaccacgcccggctaatttttgtatttttagtagagacgggggattctcaccgtgttggtcaggctgctctggaactcctgacctgaggtgatccacctgcctcagcctcccaaagtgctgggattacaggcgtgagctactgtgcccagccaggagtactattttcatttacctaacatgtatatatctgattctttatgaaaaggctttgagcagcttttagtgttatttactgcatgagacaaaaaataattagggaaatgggagagaacatagttacttaagataaaactcaacatatgtcagtaaggcttagttattacaggttggttgcaaatttggttctgagcttcctagcagccatcataaacttaattatataattcacactgtccttacaagtcaaaacaattactcagctatttcagttaccaaaaacagaattttcatttccgttttcatgaaaggatttttttgtataattaatgccttcaagaatattgtatagtaaatgtaaaactggtctcgttggcctgttttcttgcataacccctgatgtagccccatggcacaatgccaaaatgaaggttagcagatagattctaaaagggatcaaaacaattttgtcttggtctgaagctctgataatctagtttaattgaatgaaaaaatatcatgtcccaaaagaaaatgattgtagaatagtcttccgaaaatatttattccctgcgattaagtttgggtgagtgttaggcagtggagacgtggctgctacaatcttgaaccggcaccggcaatgtcgttaacagtattacgtcttaaagacataaaagaaaccttttacatttacgaaggttctggaaccctccaggtcacatgactacacaggaagccattttacaaccccaacgaggtgggccatggagtgccccgagggacagctccccatttcttcagaaaatgattcaacaccaacagtttcaacatcggaagtaactagccaacaagaaccccaaattcttgtcgaccgtgggtctgaaaccacctatgaaagcagcgccgacattgctggcgacgaaggcacccagattcctgccgacgaggacac

SEQ ID NO: 44195 - DNA, 2300 bp, Homo sapien
ggcatcatgcatgcagttcctaccttggggccttcggacttactgttattcctgcctgaaatgttcttgtctcagacacccacaaggttttgtggggtttttttgtttgtttgtttgttttgagacggagtcttgctctgtcacccaggctagagtgcagtggcacaatctcggctcactgcaagctctgcctcccggtttcacaccattctcctgcctcagcctcccaagtggctgggactataggcgcctgccaccacgcccagctctttttttttttgtattcttagcagagatggggtttcaccatgttagccaggatggtcttgatcttctgacctcgtggtctgcctgcctcggcctcccaaagtgctgggattacaggcgtgagccaccgtgctcggcaacacccacaaggtttggttgcttagttcatccaggtctctgttggactgccaccttcccaaggaggccttctcaaaccatcttatataaaataatcacactccataaatattccctaacacccttactctgctgtttctccatggcacttattacattgacatatttatgtgtttattgtctacctcccctaactagaccaatagctcctcaagggcagggactgtttctgtgcactgctgaaatcctgtcactaaaaacaacggcacagagtatgaacttaaatgtttaactgtgttttcataatgatttaaaaaaaattccagctgggtgcggtggctcacgcctgtaatcccagcactttgggaggccaaggtgggcagatcatgaggtcaggagtttgagaccagcctgaccaacatggtgaaaccccgtctctactaaaagtacaaaaattagccaggcatggtggcgtgcgcctgtaatcccagctactcaggaggctgaggcaggagaatcacttgaacccgggaggtggaggttgcagtgagccgagatcccaccgctgcactccagcctgggcgacagagcaagactccgtctcaaaaaaaaaaaaaaaaaaagtccttctagcacctttatggggaaaatctaaacagggacttgaagcttttagagatgttcatttccccagatttcatggatttgcactagaggctcccaacaagtaggtccattttaggtctatactccagtctacaaggatttgaaataagaggagaatccagtcaatacaacctctactatactcacggacttgactgccagcacataaccgcttccctccccatctcatctctaggttctcttttctctcaaaaaggtcaggaacccctggaatactgtgctgtaccttacacagagcaggtacccagactgactgactacattttaaccttggaatcagcccatgctaaatctctccgggttgcagataataactgcaataggatgccttctcaatcacagagttgaatcttatatagcttttatttcagtgatcagaagaatgcagtaaatggaatctacactaactaacattaggcatgcacctctacctgaaactgctgttagcttctgattggcctaaatctttataacttatttaggcacatcactgaattttttgtaccctgatatacagggtaagttaatttcttccttgtggcagtctagtaataagaattatgttcactggctagattcctttataactaaaggcctctagactctcaggctgcctaccctaccttgagacttacttaatatggatatttaagcaaatcatcatataggaaagggagatcaagataactgaagtgtactgtataaacactcttacagatatttttctccagcattgacaatcaaacactagataaggataccaaattattcttcccctacttctgccctttctgataaacacaaggatctcccctgaaatcagaaatgactccacacaaatgagagatttttacgtatgtggtcccactatcaaaattataggaagcagttaatggggctttgagaaaagcatagtcccatgtacagtaatatgcatctaaatagagttttctttcgcctgtcaattattttcacaagattagcattaaaaaatacaagcaaacatatgacccttaagcttcacacacaaaaaattggtctttgttcattctcagatgacaggatgtcccaagagtaacaaaagatgggagccaatcctctcatagctgtttcttcaatcatcccatcaacagctcttcatttcttgaactaccttccttttccaaagaggtaatgctgagatcagtcagaaaggctttctgagaaaa

SEQ ID NO: 44196 - DNA, 2300 bp, Homo sapien
ttccctgaaccactaaataccaaatacctcgggggcttatgggccatggccatcaaaaagaaccttagtcgtaggccgggcgcggtggctcacgcctgtaatcccagcactttgggaggctgaggcgggggaattaccttaggtcaggaattcgagactagtctgaccaacatggtgaaacccggtctatactaaaaatacgaaaattagctgggcgtgatggcgtgcacctgtaatcccagctacctgggaggctgaggcaggaaaatcgcttgaacctgggaggtggcagtgagctgagctcacaccactgcactccagcctggacaacagggtgagactctgtctcaaaaagaaaaaaaaaaaaaaaccttagtctttttgttaccagtggtaaaaaaaaaaaaaaaaaaaaaaaggtcccaggtactcagaatccctgctcagtaatacagcctgtggttttgaaatattaatcactaaaaattatcacatgggatttctgttctgccaaccacttgaacttgtttggtagccatttttcacttgaggatccaaaataagaatgtgttgtatacagttacataatgaacttgccctcaattttgatcagtgtgattgtcagtttaatttgcaaattgttcttatcacactaataacctgagttactaaagatgaaaagtgcacaaagactttatggagagctgctatttcttttttttttttttttccttttgtaatcgacagggcatgctactgggcatagagcatatatttaataaacatttgctgcttactcattgcatttcccttgaattctggattctagccactctaacactttactttttctttggttttagaaagcagatgagcgtcccactttcaaaattcttctgagcaatattctagatgtcatggatgaagaatcctgagctcgccaataagcttcttggttctacttctcttctccacaagccccaatttcactttctcagaggaaatcccaagcttaggagccctggagcctttgtgctcccactcaatacaaaaaggcccctctctacatctgggaatgcacctcttctttgattccctgggatagtggcttctgagcaaaggccaagaaattattgtgcctgaaatttcccgagagaattaagacagactgaatttgcgatgaaaatattttttaggagggaggatgtaaatagccgcacaaaggggtccaacagctctttgagtaggcatttggtagagcttgggggtgtgtgtgtgggggtggaccgaatttggcaagaatgaaatggtgtcataaagatgggaggggagggtgttttgataaaataaaattactagaaagcttgaaagtctttggtatctctattaatcatgcagcctccctgaagcgccctatctcagtattccagaaagctgctgtgtagcattagtttggcatattcctacactgagaactcgacaggatcctccaggtttaagccctcttgttaactcctgcctctgaatcaaagatgcattaagcaaaaacagtgcctgtcacagcacgcatgcaatgttatttgaatgaatctgaaagttgggcacaaactgccatagcctcatttccctacgtcgggagaggaaaactccatcaaaaaacgaaagccaggggcccaggatagccaactaatcgacccagtcaactaactgacccagtgcacaactctggtagctcagaaaacgcgggctaatttggaagtggacaggggcggagctgtggggccagcacggaatggatcacgtggtctgaagtaacttccttttctcctttcttttctttttggagtaacatctcaacggcacctcggctctgggctgtaagccctgcgatctcaaggcgcaaggctgggcgcaacggcagggttgcggggttacgggattgcggggtccggggagtggaacccgccgactccgggaacgaagcaccggcgccaaggtgtgggaggcggcggggtggagttggacgcctgcctcgcgccgacgcagtgcactcacgggggcggtcccagaggcagctagctgtggttccggttccgtcgcggagacacgtgaaggtcggtgcggagttcgtctctgcaagcttggtcgccctgggatggattcctcctcctcttcctccgcggcgggtttgggtgcagtggacccgcagttgcagcatttcatcgaggtagagactcaaaagcagcgcttccagcagctggtgcaccagatgactgaactttgttgggtgaggagcctgg

SEQ ID NO: 44197 - DNA, 2300 bp, Homo sapien
ttgtgctcctctctctctcttgtttagctctcccattggatgcctatcacctcccagtccccaccccaagatggatcttgagaaaggacagggcatgtgacaacaagtggcataagactgaagaaaagagcctgggcacggtggctcacgcatgtaatcccagcactttgggaagctgaggcgggtggatcacgaggtcaggagatcgagaccatcctggctaacatggtgaaaccccgtctctactaaaaatacaaaaaattagccaggcgtggtggcaggcacctgtagtcccaactactcaggagactgaggcaggacaatggcgtgaacccgggaggtggagcttgcagtgagccgagatcatgccactgcactccagcctgggcgacagggcaagactccgtctcaaaaaaaaaaaaaactgaagaaaagaggagggaagatgaatgcctgtggccaaccctcaggcaggtgagtggaacagctattgggggtgactagcgaaaggatagacgttgtcaataaagtaaggcaatcatacaacacatgctgtccatctgtcttgtgcaaatgtgagtatcaaccactctatcatcagtctacaaatactttaaatgtttttatttaaagtcctgttgatggctgggagaggtggctcactcctgtaatccctgcattttgggaggccaaggcaggagtatcgcttgagcccaggagtttgagaccagcctgggcaacatagtgaaaccccatctctacaaaaagtagaaaaattagcccagcacagtgatgtgtgcctatagtcccaggtactagggtgactgaggtgagaggatcacttgagcccaggaggtggaggctgcagtgagccatgatcacgccactgcactccaacctgggcttcagagcaagaccctgtctcaaaaaaaaaaaaaaaaaaaaaaggtcccagggcctgttggggcttgggggtgaggggagggatcttagaggatgggtcaataggtgcagcaaatcaccatgtcacacatatacctatgtaacaaacttgcaccttctgcacatataccccattttttttgtttgcttgtttgtttgttttttagacaaaataaagaaaaaaaaataaggtcctgttgacttaaaacttcggatgaaattgtagtgggacctgtgatctgtttctacattaggatacagtgccttggggcaaggaaatatggcagtgcccgaggtgtcaaggtgggcaggcagatcagtcagcaggggctccaccatcatggtctgcattcaatactggctgcatttcctaggagaatccctgggggaatcattgcagttggagcataatgtagggggcccctgagaaaacctccaggcttcaagtgacatacctagtctgctttaccggtttacaggactcaagagaaaggtggacattgagagttaatccctgaggccaaatcttaaatggagaaagtcaacatccacagaaaatggggaagggcacaagtatttctgtgggcttatattccgacatttttatctgtaggggaaaaatgctttcttagaaaatgactcagcacggggaagtcttgtctctacctctgtcttgttttgtcctttggggtcccttcactatcaagttcaactgtgtgtccctgagactcctctgccccggaggacaggagactcgaaaaacgctcttcctggccagtctctttgctctgtgtctgccagcccccagcatctctcctctttcctgtaagcccctctccctgtgctgactgtcttcatagtactttaggtatgttgtccctttacctctgggaggatagcttgatgacctgtctgctcaggccagccccatctagagtctcagtggccccagtcatgttgagaaaggttctttcaaagatagactcaagatagtagtgtcagaggtcccaagcaaatgaagggcggggacagttgagggggtggaatagggacggcagcagggaaccagatagcatgctgctgagaagaaaaaaagacattggtttaggtcaggaagcaaaaaaagggaactgagtggctgtgaaagggtggggtttgctcagactgtccttcctctctggactgtaagaatatgtctccagggccagtgtctgctgcgatcgagtcccaccttccaagtcctggcatctcaatgcatctgggaagctacctgcattaagtcaggactgaggtgggtctggggtatggcaggggctgggcagcagcagcaatgtaccttgcttgggacccctaaaaac

SEQ ID NO: 44198 - DNA, 2300 bp, Homo sapien
catgccacttactctgcaaagccagaccacacctagagtcctgcattcagttctgagtgcctcgtcttaggggaaattaatgagcaggagcatgtccaaaacagagaacagctcaagcgatcctcccacctcggtgtcagcattggtgtacaaactttcacttataggatgtataagctctggggatctaatgtgcaatatagtgaccatagttaataatactgtattattgaaatttgataagagagcagattttaagtgtcctcaccacccccatggtaactatggatggtgatggatgatagatgtgttaatcaatttgactgtggtaatcattacacagtgtatacacatatcaaatcatcatgttgtacaccttgaatataaacaatttttgtcaattaaatatttttaagtaaacaaaaacaagcaaaacccccacaaagccacataacaccagatatgatagaaagaactaaggttgattaaatgaagaggggccatgttcacggtcttcatatttccatgttactaacataaacccctaaaggccagtgagattgcttaagaatctggaaagaaaaagaaaatgctggaagtttggcaaagaaattttcaggaaatgtagcaggtagtggtaatatatttattatctcattcccagagaccacccaacaaaaaagggggtgatcagagtgtcagctcaggtcccacgcgtgttcctggagggttgtgcaagcaagataccccagactctcacggttcttcagcccctattccactgccacctcctcctgtgtctcagcccaattctgtctcctcaccatcctctacactgcagatgcccctgcttcctttgtatgatgtagtggttaagtgcaaggctatagtgttagactacctaggatcaaattccagctccacaaaaaaataacaacctgtgtgacttcaggtaagtaaacttaacatctcttgtgcctcagtttcctcacctgttaaatactaatactggtatatacctcctggggttgctgtcaggattaaaaggggtagtatgtaaggtggttaggagaatgcctggcatatagtaagtgcgccataatttttttagctattataattaccaggccacaacagcaatattttataatgttaaaggaacgcgggctctagagtcagtctacttgggtttgtatcctagattcactaaataccgttgacattgggcaaatcgtttaacatcctacagcctcaatttcttaatctgtaaaatgagaataatagtaccacctgtctcctagaattattgtgagaattgtatgacacaatctatttaaaatgtttagcaccctgaagtctttctatgctggactctcttgagacctagtatatgccttctgccaggtttgcaaggaagggaagagccgctaggtactttctacttctaggcttgatgattgctattacaggagccaaacaatttcattgtcacttttcagaacctagagctgctgacttactccctcaacagaagggtgctgctttaatgccaatcattgttccttttcttcaaagtacttagttcataattgcacatttataagcctattagattactgtacctctcccccggaacagtgcctgccacataatgggcatccaataaccatttgttgaatggaccaactggccatgtgatagatgaactggaacaattggctccctccaggtcttcattgaattagcagtttgctgcgaaaggtgttcccagtgaccttgaggtggaacaggaatggaacgtggaggtggaggaccccttcattcgaccctagtcctggcttccctcggggacggggaggccagaggatctgggaaaaacactgctcccttcactgaacgccactacgtagcagagtccaccaaaagagataaagtgacgaaacgttgaaagctgcggggcgggaggaagtcggggtgagtggaccaccctttaggcggagtccttccttaagctcccgcccgcggctccgaactgagtcctctcagccgcccgagggcgctgcgctgagccttacactctatgattgctcctaccgactcccatgaggaagtgcgatcgggaacctcctatatacttccgtttgcctcgcggtttctttctttccgcgccgatagcgctcacgcaagcatggtaggacttgctggtgggggccgagtaacatccagcttaatctttcccccccttcgtcgcccgtgctatgccgggatgggtccaggctcctgtgtggactcgatatatc

SEQ ID NO: 44199 - DNA, 2300 bp, Homo sapien
aggttaagaagtcacataaatcccacaggcactgttttgcttcagctagaaaatacaatgcagatgtcattaaaagacttactttaaaatgtttattttattgccaactactacttcctgtccacctttttctccattcactttaaaagctcaaggctaggtggctcatgcctgtaatcccagcactttgggaggctgaggcgggcagatcacctgaggtcgggactttgagacccgcctggacaacatggtgaaaccccatttctaataaaaatataaaaattagccaggtgtggtggcgcacgcctgtggtcccagctactctgggggctgaggcatgagaatcgcttgaacccgggaggtggaggttgcattgagctgagatcatgccacctcactccagcctgggcaacaaagattccatctcaaaaaaaaaaaaaaaagccaggcacagtggctcatgcctggaatcccagcacttttggaagctgaggcaggcagatcacttgaggttaggatttcaagaccagcctggctaacatagtaaagccctgtctctactaaaaatacaaaaattagccaggtatggtggcgagcttctgtagccccagctactcaggagactgaggcaggagaatcacttgaacccgggaagtgggggggtgcagtgacccaagatcacgccactgcattccagcctgggcaacagagcaagactccatctcaaaaaaaaaagttctatttccttgaataaaattttccgaagtttaaactttaggaataaaactattaaacccatatttactcatccagatacccaccccccttgttgagattctctcccaattatcaaaatgtgtagcatatttaactaccaagagctaaacatcattaagactgaaatgtattaagaaggatgtataggccaggcacggtgtctcacgcctgtaatcccaacactttgggaggccaagtcgggcggatcacgaggtcaggagatggagaccatcctggccaacatggtgaaaccccctctctactaaaaatacaaaaattagccaggcaggtggcaggcacctgtaatcccagctactccagaggctgaggcaggacaatcacttgaacctgggaggcagaggctgcagtgagctgaggttgtaccaattgcactccagcctaggtaacgagcaacactccatctcaaaaaaagaaaaaaaaaaagatgtataatttggaactgttaagaggcattttaaagaatggatattttgtctcttaagattcttccaccggggagtttggccagacctggtggctcacacctgtaatcccaacatcttgggatgctgagataggagtttcactgaaggccaggagttccagactagctgagtaacaaagagagacacccaacacaaaaactaaaattagccaggtatggtaacaggcacctatagtcccagctactcaggaggctgaggcaggtggaccacttgagcctgcaagctcaaagctgtagcaagctatgatccacaccactggcacttacgagagggagaccctgtctcaaaaaaaaaaaaaaaactccactggggggtttcatacactagaaaacctattctttgtagttattttggtataaatatatctactttaaaatgtgagggggaatgtcaaaatgttcaagagtgtaagaccaagtccacagacaatgttatatatgttacagtgtactgtgtctgaagaacaatgccaaaattctttattaaattaactgttataacaaagatctgacacttaactcttagcaaagacatctcatattcactatgaatgtgttactgacttctccctattagcctgaaatgtgtctactcacatgataaccaataaccattgcataatgacaaactgcctcataaggcccctagtgattgaagtgccaaattagaaaattgcaacatatgatgtgaactcaaccagtcagcttcaatgcaaaacaagtagtaccagtaagaggcataaatttccccacaagcggaattgtattgatggctctagcttattccctcccaaaagatgaacagcaaacaaatgaagtgaacataaactcaagattttattgtcttcataataaaagatgacacttagaactggatcacttggccctgtaacagaacagaaaaaagttgttttgtattttgccatgaactactgccccattaagaacattatctgttcctaaaatactcaccatgctgttaagctgcctcattcttcctttcctccttgtagcaaaa

SEQ ID NO: 44200 - DNA, 2300 bp, Homo sapien
atggcgtgaacccaggaggcggagcttgcagtgagccgagatcgtgccactgcactccagcctgggcgacagagcgagaccccgtctcaaaaaaaaaaaaaaaaaaaaagtgtaatttacccaatgtcacagggctaagtaacaatgaggcagaatttgagcccagactgggtgccagggtcttgccattagccaaacatgacataaacatgatccattttttatggaaaataatgaaataaagaaatctatgttttcatttatatagaaaacaattgtaaggttgtatattaacatttaaaccatgattatttctgggtggtggaacggtggggggaaatctttattttcattttgctcttctttatctacattttttgcaatgatcatgcattagttttataatcagatgcaaataccaataaaaaaaaatccgtgatgggcaaaattgccacacatactgtaccacagggtcacatgaaacttacaaggccaatttcttctgtgatgtctgaccaacatcctgactttatctataaagatattcataggaataacttatggacacagaaatgtactgtgactgccaccttttaccaacatctatcagtgattcctaaccttttttaaatcacagagccctttgagaatttgaagaaaggtaaatatcctctctccagaaaaatacacatattcattcagatttgtagatttacattcattttcccattgaacatttgctctgtaagcgcagttgaatggtcaagcgctgtgctatgtactttaaataggttatctccttgaaaactcacctgtgtgagataagaactatttttcagattttttttgtcagctccctgaaattaaaaggttgtaatcccaatttacagataaggattgtgagggtcagatatgttcaatacctatctaatccagcctcaaccctcacgcaaaggtgtaaatgtataaagttcctccatgtcaaccttccagcctgatgccacgctcatgggcgaggtgggagagatctcagcgaccttatggtctctctaactccctcgagatactgccgagaaatccacgaccccaaaaggagaaaaaatggcacgaatcttagttccccattcctcctacccaccctagatgttctaacggttagcacccggcagaggaagagcagaagttcacaagaagggtctgaatagaaccgggcagggctactttgggcacactgcctatggggtggccctgctctgcaaggagcagtgaaaaaagagaaccgggcagggagagagagaaagagagaggaaagaagagaaagagaaagagaaggagaacgagagagagagagagagagaaagaaacaggggccgctggccggactcccatcccaggaaaggtcacacagagaaagtttagggctagtcctgattcgggacagtttgctggggataaaaaagcagcagcagagtcgggtgggggagctctccctcgggctcaactgttcccgttgagactctccagttccccaaacacacccaaacacatggaaaagcaaagggaagggagtacccaatatctgatacctgatgcaggaatctggctcttcctggcagtcaaggttgcacatgaagcgctcccagtgcagccagcccatggtaggcgtccttgccaatccattgtccagtgctctagccccagggatgtcccaggaaacgagggccaggaagcgaagcgcaagcgcgcagcccagatgtagttctgggttcctcagctgcattgtcacggtgaccggacagcataaatttccgcgggtaacctgggcttttaagattaacctcaggggcggaccaatcaccgatgacttattaaataatgacgttattgtttctctggcaactgggacggttatccccagaggtagaccaataatcagtcacgtaagacgttccgctaaccaatcaccctcttcctttcttgatattgacccgccctatttccataccagaaggaagtgcggcaccttagtgatcccgagtttaagccgagagttgctcacgtgaccgagatctcacatgacgtaggcgctcacgtgattactcgcttacgtgagcagaagtagttctggtcgtcgtctaccgtctcgctatagccgtttgagggaagaaggaggaaaattacccggtatcgttagaggttggtgtgtgggtgggaactggggacccaggggtggtgatgatgaagaccagagcggggttcgggggccgcctccgcctctttcgttctctgctttcccctcc

SEQ ID NO: 44201 - DNA, 2300 bp, Homo sapien
tatcaactgtgtacaaaatacatgttcccataccctttgacactgctagaatccttccaggaatctagtcaacagaaatacttacaaatgttccttgcagcactgttagtaatggcagaaaattggaaacctaaatagccatcattagaggaatggctgaatgaattatactttatccttaaactggaatgcaatgcagccatttaaaaaaaatctatctgccttgacccagaaagatctccaaaatacattaaataaaagaatatacatagtatgatcctacttatagtaaaagattggcatgcatgtatatacgtatgtaaataaataaaagatctggaagcaaacttgtttttgagagaactgaagggtgggggggtgaagtgggcttttcgctttttaccctatatacttctatacagttttaattctttacatttgctgtactgggattttttctttttaagttagaaagaacatattagtggttactctgagtgggaggtttatggattttccatgttatttttccaatttttttatgcagccttaaatttctacagaaataattacttttacttcagcaaaaaaagtaacataaaacaaattaaaatgtttgcatttctgggatttggtataggaaattttataaaattttctaattttgtatgtggatggtttatctgaaatggtctgggagcactgggcctcttggaaacaaagtacaaagtgtaataacggccataaaactacactgaggaaacgatttaacaaacatttactgattgccgattatgtgcctagcacactgcatctgcagtgataacagttttcctattaaccatcctaaggtctcagtgacagatttacaagctgtttttttatttcattttgcaggatttttttttttttttttgcttgccttatccctgggataacccgtcccatttaattccctgcaccgctctattccttaagagcccttctgtaggggcagagaggttctacttcattactgcgtctcctgggaaggccatcaggactgctggctaaagtgggaaccaggactctttgtgagttaagaatttgtgtatttatatgtgtgttatacacattttttaaaaaactgtaacgacatcaggttgagcagtcgtctccgggtggtgaattatgtgtatttttaaattttatactatattgttatttttcaaatgttcgaaattgaatatgtagattgttgttatcagcagaaaaataaacattattcaaatactctattcagtaaagtaatttattgggcgcctttgtcaagcacgcatttgcctagatgtgactctacagataaaattcacttggggcctccccttacagacaatcaggcagtggagactgagtgcctgaatggatagaccagcactcagaccactattttcagtatctgtttttcttaactcagggccgtggttttcaaacgtttttcgccttacggtcacccttaggggtcccccgagaccggcccagacagacagatatacaaaaacacatacacagtcatgagcgtccaccatttccccaccaggcgcagcacaggcggcttcccggcactgagatgggggggaggagggagagagcgcgaggggggaggggaaagcagagaacgaaagaggcggaggcggcccccgaaccccgctctggtcttcatcatcaccacccctgggtccccagttcccacccacacaccaacctctaacgataccgggtaattttcctccttcttccctcaaacggctatagcgagacggtagacgacgaccagaactacttctgctcacgtaagcgagtaatcacgtgagcgcctacgtcatgtgagatctcggtcacgtgagcaactctcggcttaaactcgggatcactaaggtgccgcacttccttctggtatggaaatagggcgggtcaatatcaagaaaggaagagggtgattggttagcggaacgtcttacgtgactgattattggtctacctctggggataaccgtcccagttgccagagaaacaataacgtcattatttaataagtcatcggtgattggtccgcccctgaggttaatcttaaaagcccaggttacccgcggaaatttatgctgtccggtcaccgtgacaatgcagctgaggaacccagaactacatctgggctgcgcgcttgcgcttcgcttcctggccctcgtttcctgggacatccctggggctagagcactggacaatggattggcaaggacgcctaccatgggctggctgcactg

SEQ ID NO: 44202 - DNA, 2300 bp, Homo sapien
ccaaggactgaatcagaaactgggtgtggagcccaacaagttgtgttttgttttttgtgtttttctgagacagggtctcgctcttgcccaggctggagtgcggtggtgcgatctcagctcactgcagccttgaattccaggctcaagtgatactcccacctcagcctctcgagtagctgggactacaggcgagtgccaccaagcccagttattttttaaaatgatttttatagagacgggatctcactatgttgcctaggctggtctcgaactcctaggctcaagagatcctcctgccttggcctctcaaagtgctgggattacaggtgtgaacctctgtccagccaataagctgtgttttaacaagtgctcagggtggttctgctgcaggaaactactggctgatggatacatggattccattatccacccattcattgattcctgcattcactcatccaaccctaaaggaggtaaccaaaacagagacaatcccatgtgtaagcatgacatatcttctctgccttctctacccagcaaaatgatacgaaaatgcattgcgaatatgtttataaatcaagctccttttccatcaggtagaattcctagtgctgtcagctaaaatgaagatttctccaagatgggcctccagggctattgcaaaacagctgctgatggaaggaaattccacttgctgtgccttataccaggctgggagtgtcacaagaaccctttacaagctgctcccacaatgaccaaaactgtcttctcatgagtgcaaagcaggcatgcccaaggggcccaggttagcatggtgcaggactccgctgggaaggtgaggggttatcgtcgcgggggagtgtcgactaactgggctggtggtgcaggggtaaaataatttaccaagacagttggaggtaaaggcagatttattagagaaagtaggaaaatacgtttcgagaaggcaacgggcagcctgcaagagaggagccgactgaaaagaaacaaaggcttgctggagattttataggatggtttttgggctgattgagaaaaccaaggcagtagggagctagcttgcattcttctgttagctggggtgtttgataaattgaggcgtttgatagtgagcaggaagtttgtgagttatgtatgttatctgcgcaagaagccacatgtcctgggccataaagaaaagcagacctatagcttatctgattcctctttttgtttatatgttctggaccatgaagaaagacaaacttatagcttatttgctttctccctttgccttcccctgctccagccagcctaactccttttttctaattaggattccacagttatgttgtccctgtgcctgcagcctgtgaatggacgccccaccacctccgtcacagcagtggtcagcacagataaatgcacacaacacacatcgatctggccctctgagaagagaatgttaggcttctgaaagaagagataaatagtgagagataacatctaagaatcaaaataatatattcagtaattattttctgaacctatcctaatgctctgaccgatacattctttagaacatctacccgtacattccaaggaccctttttccacggccctttttctccctgtatccctcttcctgctccccttcttttgcacagggcatgtttcacatatacaagatgttcttacgtgtcatcccactttagagatgaggaaattgagtctcagggaaggcaaacatcaactttgtcttggggaaagggcaggaagctggaagggaggaggaaatgagctctggcgaaggaaagaggacatggctgggatccttatggggtggtgtacgagtacccgtgccccccccgatctgtgggctgagggtggcggtgactagcgctgggaccagctccttctctctcgctcccaagcccacaagaattcggggagaaagggtgaggtagggggctccgggagagcggagagagtttggaaagaatccatccctccttctccccggcggctttctcgagaccctcacacagcgccccgccccgccccagtacatttcctttcagggaaagggacagggaagaggctgtcgggaaatggcggccgcggccgggctggggcttcagcgggaggcagcagaggggaagtggtcagcgtggcgaatgacggaaggtggcgagggagaggaagaggggtcgggtgtccgcggagctccaagagggaagacaatcgctttgccaaacacggcagggcatctggaaaggcctgggaacctcacccgccctccc

SEQ ID NO: 44203 - DNA, 2300 bp, Homo sapien
aaagtgctgggattacaggtgtgagccaccgtgcccggctgcgtcagttttttcaaaccttacaagcattgcgaaaaaaaaaaattctagtaaatatatctttgtgaaactgtgtaggcatataggttggctaaattccaaggaatagaattattgggtcaaagaatttgtgaaatattatagttatcatttaatagagtttgccaaattgccctatataaaaagcttgcatcaatatctgcctccaacagagtagaggagtgcccatttcttgacaaaccagtcaacaatattatcaagtttctaaactttgagaaaatcatacttgaaacatggtaaggcatagttgctttgatttgcatttctttgtttgagcatcttttcatatgtttattagtaatctatttcttttctgtgaacaaatctgttcatgtcttttggcacatttttctattgggttgtttatcattttactaatgatctgtaagagcttttagattattacaagttagccttttgacagtcaatgtttatggttttttttttttactttaccaaagtttaaaatttgtatgcaattaatttatcaatattttcctttggtggagaaagtaagttcgtcactttcaattgagttctgaaaagccattagtaagattgtaaggcactaggacttcctttcttggctcctgaaagggcctcctccacacaggggcccctcacagtggagcccctccctctggggtgtcctatttcaatgttctaagaaagaggctgcctggagggtctatatttggagtatgactcctcagcggggacaggtggatgcgtggggactaacttctgcatatttggtccctgagttttgggattattctgaggggcttgtatgggaggtgcagtgaagttgtaacacaaggcaggacatgaaaaaacttctttttcttggcaattgcttgggatcctgtacattgcccttccacttgtgagggaaaaaaataatgacacggacatcaggtgtgttgcagtgattcacagtcatccacagaccctcaccaccatctccactggaaaatattgaacactcgccactgctagggtagtatgtagtacatgaatggcagacaccggcgagatctcaagtgttacgacggatgaaaattccacctgttaagtctcctttccatccaagctctagcagttggttgttccatgggtgtggtgaggctgatctgattacatgcttatgtaaaatccaaataaagccccttgaatggaaaacaggttaatttgggaagtcactagtaaagcaggttaatttggtaagtcactagtaaagcactaggctcatcaggagttgggtcttaaatatatcctctagaagtcttctctgaagaaggtcttagacacctgaaaaaagatgctgagttcagccagaacttcaaaagttacaaatcacctgtgtaaaattgtcaatattagaaaacgaaatgtctttccaaagattaacttatagatcatattgaatacgtgctggttttgtttaggacaattttgtatttaaaatgtcaagaattactagtcaattttgaaagctgtaaaatagtttgcagtaacagaagacattttaaaatgtggcacaaaataatgtaaacaaaagaatgagtcttttgttatttttacaccctgaatattttttgtgtcaaatgaaaatggctatactgtattttctgattacaatattagaaaagaatgtcatattaaaagaaaaaaaaggaacacgaaaaagaaaattaaagctctacttgcaccttctgctttccttcctgatacccccttccacagcccatttggtgcaggcattgtacttagagagggcaggtcgtgtagggggcgggtggggagtgctggtcttatagtctaagagagaaataagtgattactcaaagaagaaacataaaaggccacagccaagggccgggagtgggtagggggatgcagaccctcccctgtaactgaagatgggtaaactccaaccacaaggcgatgatgccacttgtgggccctcagattggagaggacggagatgagtgacaacgcgtgcgcactggggcaccgagcacagaccagagaacggggatgtctgtgcgtgcggagtggaggaggggggagttcctggtgactggccgccggcccttggtgggtggtagggggtgctggggaggagggcgagctcggcggtgacgcgcggtcctcacgtgacccggagctgcagagctacgcagccttcgttgcagtcg

SEQ ID NO: 44204 - DNA, 2300 bp, Homo sapien
taggcattgcagggcagttttgcattctactctacagatttctgcacttaaaaaaataagtatataactagagacagagaagaggggagaggaatagactttctttttctttttctttttttttttgagatggagtcttgctctgttgcccaggctggagtgcaatggcacaatctcaactcactgcaacctatgcctcctgggttcaagcaattctccttcctcagcctcccaagtagctgggactacaggttcgtgccaccattcccggctaatttttgtatttttaataaagatggcgttttaccatgctggccaggctggtctcgaactcctgacctcaagtgatctgccagcttcagcctcccacagtgctgggaaggagtagattttctattgaggggatatatagctttttttcaggaaagtattaatagttcttagttattttttaaaagtcatacatgcctgtgagaatctgatgaaagctatggctcctttctccacgaaaatgaatatacgtatgaccacaattgcaggtggtccacaaggttgtccgtgtgagaatgcctactctgggttaatccatggggattgttccttaggcatacatttggctgagcgggcaccaaggtggatatggactggcaggcagtaactctgcaacaagattaggttctctttttaaggaagccagaggcaagaagcccagcggctgcacctctcaggtcaggtggtggcagcacacagtattaggagcaatgctcactcaggcaccatgaataagggcagaggggtaggtaggaacagaaagcccttcgatgcattgctgttacctctgtgggaatttggggaaggaagggaaggagccaaaggtatttactctgattggtcacctgagtaaacgtggcatttaccaccttggtcactcatctatatatatttttggagtgaacaatagatgggtgcctgaatacaggggatgagaggctatggaatgtggaagggtgggagggcagcaccttcttccgctcttgacagggcaggaaggattagaacatcgctgcatccctcacaccctcaggtgcctcagccttggtagactggaattcaattcagaggcaggtgatcagagtagccatcaaatcacaagaggttcatataacagtcggtcaagactttgggacgttaaatacatgcttttctttaatttaataagacagggttgtgttgctttaacttatcaaattgcaagttgattcaaaaatagaaaaagtaaggaattatttgtgtaaaatggccaagattagacaactggtcgtctctttgtggagtaattcatagatcatgtaaaaaaaatccattttttttaagagatagaggcttgctctctgtcacccaggctggagtgcagtggtgacatcatagctcactgcagccttaaactcctgggctccagcaatccacccacctcagcccacttttcaattttaaaatgagttattttgttttaaaagctactaattggctgtaaccagtagaaatattttcctactgttacaaataaaataacgaaattaatgaggccttttgggttttctctcccgtttaaactctccactcaaaggaaaatagcatcattttattttctcaatataaaagtaatgcgttactgatttaaaaacaaatgagcagaaaagtttaaataagacactcccacgatctatctccttttctaacatcttgctccacattttacaggggtgcagaagaaataggacattcatgacttgtgatggggggaggtatagagagagacagttggactgggactagagaagataaaaaattattcctcgaagagaagaaaaggccaacggacacgggagcagatacagcctctccctgtaaaccaaagaaaggcaaattcaccacaaagagaagctacttctagtctccggggttggcaaagaggaaaatgagtgacaggacctgatgtgtcagggaaggaaggggagggccggcttctgcggcgctgctgatgggagtggtaattggggtcctgatctcatggttgacgtggccctcacgtgagctggagccgacgcgtgcagacgtccttctaatcctagtcttcgtttggtccggttgcactcttcctatagcccagagggcgagagggcctgtggcctgggggaaggaggacgaggttctgcctggatcccagcaggtttgtgtgtggatgggcgttgccaggggatccctgcggcgcgggcagtgaaccgtggaggccgaagggg

SEQ ID NO: 44205 - DNA, 2300 bp, Homo sapien
ggtctggcatactgggagaatggtagtgagaagttatacatcggactaactggagaatataccaaaagggtggagatattttatactactgaggagaggtaggagtaaagtttttgtccttgaagcctggctaagtgttgtgaaagtgagttcttattgtaaagccatgtctgtgacaccaagtcatctgtctttattaagctttacatactccttagttttttctaatgtatatattcaaaacaaacaaaagccacttatacaactacctagcagccaaacactgaatgatggactgttgaatctgagagttctgttagtaagccttcataagtataattcacttgtctaggggaagttaataaagggtcatgaaaaaaaaatgaggtaaagatttagagagataagatgtgatattggtgagtttggactataaaaggggaagaccagaaagttgtgacatattgacttctgaatattcaccagcaaggcactaggactccctggcttgcctcctgaaagggcctcctccacacaggagcccctcactggggagcccctccctctggggtgtcatatttcaatgttctaagaggttgcctggagtgtctatatttagagtatgactcctcagcagggacaggtggatgcatgaggactaacttctgcatacttggtccctgagttttgggattattctgaggggcttgtactggtggctcaatgaagttgtaatagaaggcaggaaatgaaaagtcctctttttttctggcaactgcttgagatcctgtgcattgcccttccacttgtgaggggaaaaaatgacacagacatcaggggtgttgcactgattcccagtcacccacagaccctcaccaccatctccactggaaaatgctgaacactcaccactgctagggtagcataaaatacatgaatggcagacaacagagagatcgccaacagtgtcatgatggaaagaaaattacctctatcaagtctcattttcatcaataggataacaggaaattctctaatttctggaagatttataggttgcaccacaaacttcagaatagattgtaaataaagccctgtgaatgaaaggcaggctaatctgtggagtcactaatctgtaaagttcatctgaagatgtaagattcatctgaagttggggtctgcataaaatctgtcctttgaagccagagtgaaagtcacccagcaatcttctatgaagatctcagtcatctgacacctaacactatgagttcagccaggagaaagaaagggacaatagttcacttacttaaaatggtcaaaattagaacactgaccttctcggtatagattcatttatccatcaatttataaatcatgttgaaagcacaactggttttgtttctaagggtgtgtttttacattttaatatgttgtttgaaagctgctatttcctgtgcagtccgaagaaaatatgttcaacttgatacaaactaacttcatcaaatcaatgaggcctcctattaactgggaaatcttgcttatgttatatatatatatatctgtaaaaaaaaaaaaagatttgaattatttcttctccaagtgggaaaagctttattgtttttttccgattacaaaatagtgtagttcaagtcaataaaaaagaaaggacaaaatataacttaaatgttatcaaaatactaattaaaatctcaccactgcctggacttccgtttctgccccctcacccaatgttggtgtagagactgaacacggaaaagtgtagaaatttaagaaaggggctgcagaagtttcagagccaaggaaaggatgagacaattccccaagaagtgtaaatgaagggtagactcaggaaaagatgctgccccttcctaaagatgctgccccttcctggaattagagaaacataaattcaaacaccagaaagacagggccacttctggtttctggtattgttacagaggaaaaaagtgacagggcccactgtgggggttgagggggagatacaaggcaggctggcgcctgccgcactgcttgtgggagtggaaattgggggccagagcgcactggtgacgtggccgtcacgtgaccaagagccgcctagagcacaagtcctgctagtcgcctccgtctgggtaccagccccctattactctgcaggcgtgtgaagaaagaaggaaactagctcggaccgtgcaggtcggtgcgagggtgggcgctgcttgagaggaggtatgggtggaagagggccaagaacgccacagatccgagttcaggccgat

SEQ ID NO: 44206 - DNA, 2300 bp, Homo sapien
ctaaacattagaaaggtatggttatgaaatggtgatgcacaaggttgtcctttgagccaaggccatctggcttctcccacaggattcccccaaggttgcgtctacagttcagggtctcttcctcagtattgcatgaccaaatcctgattttgtttgtatgctgagaagaattgcctctggatgcctcaaggaaagactcccattcatagagacttatatataaacagatctgaatgctcaaacctagggatctctgcattctctccccataagtagaccacaagggaagctgtttcaacaggagtgacaactgaataatttgccctcagaaatacaattgtcagggggtactggaggtttccgtcagtcttacctgcctattctttccctgtagacaagctactacttgggaaaccacaaccttagaaggttgtttggtgagcctgcaatcagagcaagggtatttgttcattttaagaagggggtttcagctgaggacgcatgaagtactattacacatcatgggcatgactctgccagagaaagtgaaatgttccattctccttagccaacactttttctcctccaggcagtgcttgggtgggaaataccaacactttcttctgactgtccttttcatatattcctatgcttgaataagcccctttgctacacatgatctttctctaaacacaggatcatatagttgatttggtttctgtttactaaataaatttcaatcacattctagtactgcctcccagaagttacacagatatgaattttcctgggggtttgcctgttctcaacttcctcagtctcttgatttactcccatattgtctgtgtattttaaaagttatactcaaataataaccttttattcaaactattagtgaatatctcactgaagaccctatgttctgaaaagctatattactttttgtattgttacctgtttttgtgttgtgctttagttaaggtggtttggttgcaagcaactgaaatcaaatctggttaacttaaataatgaggggatgtaattattttattccttttcctactttaaaaaaggtaaatcattgatgatgggtgaattattcagtttatcaaaccagtaagtaaaatagtttcatactaattgctaggtcccagtttcagccaattttgtcttggtctgtgttcctctaatacttatttcatttatagatgatattctctattttgcccaagcatattttgtaatgttctttttatgcacactcattttttcagtgtgcatgctttatctcacagatacctactgtgcacttatgttttctccttagttttttttttttctgcgttctggcttttgtgggtttaatgcctcctccttgctaatgggtgcaggtgaaagtctgtagctctcctattcagaagactggtctagtcagaagacttacgtattgccagacacactgattagctcactcagggctgtgctgtgtgctaggccccagaagacattaagattgctttgagtgaagtgtgtaacactctccaccaagtgagaaaatgtgggacttttggaggccatcacccaacatcattcttcagcctccactcatttttttctaaaatggaaatagctttatagtatttttttttctcataaaaagaatgcaggctgggggtgggggaggacggaacaaaaataacaaagtattaagaaagtaaaaaccacactctcattccagattttcttttctgatcgcttgttcctttcagatctgggactagatttcagaggaaatggtagactttcatagctcgggggaggggaggtggagggagaggctgctgtcccaggagcctagggaaggaagaggcaatttttcataaaagtacaagtggcccatagccccaggggaagatgccgtccctttctggtaatcggtggaagggaaacacaactacaaggtgatgagattatcgaagaagaaagagtaataaggcctggtgtgggggagggaaaggaggggggcgggccctcttctgccgcactgctggtgggaggggaaattggggacccgagttggtggatgacgtagccctcacgtgaccaagagctgacgtgtgcagaagtccttcttgtcctggtcgttgttcccgtctgagtaccagctccccactgccctgagggcgggccggcctgcggcggagggaaaaaggaagaggagaaggaaattgtcccgaatccctgcaggtcagtacctggaagattccataaagtcggggtgcttgagggcgtagggccga

SEQ ID NO: 44207 - DNA, 2300 bp, Homo sapien
aggacaagacaggatcatttatttatgcaacttaaaagctgtcccagaaggagaaaaaagtagcgtattatttgtccaaaataaacaagattgaagaactgaacatctctctgtggatcaatttacagatcacatggaaataggcttatcttattgagaaatattccattttagatgttcaaataccttagcatattttaaaaactatttcctatgtgaccaaaagaattcatgttctattcggtaaaaattaaccaaaattaacggtgctttccaatggacgcaggaaaccttttttctttacaaaatatgcccaccctttttttgttgctacttcccacattgaattcttgttttactgaattttcttactataaaaataaagcatgatgatagttttgaaaacaaaacagaagtatttgagaagtacagaccccactcccactccttgtctcctttctgacactctgccccttaactatactggaacagggagtcaactgcaaggaaaatcctggggactaggggctgaggaactagaggtggagagatggaagagtgtccagtagcccaggaaaggatgaaacaattccccaacaaaaaagtaaaaattttcagtagccctccgagaagatgcagcccctcccaggtaaccagagaaaggcaaattgtgaaagcagggagaaggggctactttaggcctccaggactacaaagacaaaaaaatgagtgacaggacctgatgtggtggggtgagatgggaatggaagtaaaggagggggctcgtactcttggtgggagtggaaattggggacccaagcttactggcgatgcagccctcacgtgaccaggagctgacgtgggcaaaggtacttaaagccctgaccgtcgttctccgtcctcctctgggtaccaactctattgcgcagctcgctgccgtgcgtttaacccaggcgaggaggaggaggagaaaattcccccagattcgggcaggtgggtgtgagggtgggcacagtctgggacccctgaatagggtaatctagggatgcgggagtcggaggccgcgggtgcctcggtctcccccactcctggccggctttccagacctgaggtgctcaaacgcggctcattttggtgggcggtggggaaagggggagggggaaacgaaaagacttttgatagactttacgaagaatccgcttacttcctttccagccagtgttttttggttttgtttataatattcaggcccgcaccccacattccgtcctgttttgagaggaggagggaagagaaataaacgtggcagcgcatagaaggccagcagggaggttgggaaagggtaaccaggaggcgggggtggggcatgcaatttggtaacaatctgggcggcacactcccaccctgactttccccaccaccgccccggcaccctcccatcccccagccgaccctctgtgatttgggagtgctgggaaatgggtgtaccagctgctgttggagaggtggcgggtttggcgctgtctgggcttcacgggaggtgggggggaaggggcggaccctgagagaatctggtattaaaccgccttgttaactcgcagactgctttccagacacctccggcccacacagccgttcaccccccgtcttttcagtcctggaaaaggaattcgggtatgcaggcgggagaaatggcggttgttggggggatttgtgggaagtgggaggtagagcccatagcagagaaatcgtggaaaatctcgaccctgaacccgaaaaggcagacgttgaggcccctcttctgcaggctaacgctaggcctaggggctggggagcgaaagatgggtgatcctgggaggggaacactgaattgtttggcaggagtcccccataccgcgtcccatccagcttttgctgcaccctcgccccgctcccctcccgcttcgttgcaggagaaggggtgtggcggtgtgtcctggagaaatggcggacgggggcggggcaaagcggaaggagggattgagtgcctggggagcctgcgcaggaggaggattgaggtgggaggggtggggtgagaagagttgaaggaattgagaggtagaatcatttgacattctgatgtgcaaacacgaaaaggcagttactgagacccttgtcctggatgctgatccatccaccaggctttcattgtctaacgtcgacagtctatatttctgctcttcagtctgtccttaggatgaagctctaactgaactgaagtaaggagaaacagccttgaatctttggagggtcagtgctgg

SEQ ID NO: 44208 - DNA, 2300 bp, Homo sapien
agatcacaaaaatttggaacttgattaataagcacaaacgcactactaatgtgtctaaaaagaaagttggaaactgttgacagtggctgggagtggaaaagataacaaaagtttctttccctgtatactttatatatttccttattgttttgaatatttttaaccactaatatataatacttgtattaccagaacaaaatacaagattcctaatctggactattatatatatataacacagaccctcttggccattgtattagctcttaattttttgcagggcgggggttacagaccccttgagaaactgatgaggtcagtgatctctgttcctgaaaaaaatgcatttaaccacacatataatcccaaacaaagctttgcaggtgaatgcaatttcaggtggtctacagagttgaccgggtgagaacacctactctgggttcatcagtggggattgttccctgggcatacatttggttgagagggcaccaaggtggatgtgtactggcaggcagtaaccttgcaggaaggctagactcttcctaggtcccctggagctaaggaggcagaagtgagaggcccaggaggatgcatctcttaggccaggtggtagtagcagacagtgtttggagcaaggttcactggtaaccacgaataaggacagacagcagtcaggcctgggaacttcccccaacaatcactttttgtgtgatcacaaaaacctttttgtgaaatcacaggtttcacaaatcgtcagctgcagggtcaggtaagaacagcaatcctttctatgcatcaatgggtttcctctgggaacttgggggagggacggaaagagccaaagacatttaaccaggtctgcatcttggtcacttgtctggatatattttgggtgtgagcaactgagccaggtacctgaatgcaggagatgagcggctctggcatatgggagggagtagagagacagcatctccctcctcctcctgacagggcagggaggatttgaccactctgcacccaccacactcagtttccttggcctcacagctcttccttttgcccagagttgaatcattaactggaacctaatccgaagacaggtgtttaaaactgtcatggttacagccatcaaattacaggaggttcacacacagcagtcagcaatggtttgggaatattaaataaatgtgtttctctaacaggacaagacaggatcatttatttatgcaacttaaaagctgtcccagaaggagaaaaaagtagcgtattatttgtccaaaataaacaagattgaagaactgaacatctctctgtggatcaatttacagatcacatggaaataggcttatcttattgagaaatattccattttagatgttcaaataccttagcatattttaaaaactatttcctatgtgaccaaaagaattcatgttctattcggtaaaaattaaccaaaattaacggtgctttccaatggacgcaggaaaccttttttctttacaaaatatgcccaccctttttttgttgctacttcccacattgaattcttgttttactgaattttcttactataaaaataaagcatgatgatagttttgaaaacaaaacagaagtatttgagaagtacagaccccactcccactccttgtctcctttctgacactctgccccttaactatactggaacagggagtcaactgcaaggaaaatcctggggactaggggctgaggaactagaggtggagagatggaagagtgtccagtagcccaggaaaggatgaaacaattccccaacaaaaaagtaaaaattttcagtagccctccgagaagatgcagcccctcccaggtaaccagagaaaggcaaattgtgaaagcagggagaaggggctactttaggcctccaggactacaaagacaaaaaaatgagtgacaggacctgatgtggtggggtgagatgggaatggaagtaaaggagggggctcgtactcttggtgggagtggaaattggggacccaagcttactggcgatgcagccctcacgtgaccaggagctgacgtgggcaaaggtacttaaagccctgaccgtcgttctccgtcctcctctgggtaccaactctattgcgcagctcgctgccgtgcgtttaacccaggcgaggaggaggaggagaaaattcccccagattcgggcaggtgggtgtgagggtgggcacagtctgggacccctgaatagggtaatctagggatgcgggagtcggaggccgcgggtgcctcggtctcccccactcctggccggcttt

SEQ ID NO: 44209 - DNA, 2300 bp, Homo sapien
acttgaatgctgtcaggtggtcatcactaactaccagcatgtggaagtctcagcccccaaagtcctatatatggcctactatttagggtcatgtaaatgctatggtcaagtacatccctccccataacaaacacagtgtcaggctcagctctctcacgtgaagattgtgagcagctgaactctgcagatccatgtgtcggcagccatatggctcctaccatcacgcagcaggcaaagcccttgcagtcatgtgagcaccagagctatactatggctattgtacatgtgaatcctatggtcacgtgccacactatcaccatgtggctcaacccttttagtcacataaaaattgaagactcctgaaccctgaggtcacttgattcttacaatcatgtagctcctgccaggcaagcacctagcagccaggtagggccccacacttacgcgttacacggatcctggagtcatgtgaccttccctgtggtcatgcaccagaccctgccgattaagtattgtagccatgtttggccttctgaagagtctgagctacaggtgcagaagatctttagaattatgatcagagctctcgctaaggctgatagttgatcagactctggctgcaatcccaacttttccaccaactcctatattctgccacactaggtggtattttggtattctggctagtactagatgattactcatagaattgaactttaaggggtggccaagtggcctccaaatagcagagagcctgagagggggttaagtggagacagagggctttctgaatctggccaaacttttgtatgcctggcagtgtgtgtgtgtgtgtgtgtgtgtgtatctgtcttgatcctgaactcataggagctattgttggtagaaagtgaagtggaggagtagaaagcactggggcagaaggtgcggctaagggagttggcggtgaggtgggttagggaagacagcatggattcatggacttctttttttttttttttttttttattatactctaagttttagggtacatgtgcacattgtgcaggttagttacatatgtatacatgtgccatgctggtgcgctgcacccactaacgtgtcatctagcattaggtatatctcccaatgctatccctcccccctcccccgaccccaccacagtccccagagtgtgatattccccttcctgtgtccatgtgatctcattgttcaattcccacctatgagtgagaatatgcggtgtttggttttttgttcttgcgatagtttactgagaggatgtggagaaataggaacacttttacactgttggtgggactgtaaactagttcaaccattgtggattcatggacttctaagtcatctcagccacagggctgtagagcctaggtgggaaaccccctcccgcaacacacactaaaggccttcctgattcaatgctggatgaatcagcatgatgtcctttgctcttcctctgaccatgctgttattaaggacacttgagactccctagacgccagtttgtatagatgattcccaatacaatattaatttctatgtcttatttgattttgtaaagagggagggagaaagacttttaaaaaagaatttgatatattgataaaaatgtgaaagtagccatcaggtgaagactcgaaatttgttcttatgtttacttggaagtccgtttgttttcaaagtacatatggaataggatgccataatcttgttgtgcttgggatctctaaatagcttaaactagtccagccagacactattttcttctgcaccacaacccctcgctccaatttttctaacaattgctttttagactccttcttgaaaactctcacttttcctccatgtggaaaaaaatagtgaatcattttaaaaaaagatttaagcaaaattataggcgatattctcatttttaaaaattcatgaagatggtactaaatgaataaagttcttcaaataaaggattgcgtttacatttatggtagatttaactgttgtttgaaataaggttaaacttgagatattttatattacatgtagcttaaataatccattttatttttctctcatttcagcatttccaggtttgttctggaaaacactaggtctgagagacagcaacaacaaaagtatactctaccattaaagaaatgtaagacacacaaaactgagggtaaaaggatttccatataatagcaattttttagataatatgctgatatgaaacatgaatttcaaaaggaggggtagtttccccaacttatatggaaattgagtat

SEQ ID NO: 44210 - DNA, 2300 bp, Homo sapien
ctccctagtagcaggatttcaaccctggatcagttccaccctatacattttctacttctgcataaagcctactgagtgatgctgtggaaaattataaactatagagattgggtatgttttcagagtcttggtacctaacctctttggacctttagtcctacttaatctgtttccttttccttcactttccccttagcgacaattttaaacctatatcattcttcaagactctcttcccccgctacactccttctcttcacacttctcagacaagctcctttgtgatttcatcaagaaaaatttggccatcagatgtggattactaccaagtatcttggtttaactaaatcctcctgtaaccctgagttctcctttaactcctacattctccccttcccttcttaaccaagttatttttaaaatgtagtacactcttactgtctccacttattatttactcaactcactgccgttctttgggtgcttattccctcagccttcacaccaccagtctaccacctcactgtaactactactcacagtggcaaagtgacttctaaatttgtaagtccaatgaacatctttatttagctcctttgacatcactctctcctgttcattcttataatttgctgtcctttgctttggtggacttttcataggctcatctttctctaccatctttctttaaagaatggcattctccagggttttatcagtatgttgctattcctgtgcccacccatacattatcttcaggagatttcatccactctgattattttgactatccacccccgtgttctgacatctccaaaatctctctgacctatcttctgcctttcatactcctgtatataactgcctgttggacacctttacatgaaagttttgtagctatcttagaccctgtgttcaaacttacactattcaccattgcctactctcccacccattaaaacaacacatacatctgaagttccaatttcagttaatgggatcaccacccaaccacttaccaaattaggtttctgggaattattttagacttctctagattctttcctctccccaatccgtcacagtcattctgtcgctaacttttgccagttttaaagttaaatgttacaccaatctccctgcttctttctacccctactgagacccatctagtccatgtcctcattatgtcttgcttgatctccttacttctaggcttactcttctttaattaatcctttgtattgcagccacagaagagactcatctaaaacacacaattgaccaaccacgtcacttaatacataaaccacttcaaggtttcccaaagcacagaataaaaaatttaggctccttagcataacatataagtctttctttgatctgacccattttgcctcttcccatctctttctcttatgttttactctacaacaattccaaattttaagaagttcctgtaagcacgtctatgcttttttcatgaatttttgtacctaaaacactcttctcaactcttttcaggttaactattcatcatccctccaagtttagctaagacattatctcttccagtagcctttttcagacccccgtattatgctgagtgcccctgcttctttgtgctcgcatacctcttaaacatacctctcttacttttaccaagtgagactgaaattttttgttcatgtatctttctcacactggatttgtgaacaacttggctgtttcattcatcttgtatccctggcatctaacctgatgcttggtgccacataggtattcagtatttgttaaaccaattatttggattcaacacattgtgctgatttctgtctctgccatacttgatattattttcatcccctggaatgcccttacctgctttcttacaaattcaaatcttttctgtcctcaaagatccatcacaacttctcttactgttctagttctttgtgttctccctttctctgatttctcataggctttactgttcattgacaattgatacaattatagcccctcaagggaattagcttctctgagacaaaggattatattttattctgcagtatccttcttagtgctttatatggtaatgagggcataattttttctcaattcatatttgcaaattgtttattgagagtcagtgttgtatagagggataaacatagatttggagatacagtcacttgccaagttgcaccgcagattcctctggtataaaatgaaaataatgtgactctacaggattgaataataattaactgaagtagtatatatagtacccatcacag

SEQ ID NO: 44211 - DNA, 2300 bp, Homo sapien
agatgtagcacagaagaaggtgaaattaactctaaggagagacagaacaggttacttggtgaggtgatgtgttgtctgggtttctaagggtgtataggatttcattaggcaagtgcctaatgtgggggaaaaggtgtttcaggaagagagaagaacatatatagtaacattacatcatgaaataacatggtcttcacaggaatctttttttttttttgagatggagtctcgctttgtcgcccaggctggagtgcagtggcacaatctcgacttactgcaagctctgcctcccaggttcaagccattctcctgcctcagcctcctgagtagctgggactacaggcgccccccaccatgcccagctaatttttttgtatttttagtagagacagggtttcattgtgttagccaggatggtctcgatctcctgacctcgtgatccacccgcctcggcctcccaaagtgctgggattacaggcgtgaaccaccgcgcctggcggtcttcacaggaatctaagaagatttagggattgctaaatcaaagtaaaagcagaggggagagatggggacagtggaaagagatgaggtcaaagaggtgaatggggagactaacagggcaaaactgtgtcttttgactttgtccaataagcactggacagccagtgacgactggcaacaacttggtaatagattggagggattgagatcagaggaaagaagaccagtggggtggatgccatacgtctgaccatatatcatgaggacttgaaatacagcaacggatctaagactggaaaggagagaatacttaagggagacttgcacaaaggcaccaggaggtgtgcccatcaataaggaaaagggtgagatatcctacagcatcgacagtgcataactacagctacaagcaacaacatagatgaatcttagaatgttacgtgaaagaaacaagtcccaggccaagcatggtggctccttcctgtaatcccagctactccagaggctgaggtaagagtattgcttgagggaaaaaaaagcagaaacaagtcccagaatgctacctagaaaaagatataaatatttgtgaaaattgaaaacaatcaaaactaaacaacactatttaggcacatatctatgtgataagaatatatgttaaaatgcaaagaaataataaatataaatcaggatattggtctctttgagaggagaggttggggggacaagatgagatttaagtgatcagtaatattctagtacttctattgggtgctgaattcacaggaagttattgtaattaagatgggcagatcgatagataggcagtcctttaagaggccacggaaacaatgtgtcagaatgaaagcttctgttctattctctgtactaagtgctttaagaaagccaggggccgggcgtggtggctcacgcctgtaatcccagcactttgggaggccgagacaggtggatcatgaggtcaggaattcaagactagcctggctaacatagtgaaaccccatctctactaaaaatacaaaaattagctgggcatggtggcacatgcctgtaatcccagctactcgggacactgaggcaaaattgcttgaaccaggacccgggaggcagaggtagcagtgagtgagatcgcaccactgcactccagcctgggctacagggcgagactctccctcaaaaaaaaaaaaaaaaaaaaaaaaaaagaaagagaaaaaaaaagccaggtgaagatatatttcagagatattttggaggtgagatcaatagtttccagacattttttcctcttaaattggttttagattagatctccaaagaagcctcactgtgcgaggcccacgtgctttcacatcccgcgctttttgccctttgcccttggccgtcgttgcttcccctccaaagggaggtggggtgacgcaaggcagtgggggagggggaaacggccggcgggcttaaagctctccgattggtggactgaggagcgagaacgaggctcgagctgaagcgttaaaaagaggaacaaagggggtggggctaacggaaggcggggctaaaggagcttaacggaatcgagacgcaagtgcaattgtccgcgcgcctcgctgcgatggcggcggcgccgagcacagtcaccccgctggcggcggagtcttcccctcaggaagctaccgtctctgccgcctcctcctcctcctacaccgcctgcgcggcagcggcggcggcggcggcggcggcggcagtaattgttcctgcctcctccgccacctccgcccctgcctgcccgcctg

SEQ ID NO: 44212 - DNA, 2300 bp, Homo sapien
ggatacattttttgacatgctactgtattcagtttgccactattttgttgaggatttttgcatccatgttaattaaggatattggcctgaagtttcctttttgtgtgtgtgtctctgccaggtgttggtatcacttagtgattttatagtgttaatatatgtctatatttattttactgatgggaatgatacttttattctgcaataagaaacaaaaggtctctagtgaatggtatgttcagtaatgttacttttctaagaaagtggatgacaaacatttaacttaaaatatgtttaatcaacatatactatgcatcaagagaactgtcattatatcttcttccaaaggtagtaattacttgaggaacaatgtgtcaatttattacatgcaaatgcaaaagttgtgttgacttctcattttgtgaacagatcttttaatttagataaaatgacatttcttcaaatttaatgatactaattttgaatcccacatttttgtgtatatgttttaaaagaggagaaatagttgttaatactttggctccattagcaaaataacttagcaaatagttactgaagacagcttaaaatcactataattagatgattaaaacagaaaatcagttcttttcaactgatttgatattattttcatcaaattcttgaataattataataattttatggaagtttatactgatgaaattgaaacacctagcctcgataattcaggaaaaaaattcaacattgaggacagaattattggtgatgtggtgataatgacgaatacacatattgatagagcaaaatactgtaggaagatcaaggttttactaaatgaagaaagatgtgtagcagaaatataatcagaattgcttgtgtaacacacataattcataatcctgtaatcatgataaggtattttgcaaatcaaaataaaaatagttgttgcccagatatacacaagacatacacatacatatgtacacacatatacatctatacatatatgtgtgtataaataaacatgtgtatatatacatatacatgtcactatactgtagaagctaaaatattggtgattcttagtttttgtgggtggtggcttcacgaatgtgaaagaaaaggaaagaaaaaaaagacaaaggatgggaaggggaggaaataataggacgggaaagaaaagggaaggaagagggacaagcagggatcgatgataagggtgtgttgtaaaccaaggactatgatgaatttgtgcatctgaaattcatatttaaaatgttttaatgctttcttttctacctgtctgacattctctctctatgaaaactgatcaaatgttggaaggtaagtttcaagtgtggagagagaccaagggagatggcaagaaggaagttggtaaatcaatttggggtacacgggctttggggtccctcagggacactcaggcggtgatgtccaatagacagttggcaaagctgatatgagacacggagaagggaacagcctggagctgtagatctgggagtcatcggtgtttactggaaatgaatgagatcacacagggagagacaacttgaggactgaggagagaggaggcccaggacagaaccccaggaacaccgccactcaaggtggcagctcagcttcctggcaggcaccactaccccccgggctctggagtcaggcagagccggtattgaaagtgggctgtggagttctggggctgagcgctcttggcaaagtccggtacctctatgatcagctgtcacacctggcgataatgggcatcagagagatatgccttgcgaggatgctgtgagctgcgtcaggtaaagcacctagggtcagaaagccacctctcctcctcttctccgcgaccccactttgctacacaaacgcaccgagactccgaccgtccccagcctccggtccctcagggatggaaggtgaggtatgtcaggaaagagaggggggcccagctccaaggtgaggtgtgtcaggcaagagcgggggcagagctccggtgacgcggtgctcacgtgacccgcccggcgcctacgtgggcaccagcccccgcgcccgcccgccagcccgcccagcggtcgggtccgggcgcccgcgcagaatcagctgtctgagctgcccaggcggcgggggagcagcgagcgggcttcagcgagccgcaggaggcacaggcctgtcctgggtccccgcaggtcagtgtgaaggcgtgcgctgccggcggaccctgggacaggggtggagggggctggcagtaggattggggagggggcgga

SEQ ID NO: 44213 - DNA, 2300 bp, Homo sapien
agtttatactgatgaaattgaaacacctagcctcgataattcaggaaaaaaattcaacattgaggacagaattattggtgatgtggtgataatgacgaatacacatattgatagagcaaaatactgtaggaagatcaaggttttactaaatgaagaaagatgtgtagcagaaatataatcagaattgcttgtgtaacacacataattcataatcctgtaatcatgataaggtattttgcaaatcaaaataaaaatagttgttgcccagatatacacaagacatacacatacatatgtacacacatatacatctatacatatatgtgtgtataaataaacatgtgtatatatacatatacatgtcactatactgtagaagctaaaatattggtgattcttagtttttgtgggtggtggcttcacgaatgtgaaagaaaaggaaagaaaaaaaagacaaaggatgggaaggggaggaaataataggacgggaaagaaaagggaaggaagagggacaagcagggatcgatgataagggtgtgttgtaaaccaaggactatgatgaatttgtgcatctgaaattcatatttaaaatgttttaatgctttcttttctacctgtctgacattctctctctatgaaaactgatcaaatgttggaaggtaagtttcaagtgtggagagagaccaagggagatggcaagaaggaagttggtaaatcaatttggggtacacgggctttggggtccctcagggacactcaggcggtgatgtccaatagacagttggcaaagctgatatgagacacggagaagggaacagcctggagctgtagatctgggagtcatcggtgtttactggaaatgaatgagatcacacagggagagacaacttgaggactgaggagagaggaggcccaggacagaaccccaggaacaccgccactcaaggtggcagctcagcttcctggcaggcaccactaccccccgggctctggagtcaggcagagccggtattgaaagtgggctgtggagttctggggctgagcgctcttggcaaagtccggtacctctatgatcagctgtcacacctggcgataatgggcatcagagagatatgccttgcgaggatgctgtgagctgcgtcaggtaaagcacctagggtcagaaagccacctctcctcctcttctccgcgaccccactttgctacacaaacgcaccgagactccgaccgtccccagcctccggtccctcagggatggaaggtgaggtatgtcaggaaagagaggggggcccagctccaaggtgaggtgtgtcaggcaagagcgggggcagagctccggtgacgcggtgctcacgtgacccgcccggcgcctacgtgggcaccagcccccgcgcccgcccgccagcccgcccagcggtcgggtccgggcgcccgcgcagaatcagctgtctgagctgcccaggcggcgggggagcagcgagcgggcttcagcgagccgcaggaggcacaggcctgtcctgggtccccgcaggtcagtgtgaaggcgtgcgctgccggcggaccctgggacaggggtggagggggctggcagtaggattggggagggggcggagaagggatccggtagattggggaggagggggatgcggagtcgcgggggcgggggcagtggagggagaacccccgaagcaagcctggctcgccttctcgacgcccccttgcactgagtcctccatccattttagtgctggaaatggggggtgggggtagcgaccccgcagtgcgacagtgaaacgtagacatattctggaaataaccccttctcacaatctacacccatggaaacacttgatctccgcaaaaatgaggtggcgctggggcaggttgcctccggggaagggggacacagagacaaacgcagtttggaaagcatcctggtttggtgcccgaggcctggaaagaaatggcggctggggtgcgggggaggtaggggaggaaaacggtgggtaagcagggcctggactcaggaaagggaaccgagtccctgtgagcccgctaagcgcgcagcccctgcccctgtctcctgtctgtccgcaggtctgcgcgtctgttgttcccagcgctctgagaggcctgaaaaggaagagcaacctgtccagaatccccgcaggtccgtgaaagcagggggctgcatggacaggggcccacaagggttgagagtgtggagggcacagtcagggccgaattggggcccctgcccatccccttacctacatgaacacacaccttaccaggctgaa

SEQ ID NO: 44214 - DNA, 2300 bp, Homo sapien
acaggtgtgagccaccgcgccaggccaggaaattatttttttatttattgtttttcttttgttggctttaggtacttagagtaacggcatccaaacaccagctgattaataagctaataaaacacagacttcagtggccacacatgacaaagaatacataatttgctaaaatactttaaaaagtcactaagtaaacaataacccacgagagagtaacaacaaaacccaaggaagagggaaaatctaatttccagagtcaacatattagaatcaaaatatacagatttcaacaaaactttgtgaggcatataaggaaataagaaaacatagcccatacacaggaaagaaataattagatactatcatgaaaaagcccgtgtattagaatatctagaaaatatttttaatcaactgtcttatatatgctcgaagaactaaaggaaatcgtaaacaaaggactaaagaaaaagagaagaatgtctcagcaaatacacaatatcagtaaagatgtaaaaatacaaagagatgtagaaattataaaataaatagaaattctttatttgaaaagtacaataactaaaagtcactagaggggtacaacagtaggtttgggcaggcaaaagaatcagtgaacttaaaataggtcaattgagattattcagtccgaggagcagaaaaataaaagtaatgtgaaaaatgaacagagcacacctatgcatgatgggggttcaacaaggagagaaacagaatagagaagaaagaattttcaaaggaaaaatgactgcaaattactcaaacttgaggaaagacactaatcgatgtatccaagaagttcaatacactccaaacaggataatctgaaagagatccaaacaaaaacatgttataagtatcttgtcaaaacccaaatatatgacactacactgtagtgacaagaatattaaaaattttctagttctttgggttcagtggtggtttcacaaatgtgaaagagaaaaacaatggaaggaaagtaaacagttattagcaattttctagttctttgggtttagtggtggtttcacaaatgtgaaagagaaaaacaatggaacgaaagtaaacagtgggggaaaagaagggaaagcaggggagagaagagtagtcaatgagaagagcatgttgtgaaccaagggttatgatgaatttgtggatctgcagttcatattaaaaacgtttgaatgctttcctttctagctgtctgacattctctttctatgaaaactggtcaactgttggaaggtaactttcaagtgtggagaaaggccaatggagattataagaaggaagttggtaaatcaatttggggtacatgggcttttgaaatcaatttgtggtacagggtttttacataccgtgtccctcagggatactcaggcggtgatgtccaataaacagttggcaaagctgatatgagacacggagaagggaacagcctggagctgtagatctgggagtcatcggtgtttactggaaatgaatgagatcacacagggagagacaacttgaggactgaggagagaggaggcccaggacagaaccccaggaacaccgccactcaaggtggcagctcagcttcctggcaggcaccactaccccccgggctctggagtcaggcagagccggtattgaaagtgggctgtggagttctggggctaagcgctcttggcaaagtcgggtaccctctctgatcagctgtcacacctggcgataatgggcatcagagagagatgccttgcgaggatgctgtgagctgcgtcaggtaaagcacctgagatcagaaagccaccccctcctcctcttcttcttgatgacccccactcctttgttacacacaccctctcccaccttccgcaacctcctggtccctcggggatggatggtgaggtgggcgggaagggggtggtggtggcctagctcccgtgacgcggtgctcacgtgagtgaccaggcgcctacgtgggcaccagcccccgcgcccgcccgcccgcccagcggtccggtccaggcgcccgcgcagaatcagctgtctgagctgcccaggcggcgggggagcagcgagcgggcttcagcgagccgcaggaggcacaggcctgtcctgggtccccgcaggtcagtgtgaaggcgtgcgctgccggcggaccctgggacaggggtggagggggctggcagtaggattggggagggggcggagaagggatccggtagattggggaggagggggatgctgagcgggccggggcgggggcaggggagggagcaccc

SEQ ID NO: 44215 - DNA, 2300 bp, Homo sapien
ataagaagaagaagaagaagaagaagaagaagaagaagaagaagaagaagaagaaaatgaatatgtgtgtattatctttgtttttgaagggagatatttggactgatttagagtaaaatgtgaatagtatatttcctgtagcggggataaaactgatattatccttctaccttacctgtgttttctaattttgctgagggctttttctggtaccttgggaacttgctcagcccaggtgtaggacaacttaaaagtgccagagattttaacatcctcagcgtgacatccaccaatagagggccaagtctgtagaaaaataccccaacttctcatcactagttaggataattctgaggagcactctaaatcatttctgagacttggagggtccccagcagatttgagccagttgccttttggtcttgtcaggatctggtgctgtatttaaaacaacttttccattctattatataaaaaataacatgctaagttctatttttaatggtttaatgtcttttatgcaaacatttagtgtctatttttaagtgtatgagaatgataaggcacttcattgtttttgaaaatagtcaattatcccgatacaatttcttcaatctaacctttccccactgattcaaaatatttcaatgcatttactagcattttttccatatttgggtttgataattgaatttcttttctggttcatttgttctaaatttattctggtacactattatcttaacattgtaatttcacaatactttttaaacttttattttaagttcaggaatacatgtgcagctttgttatataggtaaactgatcctctccctcctcccatcctccaccctcctgtaggccccagtgttgttcccctctatgtgtccatcacaatacattttcatctgtcagggtagcttccccaaattattgtcctgaatcatcagggctaggtgttattgtaaattgtggttacactaatacaatttagaggagatcatcagtttgtcacaggttctcaagacatgaaaatccaccagagaggctctattagactcaatgcatcatttcacggaaggacatgtagagatccttcacgagaaaatcacttctttccttctttccttcctcttttcttttcttttcttcttcctttctttctctttctttctttctttccttctttctttctttccttctttctttcttgacagagtctcactctatcgcccaggcttggtgtgcaatggtgctacctcggctcactacaacctctgccgcccaggttcaagcaattctcctgcctcagcctcccgagtagctgggattacaggcgcctgccaccacgcccagctactttttgtatttttagtagagacggggtttcaccatcttggccaggctggtcttgaactactgaccccgtgatccacccacctcggcctcccaaagtgctaggatcacaggcacgagccaccgctcccggccttatttcaaagtccttaaaggaggcaggggaatgctttctggaaggtttatatttataatatgattcagcaggagaaacagattgccatgtttttacaactcgaatcctgttttttcaactgaaaataattgtattgtctagttataaaaacaacaacaaaatgaatgcatgctgatgaaaaataaaaggaacccccttcccaaataaacaaacaaaaaggaaagtagttgaagtgaaaaaaaaatttgaataccacttcctgcctattttccagacttcctagcctctcgctccccaccccttctccgggttccaatctgggaccaagccctacaagactgttagggctttacttgctggacgtgaaggggagagaagtgtgcgtttaggtgtatagaagaggaagaagcgattttttaaaagctccagcagaaaccagagcaagccaaatacaaaatattatgacccgtttggtcgtggggatcgctaaataaaaaaatagaggggtggatagtagcctgtggtagtggtggagaaagcacgaatgaagagaaaggtggccccgcccacagtcccgcccccaccctcctgccgcactgcgggtgtgaatggtaattggaaatctgagctcacagtgacgtgacccttaggagacccagagccaatgcgtggattagtccctcctcctagttgcagtctggtagttgtcgctggccgtgtgacggctcgctgttgccctgaaggcaggcgagccagctgcccaggaaaggtggaaagtggtagaagctgacccctgagccctggcagg

SEQ ID NO: 44216 - DNA, 2300 bp, Homo sapien
ggcagggtagcactgagttcaatgtgaagttccccagtcactgccttcttcttctcccaagtgtacagactctctgggctgcacagctgctgccaggatacgggggaggggtggcatcggcgatttaagactgactgtctctgtctgacctcttgaatgtctgttccaacaatatgaatttaaaaccaggcactgtgattgctcacctgacttttggttctcatgatgatgcttttctgtatgcagatagtggttgcaatttggtgttcctgcagggggtacacaaggtatagccttctattccaccatctctctctgttcctctagttggttcttgacaactcttgataatacgtattattaaatacagtatctgggccatccctaggcaaaatgtgatttgctgttttccactagttctctccctttatttttcccacacttctatttcccctcattacctctcccaggggatttcaatattaaaagacacttcaaaagactatttcactatttgaatgaagagctgatagaattttaggttatcactgcgtagagtttttttttttttttaacaatgcaattttgtgagaagatgaattggtgtcattctggaaggttttcttagaaagaaatacaatagaattctgatttttttaatgagaaatgaacttctggtatagtgaaacatatgccttatgaatgtataattttatgttcaaatcaagaaaaatatatttaaacatttatcctggggttgatatgagagcaatttgtttcacagctgatattactgaaggaaatactaggagaggatgaggagggaattcagatttagtattcattagtaaaataaactctttagctaagcgctaactttactagccaagtcccctcatatcctcctgtgcctggaagttaaggtggatttttcctaggctggaaagttcttggacctcttccccataactttcttcttcaaaatccccatgttgtgcaagatattcacacggtactgttgccactaacaaggcgaggattgtggtgagaatctggtcaaagtatagtcttgatttataaaagaaacaagttaatgtgttaagaaattaagtcagggtaagagagggatcaactagtatagtgtggaaatgtatatatgctggaaataggccaatccaggggtcctcatatcactgtggtgactggccagtggagtgacaaagtagactaggactgaagagtgagcaacatgaggccccttaggatcgtccgttccagtgccctcagtttacagatgagctccaaagctcacaattggattgcaatgaagaacatgccaagaattgagctgaaagaacccaaaccaaaatgtaggattcctctcaggcttatggtcttgcccctttaccacacagcttctgtggctagccctttaaaatgattcttgatttgcatatttgtaaaatgagagtttaacagttcatgtgtctctccttactttgtgtggaggattcacttatacaaaagataaaagaaaacccaaaacagacttctggaattttgtagccctgttggttcttcatttgtaggggctgtatgaacagcatgaagtgaaacaaataaacaacaaacgcttattttttccccctaaatagttatttaaatgctatttttgtttctggggcagtaaggataaaagctttgaacagttcgttcacgaggagcagggcttgagaagatgacttccaagctcctgaggggttccgagcctgggcgggagggtatggacatgaagcctccttacgtctatctcagcctcctgcctttgtcacccaatggtgaggctctgcttgcgtttcctgccgtcttggtttccaaggcaccctgggcaagtgataccaccccgctaccctggaaacggatcaccctttgttttcatgtttggactctcctatcttgtgtcacaggtaggggtgcgctccaggtggacctcataatctccatggttccgtcctactcctccctgatgatctcccctctcttcctggctacaatggtacttcccagaccaggttggggaggcagaggggcttcgctagcagacgcagaggcgaggccgccagtcgaggacgaggaggaggtgagggaccagggtcgcgagggctgtgggggataccctgctgcctgagtccaggccggcagagccccttcaggaaggtctggagcagtagctaaggagttagaaggtattccaggaccaatgaaaggtagccagagccgaggaagattcctttcctagc

SEQ ID NO: 44217 - DNA, 2300 bp, Homo sapien
ataacaatatataactcaattaaacaaattcttactgaaaccccactatggtctatgtgtttcagaatcccggagatgaataggcgagcccttgcccacaaggaacttgcatgcttgagtcaaaaggctatttcaagggaaccttaaagattccagatttgctattttatcctcacactttggagtaaaacaatctaaaaatatccttatcctttattaagaatgcctcatctccttgtggtggtgtgtatttcatatttcttatatcccacacatttaaaaccacattcttatttttattcatatttttacctcattctacctaaaaaatagtaatgactactactataactgatcccagtgaagccttgaatggtaattgtcctctagacagaaagaaataatactctctaagaaatgtagagactcagttctctgcccccccagaagacataatctgggatgcctttggcctaagagcatagttcattggagaaagtttgaggttctgaacagaacttggctcctttgatttcctttgttgggcagaccttgctatcactgctattaccatggcagaaccgcctaagaaatgagatagaagaagctctggacacagatctcctcaagcaggaagcagaacatggggccctggatgtccctcatctttctaactacattctcaatttgatggctctgctatgtgcaccggttcgagatgaagcgatacagaaactagagaccataagagatccagtgcagttactgaggtgagagtctagatgtgctgtcccccaaatctgccttagacactgtgccggagaactctgagccagccactgtggatatagcccctgtcttatctaactcttgtgtactgatgacctgactaacacaccttttctcctttctggattattggcttttattttccaaggacagtctctcggggttccttttgatgatctttagatcagttgggtctcctttatgtcatgatactgttaagacattaagttacagtaattctttctcctatagattgcaaattgccttttcccagatgttgtcctgtttgtcccaactcagaccttgtgaggggacaggaaagaggattatccgtgtttcacagctagaagaaccaggacccggaaaagtaaaatgatctgctcaatgagttagaaattcagtcacccacatcccagctacccacatataattgttaacaccttggtgattttcctttcactgactacccttttttcaaggtgacagactgactacaggcaaaagagctctcatctggttgttaaagtgtcaggaggtataactgtccttagttttgccatcaactcactctatggccttgggtcactggccacagtaccattattcataagttgaaataggactgtttgtttttaaggcttcttctgactctcaaatactctgcttttatggctccttgcttggattccacccttccagactagatttcctttaatagtgtaaatgttctgtttctccctacggcaggggcatcctccgtgttctgggcctaatgaaaatggacatggtgaactataccatccagagctttcgaccctacctgcaggaacattccatccagtatgaacaagctaaattccaggaactccttgataaacagcccagtatgtttaaaattcaagggcaggagaggggagatttgacctcaggtctgccttcttatagcaatagaggctattttctattttttgaatagaaagtttcttccttgggcaaggggtagggagaaggaatgtttctctaagatagaaagatctacaaaatcacttctttatagaccaagagtatgtctcagagccatcatctttaagccttggaattttaagatgcatattcccttctcgtcgtaggtctcctcgattataccacaaaatggctaaccaaagcagccacagacatcactacactatgtccgagttctcctgactcacctagctcctcctgcagcatggcgtgttcacttccaagcggggcaggtaacaattcagagccccccagtccaacaatggtgctataccaaggctacctgaacctcctcctctgggatcttgaaaacgtagaattcccagaggtagggatgtgtgtttgggcattgccttgttctatggtattcagtgcctccattcaaaccctcctcttctgatgggctgtccttcgctccctcaccagactctgctgatggacagaatccggctccaggaactggcattccagttgcaccagttaactgt

SEQ ID NO: 44218 - DNA, 2300 bp, Homo sapien
aactttgagtcagccatccagttcccctttccctaaagcctagcaaagaactgtgcctatactccccgaccccacctctgaggtaacaaagtgtggtgaattggtgcccccttttttattggaaatgttctcaggggggctagggtagaagttcagctcccacccccagccatctgtgaagaggcaaggtgaaccagcaatctagtttgctaggatggtatcagaacaggaatctgcacttatcaccttatgatatgatgggaccaccatcatatatgtggtctatcattgaacaaaaagtcattatgtggtgcatgactgaatatggactatcttaatgaaatgtcatcacagccttatgaggttaaattttttactattcccagtttaaagatggataataaaagcttggaagagtttacctggccaaggttatttagctacaaagtggtaatgccacggattcaatcctaagatacctgatgcccattaccccatctactgaaagatgacactgtactgcaaaaattaaaacagacatagctgatctgcttctttacctgtaattagagtaaaagaaaacaacaaaagaaaacaaaaacaacacagtgacatgctaactgtcatgaagaaaagtaccacatgtctgataaggtgatcagagatgtacactaagtaaggaaggtagctatagggatatctaaagccaggctgttacagaaaaacactcaacggtatgggagtatgcttgctgagctagtgttagagcaacaaaaaggaggctagtgtggctggagaaaaatccatttattcattcaaagtatccactgaagcaggcattgttataggcacttagggtacattaatgagcaatagacaaagatatttgcccttctggaatttttatttttccaccatgggagacagacaataaaaaacaaaaacagcatatgattaaaatatattgcattccagaagatgactgcgggggggaaaaatcaaatagggaagaagtggaatcaggagtgtgggctgagggttggacattcaaacaaatattggctgctttgcaattgatagtattattagatgggtggaagtcttctcctttgtgccgcctttgccaggcatcagtgtaaatgctctgttggcttcactgcagaggacaacacatttttcctatctttggtcaggactcagttccttctttaatatatcagagaaccagagacactaatatctgacagccttttgccatcaagtggccatgcgttttttaagtaagcatcccctgctacacgtccactaaatttgagcttttaactgtctgtgttgagacgtggcctggtagaaaccctcgctggggccaggcgcggtggctcacgcctgtaatcccagcactttgtgaggccgagtcgggcggattacgaggtcaagagagggacaccatcctggctaacatggtaaaaccccgtctccactgaaaatagaaaaaccagccgggcgtggtggcaggtgcctgtaatgccagctactcgggaggctgaggtaggagaattgcttgaacccgggaggcagaggttgcatgagatgggatcccgccagtgcactccagcctgggcaacagagcgagacgccgtctcaaaaaaaaaaaaaaaaaaaaaaaaaaaaagaaaagaaaagaaaagaaaaaaaaagaaagaaagaaagcaaagaaaccctggctggccagtgcccaggccatacacaatggcattgtgcctcacttttcacctaagacgaaatcagcgggtggggcaggcttataatcagaacacccctccctttccacctcacacactcccacccgcctgtcccacaatccttcctgcccctcccgctctcccacccttggtttctcgaaaccccttctccttccctgccccccgtcccccgagccccaggagggggaggggcaggaatctggctccgcctcccagtatggagatgattggtcaaaggaggtcacctgaccaagctgagccaattgaagtcctctccccactgctttgagaaggaaccgttaagacgctgggccccacccacaagattgcgtcttgtttgtggcaagattctgaggggaagtgtagctcccaggttggttccaagtcttcttccaattaggtaaattacaacaatatcttttccataaatttcctttcttttcttttttgcctttttttttttttttttttttttttgagacggagtttggctcttgttgcccaggctggggcgtaatgtcgcgatctcggctcacc

SEQ ID NO: 44219 - DNA, 2300 bp, Homo sapien
gtgacgttatttctgaagtaatgtgtgttctcaaaaatgactctgactcttcctgtgctccatatattgaccgtgtgcccttaaccctcactttaatctttgatttttttccctttcatttatggactttcatgaaaatgagttggtttctggacatcctccaaatgtcaccaataggggtctttgttgttgttgttgctgttgttgagtattgttatggactcataactttttaacatactgatgggctccaaaccgcggttaaaggattttgagtaaaggaatgacaagatttgacttatgccttaaaaaatcactctgcctcctgtgttgaaaatagatggtaggggagtcaagggcaaaagcaggacaacttggaaggcagcataatccaggagacagatgttggtgacctggccagggtaggtagcaatggagggggtgagaagtggccagactctggatatattttaaaggtagagccaagagaagatacatccatcctgatcggttggatgtagagtgtgagagaaagagagcactccagccccacttccaagttgtagggaccaagcatcaggaatgtctaggtcagatgctctgcccacatttaatttcacttctaatggcacacagggaaagtcccagcaatcgagaggagcaggactgtcctgacagcgggtcacacacagtgaaagcaatgatgccccctacagaagttcatctgaggcctggccataatcagtatattgcagagaggtcagcagtgaccgaaattttattcataagagtgccctgagacaaggtgtacattttgaaattggtcgaggtctgtttgatggtccaggagatggtctaccttcgtgaatgctgcaagacagtagagggggaaaaaacatacatgctctgtttttgttgttgggtacagtgtgttgggtacggtgttttatttatgtcatttagatcctgttactgtagtggttttcagtatctgctgattttctttccagtaattctgtcacttgcttaggaagagttgtctcttgggctgaaagcatttcgggctgggcaaaaagaaagcttgctctgggtatttcaaactgagtatttttgagggcaaggctggaggcaggagggcagcttgggaagctgttacatcggacccacctgtcattaaagctcgtactgcactggcaaagaggtatagcttgctgattgttcacagaatgcatttggggattggatttgggaggtgcgagagagcttgtctcccaggtgttggtgtggttgttagattagagaagcctgagagaaggcaagattaggaccccttccaggtgtgtggctggtgtctagtctaacccatggacacgcgcacctctgttctttataattcctgctccatttctcaggaggttcaacacagttgcttcctctcccaagattcctaccctgattgtgccacctgtgagataaggctcttgtatctggacaggcagaggagtttgttttctggggcttatgtggcgggttggcactttgctagccctaccatggagttagctcacgacgtggtacgtggtaagtggaccattgatgtgtctcaaacttgtctttttgttctcagttgcagaatgccatgaccatggtagcacttttcaaggaagaaagaaaggtgggagttctttccgggataattttgacaagaggagctgtcattatgaacatggtgggtatgagcgcccgccttcacactgccaggagaatgatggaagcgtggagatgagggatgtccacaaggaccaacaactaagacagtaagtgaccaggcagcctggtttgcacgtagcagcccccgggactgtgcaaccctttcattctctgtggtcttccttttcttctctcattagagaactgacgaatgctggaagtggaatagtggctgagcaatcctaattgtagccctggcgtcagtgagtggagcatgtataggagactttcttagatttaatggatacccgccttctctcctcttccccacagcactccttatagcatccgatgcgaaagaagaatgaaatggcatagtgaagacgaaatccgtattaccacgtggagaaatagaaaacctccggagagaaaaatgagtcagaacacacaggatggatacacaaggaactggtttaaggtcacagtgagtatcttggtggggtctgcattaggtggactattctggaacctgatagaaggaagaccacttaaaacaccctaagttgattatttggaggagagcttcggaa

SEQ ID NO: 44220 - DNA, 2300 bp, Homo sapien
gtgacgttatttctgaagtaatgtgtgttctcaaaaatgactctgactcttcctgtgctccatatattgaccgtgtgcccttaaccctcactttaatctttgatttttttccctttcatttatggactttcatgaaaatgagttggtttctggacatcctccaaatgtcaccaataggggtctttgttgttgttgttgctgttgttgagtattgttatggactcataactttttaacatactgatgggctccaaaccgcggttaaaggattttgagtaaaggaatgacaagatttgacttatgccttaaaaaatcactctgcctcctgtgttgaaaatagatggtaggggagtcaagggcaaaagcaggacaacttggaaggcagcataatccaggagacagatgttggtgacctggccagggtaggtagcaatggagggggtgagaagtggccagactctggatatattttaaaggtagagccaagagaagatacatccatcctgatcggttggatgtagagtgtgagagaaagagagcactccagccccacttccaagttgtagggaccaagcatcaggaatgtctaggtcagatgctctgcccacatttaatttcacttctaatggcacacagggaaagtcccagcaatcgagaggagcaggactgtcctgacagcgggtcacacacagtgaaagcaatgatgccccctacagaagttcatctgaggcctggccataatcagtatattgcagagaggtcagcagtgaccgaaattttattcataagagtgccctgagacaaggtgtacattttgaaattggtcgaggtctgtttgatggtccaggagatggtctaccttcgtgaatgctgcaagacagtagagggggaaaaaacatacatgctctgtttttgttgttgggtacagtgtgttgggtacggtgttttatttatgtcatttagatcctgttactgtagtggttttcagtatctgctgattttctttccagtaattctgtcacttgcttaggaagagttgtctcttgggctgaaagcatttcgggctgggcaaaaagaaagcttgctctgggtatttcaaactgagtatttttgagggcaaggctggaggcaggagggcagcttgggaagctgttacatcggacccacctgtcattaaagctcgtactgcactggcaaagaggtatagcttgctgattgttcacagaatgcatttggggattggatttgggaggtgcgagagagcttgtctcccaggtgttggtgtggttgttagattagagaagcctgagagaaggcaagattaggaccccttccaggtgtgtggctggtgtctagtctaacccatggacacgcgcacctctgttctttataattcctgctccatttctcaggaggttcaacacagttgcttcctctcccaagattcctaccctgattgtgccacctgtgagataaggctcttgtatctggacaggcagaggagtttgttttctggggcttatgtggcgggttggcactttgctagccctaccatggagttagctcacgacgtggtacgtggtaagtggaccattgatgtgtctcaaacttgtctttttgttctcagttgcagaatgccatgaccatggtagcacttttcaaggaagaaagaaaggtgggagttctttccgggataattttgacaagaggagctgtcattatgaacatggtgggtatgagcgcccgccttcacactgccaggagaatgatggaagcgtggagatgagggatgtccacaaggaccaacaactaagacagtaagtgaccaggcagcctggtttgcacgtagcagcccccgggactgtgcaaccctttcattctctgtggtcttccttttcttctctcattagagaactgacgaatgctggaagtggaatagtggctgagcagtcctaattgtagccctggcgtcagtgagtggagcatgtataggagactttcttagatttaatggatacccgccttctctcctcttccccacagcactccttatagcatccgatgcgaaagaagaatgaaatggcatagtgaagacgaaatccgtattaccacgtggagaaatagaaaacctccggagagaaaaatgagtcagaacacacaggatggatacacaaggaactggtttaaggtcacagtgagtatcttggtggggtctgcattaggtggactattctggaacctgatagaaggaagaccacttaaaacaccctaagttgattatttggaggagagcttcggaa

SEQ ID NO: 44221 - DNA, 2300 bp, Homo sapien
aactttgagtcagccatccagttcccctttccctaaagcctagcaaagaactgtgcctatactccccgaccccacctctgaggtaacaaagtgtggtgaattggtgcccccttttttattggaaatgttctcaggggggctagggtagaagttcagctcccacccccagccatctgtgaagaggcaaggtgaaccagcaatctagtttgctaggatggtatcagaacaggaatctgcacttatcaccttatgatatgatgggaccaccatcatatatgtggtctatcattgaacaaaaagtcattatgtggtgcatgactgaatatggactatcttaatgaaatgtcatcacagccttatgaggttaaattttttactattcccagtttaaagatggataataaaagcttggaagagtttacctggccaaggttatttagctacaaagtggtaatgccacggattcaatcctaagatacctgatgcccattaccccatctactgaaagatgacactgtactgcaaaaattaaaacagacatagctgatctgcttctttacctgtaattagagtaaaagaaaacaacaaaagaaaacaaaaacaacacagtgacatgctaactgtcatgaagaaaagtaccacatgtctgataaggtgatcagagatgtacactaagtaaggaaggtagctatagggatatctaaagccaggctgttacagaaaaacactcaacggtatgggagtatgcttgctgagctagtgttagagcaacaaaaaggaggctagtgtggctggagaaaaatccatttattcattcaaagtatccactgaagcaggcattgttataggcacttagggtacattaatgagcaatagacaaagatatttgcccttctggaatttttatttttccaccatgggagacagacaataaaaaacaaaaacagcatatgattaaaatatattgcattccagaagatgactgcgggggggaaaaatcaaatagggaagaagtggaatcaggagtgtgggctgagggttggacattcaaacaaatattggctgctttgcaattgatagtattattagatgggtggaagtcttctcctttgtgccgcctttgccaggcatcagtgtaaatgctctgttggcttcactgcagaggacaacacatttttcctatctttggtcaggactcagttccttctttaatatatcagagaaccagagacactaatatctgacagccttttgccatcaagtggccatgcgttttttaagtaagcatcccctgctacacgtccactaaatttgagcttttaactgtctgtgttgagacgtggcctggtagaaaccctcgctggggccaggcgcggtggctcacgcctgtaatcccagcactttgtgaggccgagtcgggcggattacgaggtcaagagagggagaccatcctggctaacatggtaaaaccccgtctccactgaaaatagaaaaaccagccgggcgtggtggcaggtgcctgtaatgccagctactcgggaggctgaggtaggagaattgcttgaacccgggaggcagaggttgcatgagatgggatcccgccagtgcactccagcctgggcaacagagcgagacgccgtctcaaaaaaaaaaaaaaaaaaaaaaaaaaaaagaaaagaaaagaaaagaaaaaaaaagaaagaaagaaagcaaagaaaccctggctggccagtgcccaggccatacacaatggcattgtgcctcacttttcacctaagacgaaatcagcgggtggggcaggcttataatcagaacacccctccctttccacctcacacactcccacccgcctgtcccacaatccttcctgcccctcccgctctcccacccttggtttctcgaaaccccttctccttccctgccccccgtcccccgagccccaggagggggaggggcaggaatctggctccgcctcccagtatggagatgattggtcaaaggaggtcacctgaccaagctgagccaattgaagtcctctccccactgctttgagaaggaaccgttaagacgctgggccccacccacaagattgcgtcttgtttgtggcaagattctgaggggaagtgtagctcccaggttggttccaagtcttcttccaattaggtaaattacaacaatatcttttccataaatttcctttcttttcttttttgcctttttttttttttttttttttttgagacggagtttggctcttgttgcccaggctggggcgtaatgtcgcgatctcggctcaccac

SEQ ID NO: 44222 - DNA, 2300 bp, Homo sapien
ataacaatatataactcaattaaacaaattcttactgaaaccccactatggtctatgtgtttcagaatcccggagatgaataggcgagcccttgcccacaaggaacttgcatgcttgagtcaaaaggctatttcaagggaaccttaaagattccagatttgctattttatcctcacactttggagtaaaacaatctaaaaatatccttatcctttattaagaatgcctcatctccttgtggtggtgtgtatttcatatttcttatatcccacacatttaaaaccacattcttatttttattcatatttttacctcattctacctaaaaaatagtaatgactactactataactgatcccagtgaagccttgaatggtaattgtcctctagacagaaagaaataatactctctaagaaatgtagagactcagttctctgcccccccagaagacataatctgggatgcctttggcctaagagcatagttcattggagaaagtttgaggttctgaacagaacttggctcctttgatttcctttgttgggcagaccttgctatcactgctattaccatggcagaaccgcctaagaaatgagatagaagaagctctggacacagatctcctcaagcaggaagcagaacatggggccctggatgtccctcatctttctaactacattctcaatttgatggctctgctatgtgcaccggttcgagatgaagcgatacagaaactagagaccataagagatccagtgcagttactgaggtgagagtctagatgtgctgtcccccaaatctgccttagacactgtgccggagaactctgagccagccactgtggatatagcccctgtcttatctaactcttgtgtactgatgacctgactaacacaccttttctcctttctggattattggcttttattttccaaggacagtctctcggggttccttttgatgatctttagatcagttgggtctcctttatgtcatgatactgttaagacattaaggtacagtaattctttctcctatagattgcaaattgccttttcccagatgttgtcctgtttgtcccaactcagaccttgtgaggggacaggaaagaggattatccgtgtttcacagctagaagaaccaggacccggaaaagtaaaatgatctgctcaatgagttagaaattcagtcacccacatcccagctacccacatataattgttaacaccttggtgattttcctttcactgactacccttttttcaaggtgacagactgactacaggcaaaagagctctcatctggttgttaaagtgtcaggaggtataactgtccttagttttgccatcaactcactctatggccttgggtcactggccacagtaccattattcataagttgaaataggactgtttgtttttaaggcttcttctgactctcaaatactctgcttttatggctccttgcttggattccacccttccagactagatttcctttaatagtgtaaatgttctgtttctccctacggcaggggcatcctccgtgttctgggcctaatgaaaatggacatggtgaactataccatccagagctttcgaccctacctgcaggaacattccatccagtatgaacaagctaaattccaggaactccttgataaacagcccagtatgtttaaaattcaagggcaggagaggggagatttgacctcaggtctgccttcttatagcaatagaggctattttctattttttgaatagaaagtttcttccttgggcaaggggtagggagaaggaatgtttctctaagatagaaagatctacaaaatcacttctttatagaccaagagtatgtctcagagccatcatctttaagccttggaattttaagatgcatattcccttctcgtcgtaggtctcctcgattataccacaaaatggctaaccaaagcagccacagacatcactacactatgtccgagttctcctgactcacctagctcctcctgcagcatggcgtgttcacttccaagcggggcaggtaacaattcagagccccccagtccaacaatggtgctataccaaggctacctgaacctcctcctctgggatcttgaaaacgtagaattcccagaggtagggatgtgtgtttgggcattgccttgttctatggtattcagtgcctccattcaaaccctcctcttctgatgggctgtccttcgctccctcaccagactctgctgatggacagaatccggctccaggaactggcattccagttgcaccagttaactgt

SEQ ID NO: 44223 - DNA, 2300 bp, Homo sapien
tggcagggtagcactgagttcaatgtgaagttccccagtcactgccttcttcttctcccaagtgtacagactctctgggctgcacagctgctgccaggatacgggggaggggtggcatcggcgatttaagactgactgtctctgtctgacctcttgaatgtctgttccaacaatatgaatttaaaaccaggcactgtgattgctcacctgacttttggttctcatgatgatgcttttctgtatgcagatagtggttgcaatttggtgttcctgcagggggtacacaaggtatagccttctattccaccatctctctctgttcctctagttggttcttgacaactcttgataatacgtattattaaatacagtatctgggccatccctaggcaaaatgtgatttgctgttttccactagttctctccctttatttttcccacacttctatttcccctcattacctctcccaggggatttcaatattaaaagacacttcaaaagactatttcactatttgaatgaagagctgatagaattttaggttatcactgcgtagagttttttttttttttaacaatgcaattttgtgagaagatgaattggtgtcattctggaaggttttcttagaaagaaatacaatagaattctgatttttttaatgagaaatgaacttctggtatagtgaaacatatgccttatgaatgtataattttatgttcaaatcaagaaaaatatatttaaacatttatcctggggttgatatgagagcaatttgtttcacagctgatattactgaaggaaatactaggagaggatgaggagggaattcagatttagtattcattagtaaaataaactctttagctaagcgctaactttactagccaagtcccctcatatcctcctgtgcctggaagttaaggtggatttttcctaggctggaaagttcttggacctcttccccataactttcttcttcaaaatccccatgttgtgcaagatattcacacggtactgttgccactaacaaggcgaggattgtggtgagaatctggtcaaagtatagtcttgatttataaaagaaacaagttaatgtgttaagaaattaagtcagggtaagagagggatcaactagtatagtgtggaaatgtatatatgctggaaataggccaatccaggggtcctcatatcactgtggtgactggccagtggagtgacaaagtagactaggactgaagagtgagcaacatgaggccccttaggatcgtccgttccagtgccctcagtttacagatgagctccaaagctcacaattggattgcaatgaagaacatgccaagaattgagctgaaagaacccaaaccaaaatgtaggattcctctcaggcttatggtcttgcccctttaccacacagcttctgtggctagccctttaaaatgattcttgatttgcatatttgtaaaatgagagtttaacagttcatgtgtctctccttactttgtgtggaggattcacttatacaaaagataaaagaaaacccaaaacagacttctggaattttgtagccctgttggttcttcatttgtaggggctgtatgaacagcatgaagtgaaacaaataaacaacaaacgcttattttttccccctaaatagttatttaaatgctatttttgtttctggggcagtaaggataaaagctttgaacagttcgttcacgaggagcagggcttgagaagatgacttccaagctcctgaggggttccgagcctgggcgggagggtatggacatgaagcctccttacgtctatctcagcctcctgcctttgtcacccaatggtgaggctctgcttgcgtttcctgccgtcttggtttccaaggcaccctgggcaagtgataccaccccgctaccctggaaacggatcaccctttgttttcatgtttggactctcctatcttgtgtcacaggtaggggtgcgctccaggtggacctcataatctccatggttccgtcctactcctccctgatgatctcccctctcttcctggctacaatggtacttcccagaccaggttggggaggcagaggggcttcgctagcagacgcagaggcgaggccgccagtcgaggacgaggaggaggtgagggaccagggtcgcgagggctgtgggggataccctgctgcctgagtccaggccggcagagccccttcaggaaggtctggagcagtagctaaggagttagaaggtattccaggaccaatgaaaggtagccagagccgaggaagattcctttcctagc

SEQ ID NO: 44224 - DNA, 2300 bp, Homo sapien
ccaccaccacgcccagctaattttttttgtatttttagtacagacggggtttcaccgtgttagccaggatggtctcgatctcctgaccttgtgatccgcccccctcggcctcccacagtgctgggattacaggcgtgagccaccgcgcccggccgggaatagttgaaatttgttatatgtcaacaacaaaggctagtcaatgacataagttgtcaaaagctggaagtttttaggggggtaggaggggaattgctatctaaagacagcaatgagaagcagcaaagtcccttacataagctttaggatctgtggtacagtggtggtaggagtgaaaaatcatctgctcctcatgagtgggcttcaggggatctggaatcctcatggaaggggaaattcagagaagaggcttaaaatatggaggaattaccgagggtgtattgtgttttattagtagaggagcggtgagaaaagtgaactaaagagcggatgtggacacaaccttatggcagttagaatataggagttgaagggtgtcttggggtgactcgcacaaatggagataaatgtcatcattagataagttctaatgattcaaggcagaccagggtggcaggattttgaggtttgggctatggaggggtggttgtctggagcttcctgtcaaccccaagtgaagtaaggggtgtggtcttagccttggatcacttgttcaaacaatgcttcattttgctcctggaaacagaaatcacattaatctgtaatgacagaaaaatacgctgaaagctacacatcacattcaggataggactacccctgggcaagtgggagggggaatggaaatgaagtgaaggtcaaggaaacctcaattttttctgtaacgcttttagtccttaaaagaaagacaaagtaagtatacctaaatgttaacaacattgaaatctgtgtagtgaaaacactggtgtttattatatttaatgccaggaacactgtaggtactcaatgaatattacttgttgaatgagcatatctttctgttttaaaagtttctccaacaaacatacacaattctcaaattaacacaacgtgctacaaaagcaaagaaaagggaatgaagtaagctggggaagccttgagaaatccttgtggaaagagtgactttcgatctatatagatctataccaccacacatggggtgcaagctaaagacatagttctacctccatcttaccttaatgctctaaggttctgggtgagtatccagaaaatgatcttgaacgtttagtcctttcaagtaaataccgaatcctcaattttctcttccaacagacactgggtggtgctattgtccaaaacttccacccatcacgtatttattacttcaatctatagacatctccacaaccaatgtgtcttgtgggccaaagtgctagggattagggatataaaggtgaatagcctcagttgttctgtgattattataaactgctatcgtgttcagtggccgagaaagctgcgaatgtgacttttacatttcataggagagcactactgtcacagaaatgtccagttgtaggggtgaatggccctgaaccacccaccctcactatgagcacccctactccacgacctggccaaggattagagcagacaacaccgagccccacttccaacctactgttaggttatcacagcatccttgggccccaatggctataaaaagccgaaagagcctaaataccggtcattcagcttggacctcggagttccagatgttctaagctcactgggcgagatgtgtctgcttattgcagaggcctctgttattgtgaaagagtgagtgtagtcaggatgaagggtatgtggaccctcaggactaaagcagtggaagaggcctgggaggtggggcctggggaggcggggtcggctctgacttcaccaagccccgatcctagaggagagggtggacgcgggctctgtacactcaagcggaggaggggaagggcggggtgggggggggggggtggcgagcccggaaacctttggccaatcagagagggctggggcggggcctgctgggtggcttagcactgcagggctctgcgcgggaacgctaacctggtccggagcgagtctgggtctcagccccgcgaacagcctttcacgagtcttcaagctttcaggtgaggacctgcggcctcgcaggagccagaggaccatggggatgggaaggcgtcagggttgcgaggcgggggatgccgcgccttcgggagccagaggagccgaggttggggctggcgctt

SEQ ID NO: 44225 - DNA, 2300 bp, Homo sapien
ggagtaaggggggattgcagttggggttctgcctggcatcctagggcatatcagagtgggtggggacggtggctgtcatcgtccaggccctggaccgggctgacactcgaggatcgactccccaaagctcttcagcaagttcttgctctcatgcagccagctcaggttggtcagctcttcatcttccatggtctcctctttcaataggatgtcaggcagagaaaagtcgaggtcatcatcttcctaaagggcttggagaaaccactgccccagtaacactgactcagtccactggagacactaactcctgagctttctggcatcttactgggaggcatggcgggacccatatacatgaaggctcctgagtcagaatgggtccaggaaaccgaggtccgcattgcttccgtcacagaaggacagaagggcctccataatcacgagaatgctagtcttctaggggcttctatcacctggccccgcgttgcttctcacggccgcattccggggatgcggcgacgctggactcacctgtggcccagccgctgggtcgctcagtctcccagccgagctgctgccggaaccccggctcctgtgcccggcgcccgcccgggccagaagttaggtttcgaattcactaaaggtttaggattaatagttcgtgaaactgttttacacatttcagggtgactccaaaattcttcatcaatattagactcatgctgcttatgaaaatgcaaaacaaatgcagtttttctacaagatcattataagcttatgtatttgccttatacatacttttgtaatttccactgagagtagaaatcatcaaatcttactcatctttgcatctctcactaagcattatagcctaacacagagaggtgcccattaaatgtctgttaacaaaacaacagacatcaaaggaaagctttagatctggaataactaaaaatattctgacattatttggtatatgttaaatagttcataataaattttattataatttaaatagtgcataataacattttaaaaatccatgcaacaagaatctctcatatgatgaattcctagaaatgatgctgcaagttcagaggtctgtaaattgtgtaaaatgtaagtggtgaatatttttcaaacaaatgtatattgtgaaattcaaatattataaactatttaatttacaaaacaaaatacaaagaagaaagcaatcatgattacttccttaactcagcaatggcagcaatattcttaatcttcattactacacacaaacacacacatgtagtaatgtgtgttgctcatcctatgtaccagtggaatacaggataagggatgtggcctacttaaggtgctgtaaagagaaatgggtctgtttcttactctagcgctctatccaacagattaacatctatttattcttctgaacacctttcctaattagcctccagagaaatcagtaggcattatttttgttgacattcccaatcttcttaaaacaattaaagaatgggggcaaggaaatgagcacatcaatgacatgcaaaaaaaaggaaagagttctgttgttgaggtcctaaatagtaacgatcactctgttattatctaactcttcttccccagaagctattgtctttgaatttgcacaacaacaaagtttgctggctggatgacctgtctaacattataaagaaggccccgaaagtcaagatcctgaacctctccaaaaatgaggtgacaagaaagggccagatcaaatttgggttgagggtaaattatagtgcacatcaggatgataacaagaaataggatccccagcagacacaggccagctcctggaaatgccctcactggccagaccacccactgctgctcttctttttctcctaggagcagcttgtgcaagtacttcaaggatagcagaaatataaaaactctcaagcttgtgatggggaagactgggcaaggtaagggggtgtgatgggagcaatcacaggggccaagggccagagtgtggcagcaccccccccccaaaaaaaaccttgcttctcctctcctctacagacctgtgggggcagctgctgaagcacacaaaacatgacattgtggactccctcagtgtgttgtccaaaactcagcatgacctcagctccttcctggtggacatgtgttaccagaaggcaagcacctgcttactcccttggacaggccctgagagccagaggtgggtaggaggttaagggggatcctgagcactggagctcttccctttcagaaatggatgctctacttttctg

SEQ ID NO: 44226 - DNA, 2300 bp, Homo sapien
gttcatagcgcctgccacccaaaaaagagaaatgaagcctggcgctaataatatacttaggttattctctgatatcctcattttttaaggtgtatataagataccttttctgctttggatctttcaaatgtctgaaatgttcctaagataattacataagtcataaaacagcagttattatgaaaatgaatgatgattttaaaattttatcagttgatagacatactttagcagtaagatcattactcaaggggaactacaaaccactgctcaaggaaatcaaagaggaaacaagcagatagaaaaacattccatgctcatggataggaagaatcaatatcgtgaaaatggccatactgcccaaagtaatttatagattcaatgctattcccatcaaactaccattgacatttctcaccgaattagaagaaactattttaaaattcacgcagagccaaaaaagagctcgtatagccaagacaatcctaagtaaaaagaacaaagctggaggcatcacactacctgacttcaaactatactacaaggctacagtaaccttgtagaacagcatggttctggtacaaaaacagacacatagaccagtcgaacagaatagagaactcagaaataagactgcacatatacagctatttgatcttcgacaaacctgacaaaaacaagcaatggggaaaggattacctatttaataaatggtgctgggaaaactggctagccatatgtagaaaactgaaacttgaccccttgcttacaccttatacaaaatttaactcaagatggattaaagacttaaatgtcaaactcaaaactataaaaaccctggaagaaaatttaggcaataccattcaggacacaggcacaggcaaattgccaaaagcaattgcaacaaaagcaaaatttgacaaatgggatctaattaaactaaagagcttctgcacagaaaaagaaactatcatccgagtgaacaggtaacctacagaagagaaaatttttgcagtctatctatctgacaaaggtctaatatccagaatctacaaggaacttacatttacgagaaaaaaacaaacaaccccattaaaaagtgggcaaaggacatgaacagacacttctcaaaagaagacatttatgtggccaacaaacacatggaaaaaagctcaacatcactgatcattagagaaatgcaaatcaaaatcacaatgagataccatctcacaccagtcataacggcaattaatacaaagttaagaaacaagagatgctggcaaagttgcagagaaatgggaacgcttttacattggtgggaatgtaaattagttcaaccattgtggaagacggtgtggcaattcctcaaatatctagaaccagaaataccatttgacccagcaatcccattactgggtatatacccaaaggaatataaatcattctattacaaagatacacgcacacgtatattcattgccgcactattcacaatagcaaagacgtggcatcaacccaaatgcccatcagtgataacattaagaaaatgtggtgcatatacaccatgaaataccatgcagccataataaagaatgagatcatgtcctttgtagggacatggatcgagctggaagccattatcctcagcaaactaatgcagcaacagaaaacaaatactgcatgttctcccttataagtggaagctgaacaatgagaacacatgtacacagggaggggaaaaacacgcactgggacctgtcaggggttgtggggggcggtgagggaaagccttaggaaaaatagctaatgcatgccaggcttaatacctaggtcataggttgattggtgcagcaagccaccacggcacacgtttgcctatttaacaaacacgcacatcctgcacatgtatcctagaacttaaaaaaaaaaaaaagaaaatgaaaattaagggctgggagggaggactcgaaggaacacaaagtttgtggaatcgattagtatgtatcctcctatctcagtcttgactctctttgctgactttcctaccctgggccccaccccgagaccgcccatttcagtgggcctctgtgtttggagaacgaacttcgaaagactggaacacttccgcctgtcaggccagaagagatttcctgacaccacagctggaaacccatgtgcatttcagttcaggaaagaatggtaggcttggtggggggagctcccgcaaaaggggaactaatacagaaacactctggtatttgtctgcctctcttgttccagcgccgttttccctatatccg

SEQ ID NO: 44227 - DNA, 2300 bp, Homo sapien
aggaacacaaagtttgtggaatcgattagtatgtatcctcctatctcagtcttgactctctttgctgactttcctaccctgggccccaccccgagaccgcccatttcagtgggcctctgtgtttggagaacgaacttcgaaagactggaacacttccgcctgtcaggccagaagagatttcctgacaccacagctggaaacccatgtgcatttcagttcaggaaagaatggtaggcttggtggggggagctcccgcaaaaggggaactaatacagaaacactctggtatttgtctgcctctcttgttccagcgccgttttccctatatccggaattcgtccctgcgcattccaatacctgaagcggccacagggtacaggacagggagccctccgacagaaaagagtcgcggcgctaaacaaagcctgatatcactccgcttccataagccggatccccataaactacgctctagctcctcccactgccgttgtgggtaacgcggacgtggaagaacctcgtctgcggaggaaaaggtagatgttaaatggtaactacgcgcgaggttctgaggagccctgggaacaggaaggagaaaagaataccaaaagtgacaacagtttgccaatcgcagtctttaatctgataaagcggttatctcgtcttgagtcccaggtgccgagtcaatccccatacacagccgccgccattgcctcgagtccttgtgtctgactgtctgttcctgctgctgtatgacacagcacctcgaggcaaggaaataagaaaactgcctctgatccaagcagagaaggtcagtgagaaggtgcgcatcgcttgggggtggatgtgggtatcagaggtgaacactggatacgcgacctggtcatgggaggcgggcggtgagaaggagagagagatgggtaattggaatggcacacaacaattaaaaaaaaatgatctaccttttgctagcttgatttccatacactcggttcacctcagaccatgcttgggaagaaaaaggttgcagcttctagcagggaaaaggcagactagatgaggaagagagggctacttccacaggcgaggacagttgtctggggagccctgagagggagagaatgtaaaaagaggttgtaaatgtttgataatcaaggctctggatttgaaaagggtctcatgtcttggttactggtctgaccattaataaccacgtctctctctctgtcttttcatttgttctttgggtgtgtatcacgcgtttttatgtgtaaatctgttcctaagtttgcagcactccatgtttctgtaaagatctgtaggggacagcagacctcaaggggagaggagaaggaaaagaaaattggcctggtttgtacagagtgggcagtacttgggaggcagtacttggaggtggtagatggctaagattagagtaggcaggagtgtaagggagcctccagaactctctgccagctttcctaacatgtcctcccttacccgcattatgttgcagaaaatgataggctttgggagagaggaaggaaacataggaacccagatgaaatatggaaataaatacttttcattttttccccagcctccgtggtttgtctaggcatttcgtccctactaacaccactactactaccttgtagggatgtttgagttgtctctgtataggaattgtcagactttgagaatagagcagaggggcttggagatttaggagtgggagaaaaaggggagatagaaaatgtttgccaaacaggtacttatatccagaaagaaactgtgccctaggtgctggtctctaccaaaaacagcctcaactgtctcctgtgtcttcatttattggtctctgtttttgtgaatccctgtaggtagatctgtccccaggtctgtggaactgtcagttgtgaagttttgtaaaatggtcacccaacttaaaactaggaaattacgaagaagagaaaattgccctgtatctgttaaggttggtgtaaaggtacagggacaggggggcaacttcgactagagaattccatctcttctgttttgtcattttaccaattattcccatctgccccaccccctgctgctgctgatttagttgggagtcttggtaagttgtgggggtacagaatgctaagctgcctttcccactctccactgcttgtcctgctctcacgcttgaacctagtctaatctgaacgagggacattctagggcaatcactgaagaggaagatggtgggcaataggaaggaggaggaggagtagccctgaaacaaagcagtg

SEQ ID NO: 44228 - DNA, 2300 bp, Homo sapien
ggtggaccggctggcaacctgccccccggaccctgacagcctggcaacgaggagacgatccgttcggagccgggcgctagagagaggtgcgcagtgcccgagatccctggctatggggaggcggtgactggtgcgggccaggccggaccaagggctgaggggctggctccagaggcaccgtcagatcgtctggaggagaaccgcgctgaccgcttcccagccagctttgcaggcgcccgcgcgcagccctcgacggtttcggtaccgagagacggctgtgggggaggctcctgcgggagaaatggccaaacgggagccgtgttggggggcgcccgggaggcagttggggggcgcctgggggggccctcgtgggccagcgtcccagctctgtgcctagcccgtgggaggtgggtcgcgttcgctgctccgggccctgattccggaaaggggcctgtggggccccgtgtcctgggtgctgtcccttcccacagactccaggttgatgtcaaagtctgtctgcgcggtaggtctggcgtattctgacaggacacagtgagcatctgtagaggagaggcttgaaataaaggaggagcacgaatattccctggatttctggaggtgtgtggggatgtggggtgggtgccaaacactggagaaccgaatcggggtgggggactgcgaccagagcaggtcaggcatccaggagcacctcttaatcttcccctctctaatggtgttccaggcgcttcccccaccttccatccccatctgcctcccccaccgtcctaaactgggggcttgaaagggtgagctttggaggtaggggtgatgagggagacatactgacaagtaccaattcacgacctgttttctagaatatgtggcgcccttcccccattttctgctgcgcagagcaaggggatgtggcgcacctagtggtgaatcctcagaattggagaagggagtaatgagaagagtatgacgtcaagagaaggagttgttatctctagaaccttgaagcagggcctaaacaaaacgagaatattccaccagcaaaaccccgaatgttgaaagacagatatcaataatatggggattcttatccttagcgttggtctctctaccaagggctttactgccacccctcatttcctgtcttactttttcatctgtttgtccataggcctgctttaaggctggccagttctgcaagaaaggcaaggaggaggagactggctcacacctctggaggttggtgagaagggggagggggcaattcaggggacagttggagaaagagagcatggcaggtggctttgagaccagtgggtgcagacccacttctactctgctggatttgcacagtgccagcatcctttttatttcttgcaggggacatgagataggtgtaggttgtgttgtgactcagaaagacctgagagcagggaccaggacacaggaaaccatagatacattgaacccttgaatgggaagacagatatttgtcacaggagccagagtgcttgcctatctaccattctccattctctcctgtatgtttacttgtctgtaggacccccttctgtcagctgtggggcttgacactacttgaacaagaaaaggagggggaaactgcaccacataagtgaaggttggtatgagagtgggtatacttttgggcggggtagtggagaccagcatgggtccgggagtgcttagggtccaatctggggacttcttggcccctcccattgccgacacactttcccaccattgttggacctgtttaataggaggcagccggtccagagagactttctcaaagcccagctgtcccacctagcattcaacatcagtctcactgcatatgtctctgcatgggatgacataattggaagagactcaaagccccatttcattctctctccctagatccacctccagtggctgctctgctggtggtggggttgctgctgacaaccaccctcaacgggtctgcacccatccaggaaatctctgtcttcctcaagcttggttgtgcctgttctacactctatctgtattattgaattactgactgagactgtgtttgggaaggaggctgagtgactactggactggatattgactctaactcttgtttccaagcttatatcctcaatcacctaaagatcagagtgtgaagaaacaaacctgtgacagatctgtggttgaggtttagactgggggaggagtatagtactggactttctttgtaacttgtaccatgactggggcagagattgagtctggtgcccagg

SEQ ID NO: 44229 - DNA, 2300 bp, Homo sapien
tcatatcagcaaaatattgtacagttatagtaaatatctggtaacaaaagctgtatggaaatatatgaaaattcatcataagaatagggctcctggccaggcacggtggctcacgcctgtaatcccagcactttgggaggccgaggcaggcagatcacctgaagtcaggagttccagacaagcctgaccaacataaagaaaccccatctctactaaaaatacaaaaaataagccaggcgtcttggggcatacctgtaatcccagctactcaggaggctgaggcaggagaatcacttgaacccaggaggcggaggttgcagtgagccaagatggcaccattgcactccagccagcctgggcaacaacaccgatagtccctctcaaaaccagcaacaacaacaacaaaagaatagggttcccttttgtacctgggaaatatcagtggtttcagcaaaaaggaactttctccaagattacctataagggacataaaaaaaatcactgtcctttaggaagcaaagaagaggcaattgatgtttgtagtggtgaggcatgagctccaaaatagatcttccccagagactgatccacgggtaaagaaagtcaaggggaatagacttcatcaggatggtgagtgtattaggttcatactgctgctttaaccaattaccacacatagaagggcttaaaataatacaaatttattattatcttacagtcctagaggctggaaatctgcaaagggtttcattacactaaaatcaagatgttgccagaggagctatccctctggcatttctagggaagaatctgtttctttgtcttttccaggttctggagacagcctgtatttcttggatcttggcttccttccatcttcaaagccaacaatggccagtgtagaccttctcatgatgcttcaatctgatattgagtcactgcctccctcttccacatttaaagtacccttgcaattacattggccaagataatccagcataatcttaaattaaattcagctgattagcaatcttaatgatcctttgccaggaaatataaaatggtacatgttctggagaacaggacatggacatctttaggggaccgttacttgccaaacacaataagggtagcacctaaatgagttttcaaatggacagcagtaacaacaacatcaacttcgtatttaaccacattgctctgtctgtcccatgcaggaagcagggaaaggaggggctcaagagtagaggacggatgttggggtgaaagaagaggattcaaaaggagccaggttgctttgtctcggggaggggggtgcacggtgggatcctctcctgagaatgactgctgaaacagcaggtagttgtggcaggtggctgagatccaagctggttcgaataccagccacatttccacactgccaaatgtcatggcaagagaagacttgacagggaaccgaagaggagccaggaccatccctacctggcggcatcaaagagagaggactgttatgacctcctgcgggtcctgacagggaaaggtcctcttctgggggcaactgtggcgacggcgcaatgccaacgtgagccaccatttgaaatgagaaagagcagtgtggcagaaaggaatgagtttggtgcagaccagtggttggtttcctagggttagaggtctaggtctaccttcttttagaagaggggcagtggtgagtccttgatgggagccccctgccccggagttcacttaagagcaggtgtaccttcctcccctgcgtggctccacgaagctgggaaagaaacgcacaagaggaccaccctagagccccgggcctgtatggcctgaaatcgcctctcccctcccacactgcagtgctgacaccccctttcccatcagcttccagaaaggagggttaggggactggggagagggagggggcagacacccagcagtccctgtgaggggggcggttggggcgggggtgcagacacatcacggggcggtttggtatccatccgctgttctctccagcgcggctcttcccgacctcgcgatcctgtcccctgcccgggcccccagccgcccgctggtcccatatattacagcagcgacagaaatatggtagtggtcgccacgttagggtccgtgggggcctcctgaggcagcctggtgccaacccgcacgcccaggctggggctcatcctggccctgcccacctcggggtcggaactacggtgggcctgggatgggggcgtcaagcactttcgcgccgtatccctccgccccccttcccgacaccctcg

SEQ ID NO: 44230 - DNA, 2300 bp, Homo sapien
aggcgttggggagatacaaacattaataagacaaattaaaaaattaatatgcttacattttgtgccttgagttatagatgagcatgccggaaaggacagaattatataaatgaataaactataagtgttaaaaaatgattagagataatatcatttagaaaagttgtaaatgaatgagctatcagaaagactagctttttataaaacgttttcaagataaaaattaaaattggccaggcacagtggctcacacctgtaatcccagccctttgggaggccgaagcggaaggattgcttgagctcaagagttcaaggccagcctgggcaacatattgatgccttgtctctactaaaaataaaaaaaattagcccagcatggtggcacgcacttgtcctagctactcaggaggctgaggtaggagaatcacttgagcctaggaagttgaggctgcagtcagtcatagtcacaccactgcactccagcatgggtgatgtgagtgagaccttgtctcaaaaaaaataaaataaaataaaataatcaagggtgggccaggcgcggtggctcacgcttgtaatcccagcactttgggaggctgaggtgggtggatcacttgaggtcaggagttcgagaccagcctggccaacatagcgaaatgctgtctctagtaaaaatacaaaaacttagccaggcatggtggtgtgcgcctgtaatcccagctactggggaggctgaggcaggagagtcgcttgagcctggggggcagaagttgcagtcagctgaggtcgcaccactgcactacagcctgggtgacagagcagaactccgtctcaaaaaaaaaaaaaattaccaagggtgttaagtttaatattagtctgttcatggtacaaaaatggcacctttttcacataattattaccgtaaaaaacataacatttccttttgaggtgacaacaaagttctggagctagatagtggtgatggttgtacaacattgataatgtactgggttgtatactttaaaatggttaaaatgttaaattttatgttatgtgtattttgccacgataatttaaaaaatgaccacacaataccttcagtcaggagaattggaagacagggctatatgttggtttggagaggaaattcagacgtacgagaaatatccaatgttttattatttttagacataacatttatttgtctgagaatgttctaaattttcaaaggtaaaattacaattcatgtaaatgtaaaaagaatatgtgaaagatttttcaacacaatcaacaactgctaggattaagaaaacagttgaagggtatatgtgtatatacaatatacacaatatgaagatataaacaaaacattgaatttcataaacacataggaaattaataaatgttagaataacactgccaggttaaatataaaacgggttaatatcttacagggcaataaattgtaacatttaaggttttctattgcactggacataaatcatttacatatttattgaataaaatatctacatgttaacatcagtgtctacagagttgaaaaataggtaaatcaatagacatcctgcactgccctgaaatgacatccagtaactgaaggtgactttatctaagtttggtataatttttctgacagtgcaacatgctttttttccccacctgatcctagtttggtaaggtaatatggaagtggcagttttgcctcccatcgcaagccataagttttaacagggattatcctggtggtgcaaattggagtttgaatgtttgttttgcttaccagcatttttcaagacagatctgtgtgtgttttagtatgtcgcttgagtcgtatacaaaatattaaaaatcacttcatttcccaaatcctcatcgaatgttcctcgccagccgagtggtcctccagagcaaaggccagccttccttccagctgtctggccaaggagcttcaggatcttctagcaagcaccccagaggcagaagactgtcatccatggtacaggactgcggcgaacaagctgactgcgcagtcacgtggggctgacggtgggtcatgtgaccaggctctgcattaggcctgccgagaggagtgttttcttgcatccagaaaagacctgagaggcggacgacacctgtgctccgcagagcagaacgtgggaggaacggcgggatgttaaggtaggtaggtgtctttccatgctgcatcagcctgaaaactaatttctcaggcgactggaactacagcatttgttggtaaaggaaacaatccgtcagccaaccgg

SEQ ID NO: 44231 - DNA, 2300 bp, Homo sapien
aacctcctgatcctgtcccctgcctgggtccccagccgcccgcccgtccctatattatagcaacgccagaaatgtggtggtggtggtcgccacgttagggtccgcgggggtcctcctgaggcagcctggtgccaacccgcaggcccaggctggggctcgtcatggccccgcccacctctgggtcggaactaaggtgggcctgagaggggggcgtcgagcactttcgcgccgtatccctccgccccccttcccgacaccctcgcggagagagcggttcttgcagcatcctgcgcagcccctgcccagtttggtgcagaggcgtggggggcgggacgcgtctttgccattctgatagcggggaaagcggtgagaatcgaagtgaggagccgccagaggagagctgaggagaggagggggaggtcgacgacctgggccctgggcctctgaaggcaagtgggggtgcgtgagcttggggtggtccgccagggtggaccggctggcagcctgccccgccgaccctgacatcctggcaaggaggagacgatccggtcggagccggtcgccggagagaggtgcgcagtgctcgagacccctggcgatggggaggcggtgaccggtgcaggccgagccaggccaagggctgaggggctggcttgagaggcaccgtcagatcgtctggaggagaaccgcgctgaccgcctccaagccagctttgcaggcgccggcgccccgccctcgacggtgtctgtgcccggaaagggctgtgggggagctcctgcgggagaaatggcggagcgggagccattgtggggggctcccgggaaggccggggggagccggcgtcccagctctgtgcccagcccacgagaggtgggccgcgttcgctactcggggccctgattccggaaaggggcctgtgggaccccgtgtcttgggtgctgtcccttcccacaggctccaggtggttgttaaagtctcctgtctgcgtgataggtctgttgggttctccaaaagtggaactttgagtgggtgaattatgaagacactaaaatgaaatgtttaaccgccttttataataccgcactgttttattgccttacatatttagatccccacatccagttttgtgcaagcaaatagggtgtggacttagtcgaatttcacaacagtggtccatgtaaataacagggtagtatttttccacctttcttgttcaggatctgttttctcaacatgctgatccactttaagtaatgtaatgatgtgtgagaatgtgggttccgagtagaggggtaatctttttgaagggtcaatttagaacatttgaagtcaatctgcttcttcagtttatggttctggaaaccaaaactccatctccagccactcctcacagaccctctcattttggtgcagaaatagtcccacagaagaattcatggcatttctgatggtggatatctgaggagctatgagagttgggagactttatttacttagtttctgattctcaaaaaggaggtgttagaatccgaattctgggaatctgtccattaacctgctatttttctaccattgttaacatagtctcttggggttattttttgctagttgctccgccttctttttgtagggcgtgactcttctttggtgggaaggatagcatctcctgagaactcctgctgtataagcaggctgacataggtggtgaataaagtaggatctaggtatgcatggggaaggggaaggacatgcacagatggtattaaaataacagtctccattatgttccctgcctgccttgtaagtacaattgcctatgttccactacctatttctgcacctcattttttttggttcaggaaaggagctgtaacttctattgggaaaatgactgacttcaaagttggcaggaggtgtaatcaggctgcaggtcttggggtgattagggaatcattgaggaagagcagacaggtgggagacatttaacatagccttgaatattcaaaagcatatgttataatccttgttataggcattagatcatcttagtctcttctgttttctttcctctgccttcctttctatccttaggtctgtttctttctaggttcctgtagagatctgtatgtagctgttcacttggaagttaattaagaaagaacaaaaactattcatttggattcaaggtaggtttatgtgtgagcacccccgttgattggggttatggaaaggctgttgccaagtgggttagaccagatcatatcttggtgccactgtcttccatctttctagtcacctct

SEQ ID NO: 44232 - DNA, 2300 bp, Homo sapien
tatcatctgagtgttggcttacatgtgggtacagatttctgaacatgtcatcaattccttcttgaagggattcccaagggcaatttacatgatatctatttttcatgctagtcttaaaatttgaaacctaactccttaagaagaattcccactgcaatcatgtgaattaagatactgagagggcattgctacaaaccattctatgaggaaacctgagaggttgtcttagtgagtattcattctgaacaattttagaagtgtttctcaaagaaagtgtcctgaaacactttctcctgctatagtgataacccttggcaaggaagtaactttccttgggcacacatagacagggctcctttaggagacagcagatagatatacattgcagtccttggtctttatgactgtcccaatgcagcactgctgggtggataagtcaattctagaacttactcatagtaagcccacgtgacagcaaatctaagtcacattctccaatatcaccttataagagataaagtcaatatatgtttctccttattcttttcctatgtttctcagttggtttagagctcagactagaagcagaagagtattttgggggccccttaaagaattaagcattgtgaatcaagaactataggaataattgtagagtcagtgagacacagttagaggagtaaacctgtgggcctattttaagtcccatccctgaaggcaaagctgaacaagtgcctcctgaagggcagcttactaccaagaagttgaagggagagggcttgggcagagtatcatgtgtctccttccagattctccaatcggataagtcattcctgccgtagagaggagtgagtgtgtagaggctacatgtatttttgtcatggatgtattttccacatggaaaaacataccaggaatgaaggataagaatttccttaaggcagggctgggtgcggtggctcacgcctgtaatcccagcactttgggaggccgaggcgggtggatcacgaggtcaggagatcgaggccagcttgactaacatggtgaaaccctgtctctactaaaaatataaaaattagctgggtgtggtggtaagcgcctgtaatcccagctactcgggaggctgaggcaggagaatcgcttgaacctgggaggcagaggttgcagtgagctgagattgcgccgtgcactccaacctgggcgatagagcgagactccgtctcaaaaaaaaaaaaaaaaaaaaaaatttccttaaggcaaactactgtgtgttttaattgactggattcctgcctactaaatgattatattattctagtccggcctccctgaaataactgtattattactcaaatgacagtttttgtgtttctagatcattcagtcacttgattataaacaatctgttttctgccacagaaaaccaactgcctagtatagtgtgtgagttgtacatgttcctcctcagagggctagctcatctcccagagtcctaggacacctctctgggcttctgtgtactgatgatactcctctaaggtcacttttttttttttttttttttgagaatctcggctcactgcaagctccgcctcccgggttcacaccgttctactgcctcagtctcctgagtagctgggactacaggcgctcgccaccacgcccggctaattttttgtatttttagtagagatggggtttcaccgtgttagtcaggatggtgtcgatcttctgacctcgtgatcctcccgcctcgccctcccaaagtactgggattacaggcatgagccaccgcgcccggcccccttaggtcacttttaaagcaaaattcctgacaacatggacttcctttcctctaccataatgagtagagagtcttgaaaattgcccggatcccagcctctaattggtatgttttctcagggagttatctgaagaatgaaggtgttttgctttaagggataggctggggatggaggagcgggttgtgcatagtcattttcaggtgtggaagacaagccagtgctacgcggttgccatagtaacctgacgtcatattagcgacggtgacgactttttattgagaccaatttggcctggggagaaccgccttcaggcgtttggactcagtggaggttgtgagtgcccagcagtgtggcctgaatctccgtggggtttagggagacgaaaggaccccagatcgacgtcccctcgttcccactttggggatcggcgctctggctgtttcgtgaaggagagagaggtgggtctcttctggccccagtgagtgtggtgtcctg

SEQ ID NO: 44233 - DNA, 2300 bp, Homo sapien
atataatatttggtcttttgcatatatctactttcacttcacatatgttttgaaggttcatctatattatggcatatccatacttcattccttttattggcaaagaataatcgtaatatatcacattttaaacacattaatcaattagtggacatttgggttgctgccagttttgggctattgcaaataaggttgctatgtacatttgtgtacaagtttttatgtagataaatgtgttgatcttgggtgtgtacctaggaatggaattgctgggtcatatgataactctatccatgtgaggaactgccagatgattttcatgactgattgtcttgagaaatacagacttagtttttcttgtgattagactagtgttaaaggttttgagaaagaatgccacagagttgaagtgcccttcttgtcacatcatatctgggtttacataatgcccacatgaagtcactggtgataatgtttcatcacttggtgaaagtggtgtctgtcaagtttctaataaccatttttcattccctactctgttctttaggagaaagtcacaaaatcagccctaccctcagcaagtggggtgcaaaattaagcttgacctcagggagagcagatagctacatatttcacttagaattatttgaaaaagacaattttccttctctcacctatttctttattaattcaaacttttgtttatattggtatggattcatgtatacctatgttaaatgctgggatattttattgaacaaatgcatcacaatagaaactccaacatcttggtatctgtggtgcagactggaacatgagtgccagggagattggagcactcagattcctggcagcctcagggcacaaagctttaatgaaactccaggttctattaccgagcaggcattaacaacatagttcccctgatttacttaacctctcctaacttcctataacctgacctaaactatggatttcacaataggttacctggatgaaggtgaaggttaaaggatatacaacttagagtatgatatgattacaattttaaaaacattaatatcatctctcccagaagaaatacctgttgtctgactgagcccctgtctgccatcttaaaagacagtcagttcacatggttcccatacacaggtctcttggccctaggggcaggatttcatcattatcctcatcatcaccaagaggggttgttgagtgagcatccatgagggattgtaaagtgactagtccctaagccttggtggctcatcatccgcagaagtccccgagtacatgcaatgtttcttaactttctttcattatttatgatccaaaggaggctttttagacattcattttttttctcgttagctccttcctgcctggaacatgaaattttaatagcacagatatagtgttaactgtttgtgtgctgtgtggttcattgtagtgccacaaaccattgtaacgtctaccatctccccaccctccagaatcaattttcagccccttggggacaatatctcctttattgagaatgcatggacattgtgatgatggcaaaagctgtaacttcattcctgtcccttacttgatgtatgacactggaatcctttcttagcctctgtcagcctgttcttggtcatctgtaaaaggaactcacaatgccttcctcacagaactgttctgtggggtaaattggaaatcctgtacagagtagatggcacctagtaggacttcaacaaatgtttgtcctggcccaccttttccttccctctcagagaaatgatgactgtcacctaatccaaccagcataactgccacaaagaccaccaggaaatggagcaggaagtagaacattgtgaatgaagcactggggccatttctgtgttgcaggagaactttgctgaaggattgagggagactgaagaagctcattgaaccattttctttaattccttgtcattttctcctcccttgtttgatcttctagattgatattggaaaagcagtttcccattgagtctcaaatgaagagagtgcagatgaagaggaggtaggagtcacaagcccttgaccctcatgctagacccattaccacccacaggaccttgcagtgggatttcatctgcaccatcagcttcttcagagagagaggttgttgagtgagtacgcataagggcataatcctagcaacataaaaaaacgacaagtgtttaagtcctagatggtcatcatctctaaaaggagatcatatgttgtcctttgaggagagtaagagttacatccccactcctgat

SEQ ID NO: 44234 - DNA, 2300 bp, Homo sapien
caagcggggctaatatggctgaaatcccgtctctactaaaaataaaaataaaaattagctgggcatggtggtgtgcatctgtagtcccagctactctggaggctgaggaaggaatatcccttgaacctgggaggcagaggttgtagtgaaccaagatcacgccactgcactccagcctggctgacacagtgagtctccatctaaaaaaaaaatatatatatacacacacacacacacacacacacacacacacacacacacacacacatatataaattgagacttaaccagatttggttattatttgaatatgagggacaatgtagagtgattcaaggataatagccacatttctgggttggtcaaggggtgagtactaaggtagaaaacaaaggaaaataaacatgtctaaggtgagaagaagtgatgagagagagagagaccgagagagagagggagagagacagaggaagaaaagaagaaaaagaagaagaagaagaagaagagagaagagagaagaaggaagaaggaagaaagaagaagaagaaaaagaagaaatagtagtattaagggcttccacaggcttctgagttgagaaagccaagtgtagtaagaatggtcagtggagagtgttccccaggccctagcataaatgaagaggtatcagagtgggtatggactggcagatagtgaccctgcagcaagactaagctcttctgggtgacctggaggtgagacagtcagggtgagggtctcggtatgctgcactacaaaagccaggtgagagatagcaaaaatgtcccaaagagacttttccccggggtgggtgaaaaagagaagagagcaggcaggtttgagaactgctccccactcctcccacctcctcaattacttctaggcttttcttggaatctctcaccacagagctgtagaaaagccctattctggtttccagaatgggaagagacctcccaactatgctgagaagtgagtcattaggtgggaatttggggaagaaatagaaggaaggagccaaagtgatatattaaggtcaccaccttggtcacctgtccatctatatttttggagtaagcaacagaattaggagtctgaacataggaattaagaagctctcgaatataacagtggaagaccagcaccttcccaacctcttgtcagggcagggatactctatctctgcgtcactcaacctgccttggcctcacagctcttccttttgcttaagtcttcaaaccatcaacagtgatagccactaattttagcaggtggcattagttgtcagcaaatgttttttcatatttaatgaatgtttattataatagaataaaatagaaatgtttattaataaaacttgaaatttgtcccagaaggataaaaacgtagattatttacataaaatggccaagatctgacaacagaactgtttcctgaagatttacttcacagattattttgaaaacaccaactgtgttcaggaaaattttctctcctttttttcataaaattttcaaacaagtgagaatgctctaaaaatgatggtgtggagcctagagaaaatgttttctgtgtgctatagatgaacataaactatatatatatattactttcccaggttgaagtgtttctttcaaaaataaaatttgattattttcaattttttgagggatgctgatttttaaaaaggaaataaagagaaattattaggaagcatatacacagccagtgagaagaggaaagaagaaaaggccaaggccagaggaagggggtttggggtgggggaaaggaagggtacagaccctcccaaataaccgaagatgggtaaactccaaccgcaaagcgatgatgccacttgtgggccctcagattggagaggacggagatgagtgacggggctgtgcgcactggggcaccgcgcacagacgggaggaggggggtgtctgtgtgttccaaaggggggagtaccagttaactggccgccggcccgtgggggttggtgagaaggagggtgagcttggcggtgacgcacggccctcacgtgaccgggagctgcagagctacgcagccttcggtgcagtcgtcactcgtgtctcgctaccagctccccgctgccctgcgctcggcgggctggcatccggcccgggggaaagcggaccaggtaagggccccggggcccgcgcgccctggctaggccagcagaggctcaccgacccccccgacgagcgcagaacagcgcaggggatccccgccagctttctccacaccccaacattcttgggaac

SEQ ID NO: 44235 - DNA, 2300 bp, Homo sapien
gaaatacataagttagcaataatggatgttgtcctatcttaaactattttaaagtctgaaaggaacatatttgggtccacttttaacgtttaattccattatgtcagtctcctttcctcactcattctttctttcactcataggttccctttggcataaaatacaatgagaagtggctgctgaatttgattcagaatgaatgcagtgtacccttcgtcccagttgaggtaagaaaggaccgtgaggcagacgagagaaaacaggacaggttgggggctggatgagcagagactctggcctcatatttcatttctcttgcaactctccctatagtttcactatgaaaacatgcatgccagcttctttgtggagaatgccagcatcgcctatgcactgaagaatgtcagtggcaagatttgggatgaggataatgaaaaggtgtgtgtcaaatgaatgaccagggctagcatcgagcaagagggcagggcaagggtaaggtcttgcttgatcttgggggtcagagttcctagtgtttactcagcccctcttgggttctctgcagatatcaatctttgtcaaccctgctggcataccccactttgtgcacagggagctgaagtcagaaaaggtggagcagataaaggtaacacagactcatggcaagttgttcacacaaagccagacccactgcttcttccccacctattgcccccttcaccacctcaacttcagagcctctgaaacccatctctaactctgcagctggccatgaaccaacagtgtgatgtctcccaggaagctcttgatatccagagactcccattttacccaggtatggctgagaaagtaattctatggtagatgagggcagaggtgtctgtgtgagatggagacttacggttggcaacttggggaggggttagtgctgatgctgtaccaggcgggtccctctcagacttctgattttctcctctctgctttctggagacatggtgaaccgtgatactaagatggcatcgaatcctagaaagtgcatggctgcctccctggacgtccatgaagagaacatacctacagtgaggccttaggctcatgctgggattgagggtgaaggtggaagagattagctaggaggctaattggtctaagatatcccctgttgggggccttcactcttagttcttaattcattcctccccatagcttttgcccttgaacccaaacagcaacaaagcctaccagatgcttgacattatgccaaaggcccccaacattaacaagctgaatttcttgaaaaataaaatgaggtgtaatactcagatagttctttgaagaaaaagggggaggagggttcattagggtagtgacaagaggcaaggaagtggatttgttggcaagggaggagactgagggtgcagggccctccagctgctctttcctgggtctacgtggttcttctgcataattgcaggtgatgtctgcaggggagatggacaagtggaaagggatagagccaggagagaagtgtgcggacagaagcccagtgtgcacgaccttctcggatacctccagcaacataaagtcagttgtaccctctgtcaccacctgggaccctgacctgtgtttgatagcgcccttctgcaggaggaggcagcactagtcttctgggaggaccacagaccctctccttccccctcgccccactcctctctctgtgtcactcattcatctgtgcttagacatctcctttccttcctctgacatggtccccttttcacccgctctgggatgtgtttcccacctgtctccacccagcctcctctagcgtgccctctgtgagtgtgctccaggaagcggggctcccccacttccccaggaccagcagtattcaggtgctggtgccctggaccgagaagagtcctttagtccagggcctcatgctgagacaggccttcctgcctccatgctgatatggggcttccctcctccgtcccgagaggggttctccttctcttgctccaaaaaggtcccctctcctgtcccaggctggcatgggggcttccctgccccatactgagggccgaggccctgggtggctgctgtcatgccatctcttcctctggccaatgctaggagctgggccctccttggggagaaacctgggtttcctgagtcaagggaccagaagcgggccacattcctgaggcaggagtggaaggcagagggcagaggaggttgaggagacagaaggacaggcctctcagggcactgcccctccttccctccttctccacctcaca

SEQ ID NO: 44236 - DNA, 2300 bp, Homo sapien
gtgggctttgtgcctgtgaaatcttttgtcacttccattttatttcatagtgacctgtgatcctattttgatcaagtattctagaccactgatagttgacaaacttctcaaatatcaaaattaagtatttttgaccttgaagtaactttgggatattatgacaagccctagaacttctgaaagtagttgtaaaagagatattacaccatcagcttatctgatatgttcatttatatgagaagcactgtctaaataaggaatgatggttaatcttctctgagttatatttacatggatatattattaatgtgtgttccgaaattgtataacattcctagaactctgatatgtcttggtataaatactatcagtcacaatgttggttcagaaataaccaaatttttttgtcaattgcatcactattataatagactttcatcaggtttttaataatggctattttcagacttgatgtccacagttaatagtattttttagtaaagagggggtttcaccatgttggccaggctggtctcaaactgctgacctcaagtgatccacccgcctcagcctcccaaagtgctgggattgcaggcgtgagccaccatgcccagcctaaatctttattttttttataaaacaatattatgtgaacatttttataaaacggtaaatgatatggtttgagtgtttgtgttcctccaaaattcacattgaaacttaatctccagtgcaacagtattaagaggtagggctttagggaagtaattaggccacgagagctccaccttcatagatgggcgccgtgcagcagggggcggcgctcgttggggaggcttgggcggcacaggagcccacggaggcgggggtgggggtgaggctcaggcatggcgggctgcaggtcccgagccctgccccgcgggaaggcagctaaggcctggagagaaattgagcatagcagctgctggcccaggtgctaagcccctcattgcccagggcagcagcgctggccggctgctacgagtgtggggcccaccgagcccacgcccacccagaactccagctggcccgcaagcgccacgcgcagccccggttaccgctagcgcttctccctctacacctccccgcaagctgagggagccagctctggcctcggccagcccaggaaggggctcccacagtgcagtggcgggctgaagggctcctcaagtgccgccaaagtgggagcccaggcagaggaggtgccgagagcgagcgagggctgtgagagctgccagcaagctgtcacctctcactagtttattccctctctctggcctgagactttaagagctacatttctggctctaatcattaggagtatccatctacattgactatactttattttgtctttaagacaatacttgattcttttctactttcattacagtgacacactaaacttttactttatattttcctggtctgttttttgtattctctctctaggatgggctgtagttaattccagtcacacgagtatttgcagaacattgtcttactttgccctaacttaagtaaaccccaaatattataagagtttagaaaagctgtgcatagaggggtcacccactattccatggttctcatttccactttgtttctccaggtcacatctgaatcattccagacaaggtcctatacctcattaagcctcagcaccttcaggaagctggtgattctgagttgagagtccccttgtgaggaatacatggagaaaaaagtaatgtagcaagtacagagcttgagctaccataggcactctgagtctctgagtctctgagtctgcagagtaaatgaatacaatgtaatgcactggagatgaccagcaagctgagttttccgtgtttgtttcaataagtatctgggtcctaggcctcatgattgtgattgttgctaaccacctttgcaggagtggctacattagaaacatctccctgggtgttaggctggcagcaaactttggggagtggtaagaacaggaagttaattctgtgactcctaggacactcctctctatgcttggggaaggaacttcctgtaagcaaggcttgaggcttgctctcgccttcgtcagcagccctcctcaatcttctccaaactcccgtccccaggccacacagattctcctcaagagagccctataaggacattggtaaaatgtcactgccttcaggacacactacgggtgagttggccagcatgaggctggagtctcaggtctcacagggcaaaagggactgagcccccttccccac

SEQ ID NO: 44237 - DNA, 2300 bp, Homo sapien
tgtgtgtgtgtgtgtatggagatggggttctccctatgttgcccaggctggtctcaaactcctgggctcaagcaatcctcctacctcagccccccaaattgctgggattacaggcctgagccatacaactcacattttacctcttctccagggaattgttctctgccaaatgggagccaccttgctccagagactatgctctgctccacctacagactttgatctgtgactgacgctgagctacaaaaagccagtgacttactgtcaacgtgggatgacttgtgtgtgcttcagagttttcaggtgcgattaactaaacttaatctctagttaaaccccattcttcatcactgccctgctccccagccctgtcctgctgcctttacttcctttaacctgagagagcattacaagaaactacattcataaggatctctgttccaagttctgcttctagggagcccgacctaaaataggaagggtctctttatagaaatatttcagctaaaatcccaaaaagaggaaaacagaaagagtctttgctttcccttggacaaacttgaattgaaattgaacccaaattccaggatgcttttctagaattagttaccatcttataggaaccacagagtaaagagataatgtgttaatgacaccactgagatccagactgtaggaaaatacagaacaaatgactatttcatcaataattaaagaaaaaattaaaaaatgaaaacccacagattaaaagaaatttaggaaatttggcaaccaatcaaaatgcgcatatcttatttgtatcttgattcaaacaaactgttaaaaaaaactataatacaattgggtatttgaacacagattagacataaaatgatattaaggaattgtgaattattaaatgtgacaacagtattgtggttatatgctaaaaagaagaaaacccttatcttgtagatacatactttgaaatatttatgcctaaagtgatattatgtctagaatttgcttcagaaataattttaaggttgggaagcgggtaagataaagacgaaataagattggccatgagttgttaactgtggaatctgagtgaggactagtacatggggtttgcattatactattccatttttccaaatgttcgaaattttccattaaagttaagataaagttaaactataaagactgtttcttaaacaaaaaaggggccgggcgctcacgcctgtaatcccagcactttgggaggccgaggcgggcggatcacgaggtcaggaaatccagaccatcctggctaacacggtgaaaccccgtctctactaaaaatacaaaaaattagccgggcgtggtggcgggcgcctgtagtcccagctactcgggaggctgaggcaggagaatggcgtgagcccgggaggcggagcttgcagtgagccgagatcgcgccactgcactccagcctgggcgacagagcgagactctgccccaccccccaaaaaaaggaacagaacagaaaggtattaagaagaattagaaaaaaaatccactgtccttgactcatttcctgtccccccccaaacgttctggtgtggagaaaaggatgagcattggtaacaagtaccacagtttgccattggggtgggcgggactgatgctctctttatttaaatttttgacatcttgctcatcataaattttcttgcaataattgttttttaaaatgttgcattaaaatgttatttttcttgactgctgaggaattttgcacccctttaaattctgcgcccgcgtcctggttgggagatgtggggaaaatcctgggagcccaggacagggagaggcaagtccccacagaagtgggaatggccaacagctccctgagaagacagcttccctcttggggaggcagaggaagtcccaagaatacacaaagacaggagagtggaagggccggccagtctggagatactaaaagagactccggatgaggataggggctgacccgaaagccccgcctgactccgggctgcaggagggggcgtgggacgggggcggagccgttggcgatgacaacagccccacgtgaccggccaacactgagtgttgtctcgctctggcgtcagagccgtcgtggctcgttccattctcggcggtggtacctgctcccggtggccctgaggacgtgtgggccaggggcggccccgaaattaggaagcggagggggagcaggtaaggaacccggcggggggtccctggggttggtgtgagggagtggctccggcctgcggatgcccaccccgggggag

SEQ ID NO: 44238 - DNA, 2300 bp, Homo sapien
attaaagggagagagggaggcgctggaggcaggaagtccagaagtgaagcaatggcctaaatctgttcatgaatgtttacagcagttcttttcataattgcttagagctgggaataactcaaatgtccttcagcaggtgaatgaataagcaaactgtggaatagctaaataacagaatactactcagcaaaaaagagaataaactattgatacatgcaacaactcaaatggatgtccagggcattatgctgagtgaaagaagccagtcccaaaagaagccagtgcacaaaaattgaaaaatgaaatcatttacataatattctgaataagacaaaagtgtagtaatggggaatatattagtggttgccagagtttagggaaggcagtcaaataggactacaagagacagcatgcaggagtttctgggggtgattgaactgtattctgattgcagtggtggttaaacaaatctatacattggttaaacttcatagaagtgtacacacacacaaagtccattttgctgctgatgatttttcttttaaaagatcagagttgttcctcactaaatggttacatttaaaagagtggaaacatttggtgataggcaatgattaaatctttataatttgctagttatatttatattaaaagctctctctcaaacaatagaacatttatccctcaagtgtggaagaaatttgtcatgcttcaactataaatcattaagtccaaaaaatatttattttttccaaaccttcttttctcttctctggtgggtgttcttgttggctaaggcatcctgctgtgaccaccctagacaaaagaccccctctgtcttcttctgactctccagctggctccattggccagaatgccactccaggcaccaccatccttccaagtaccagtggattctgagttgcagggatatcagtttcctgtttaatattattttttacagcaatgttgttctctttgctttctaatcataacaattatgcatgtcaatagttcttttaatgggacacagtggatgataccagactatctcaagagtgccatgaatgaaaatgccatgcaaagaagcctcaagcctgatggtgagatacagagaattctcttttctgagtgtttcatgagtgtatgagttatttcccaacaacgaaatgttttccaagaaacatactactttgagttccaaaagaattttactcagtggaaagcaggcttttctgtggacttatctgattaacaagatactgaatcctatagaggaaatggggaggaagtctgtctgaagcctccaagtgaaaccttagtggatgccaccagtggtcatcaatgaaaaagatcagacatccaacacttgataacttgagttctgccagaaatagaaagagtagtagattacctatacaaaattgctaacaagagaaaactaggcctccttccacacattaatttgggagtcaattttttaagtgctgtttggtaagattttaaaaaattctaacacatcaatatgttgtgaatattgtcatttcatttccagccattagaaaacttttccaaagtcttacacattgatataactaatttgtccttcatattaagtgttacatattgcttatgaggcatccgttttctgataccatttttaaaagtatgctgattgctgaaaacatagaacacaacagaaaactattcaagaggattagtcaaatcctccactttcaaccttagattcttttccagccccctcttcccgatctaccacctttgcccatttcaatgctggataggattccaggggaaatggtggactgtaggggtcttggaggaggggaggtgggagtattgggagcagaagaaagagatgattcctcaaagaaggagaaatggtcgattacccctaaaaggctgatcctcctggtaatctgagaaaggcgaataaatactccagggcgaagataacagtttattgtctccgattggcaaatacgaaaaaagattgacagtatcaagtggagggaacgcagcgggcgggctgcagtgttaatgggaggggtaactggggactcgagctcagtgatgacgcgactctcacgtgaccaggagtcgacgtgtgcagaagtccttatagtccagggcctgtttccctgtagcagctccttattgctggagaaggagaaaagtgcccaagatcctttcaggttagtataaacgtgggcgctgacttggagaccctggggtcgaggaggccgagagcagaaagcaagcggggccggcactgcttt

SEQ ID NO: 44239 - DNA, 2300 bp, Homo sapien
ccagttactcagaaggctgaggtgagaagatccctttagcccaggagttgaaggctacagtgaactataaatgcaccactggactctagtctggacaacagagtgaaaccacgaccacacacacacacacacacacacacacacacacaagtttgaacataattttaggggattcatagtttaataatgcctgaacccaaggaatagatgagctctctttaacatggctcagctgctatttgtgtcttccccttcttatctctttgtcaagtagcttcttctttctgtcctttatggtttcctctttttcatgatgtcaacttgcttatataaaataaaaacatacatccacacaaaaacttatacgtgattgtatatggcagcattatttataacagctaaaagatgaaaatgcctaaatattcatcaacatatgatggataaacagaatggggtgtgcaaatagaacaaaacactattcaggctcctagggtacagatcttcttctcacaagagtgtgcatactccactacttcctaaacatatgcaattttacatgccctttcaggtggcccacagacttcatcaattgggaatacttggtctaggtcaatatggacagcatggcagaactccttagacactggcctaaatttgctgagacagtcataggttagtatggactggcaggcagcaatcctgcagcaaggttaggctccctctgggttccctgaagatacagagtttgggggtgagaggcccgccagactgcactttttaggctaggcgggaggtaacagacagggtctagggaggcttccactcaggcactgtgaataagggcagagagcaggcaggttgcaggggactctaccccagcaatcacttcaggcctcatgaacaccctcagctgcaagggtctagaagagatctgttctagttttctagaggcatgaacaatgctccactctgtgctggggctgggttatccctgtgggaattagggggagggaggagggaaggagccaaaggcatttactcatatcaccaccttggtcacctgtccagttatattcttggacagatgactcttgagcaacagagtcatgtgcctggggatgagaaatgcaggggatgagaaattctagaatatgagggggtggagaagaacaccttcccctgatcttggcagggcagggaggataggaccatttctgcatccttcacatctcctgcagccttggtctcacagctcttcccttcccctagagctaaacatttgaatgaaaatagccatgagccaaattttttaaagagacatttttgaattttctttcaaccatcagattccagcaagtctatttagcactcagtaatcgtttgggaacattaaatgtgtgtgtgtgtgtgtgtgtgtgtgtgtgtgtgtgtgtgtgtgtgtgttaaatagaacgtgagagaaccagctatttatgaaaaatttctaatgtatattttgcttgttgccaattgaattccttgtgtatatggcaaaagttaatattatgaacctaatttggtctctcttctgagtagaaaattttgaaatcttttaagtttttctctctcttaaacactttctcataaatgaaatagctttatttaattttgtgcttataagaataacccatgctgaggagagtgaattaaataagatcaaaaaaatttaaaaaaataaaacccctattttaactacttgtgtccctacttgacaatccaccttgtacccattatgagaaggtctggttcacaggcagaatgaacatcagtggctgcgtgtagaattagatcgagtaggtgccttcggataaaaggagagaaagaaaaaaaattcctctgagatgtaccaatggccaatagctctagaagaaggtgcggtccctccctgataaccacggaagaataaatacatactacacagagaaagggccacatttgacctgtgggattagcaaagaccaaaatgagtgacagggccccgtgctgtggggcgagagagagagctaagccggggttgggggtgctgagggcgctcagacggacagactagtgaagggaagaagtgggctggctcctgacgcactttctgcgggtgggaggggaactagggacccgagcccactggtgacgtttttctcacgtgatctgaagccgacgtgtgcagaagtccctctcctccaggtaccagatccctgtttccgtggaggaaggcagacttcagactgaaggacagagaaggcaactgccctacagccctgcag

SEQ ID NO: 44240 - DNA, 2300 bp, Homo sapien
ataaatgcaatcatgcagaaaacactcaattgtggctggtatctttatagatacaaatttttttcatttttttgagattcatccatgttattgtttgtatcagtagcttgtcacttttttattgcttagcagcgttaaaatgtatgaatacatcacaatttgtttatcacttcacttgttggacatttagtttttatcaactttgggactatcataaaggaaatttctatgaacattcctatgcaaatatttttgagaaaatatgttttaaattctgttgggaaaattccgaaaagtggaatttctaggacatatggtaagtctaacttttcaagaaactgccaccaagtctcagagtggttgaacttctcaccaacaatcagtgagagtttctgctgtttagtattttcaaaagtgcttgggactgtcagactttaagttcagcaattataatgggtgtgcagtgatttttcatcctggctttattttacatttccctgatagttaatgaggttgaacatcttttcatgagctcattggtaatttgtgtgtgtagttttgtgaaatgtttattcagatcttttgatcatttttactgcattatttgccttcttattttatgttttcgaagttctttatatatgctctgaattcaaaaccattgtcagatacaaatactgtgaatatttactcccagcttctcacttcattttcttaaccatgtgttttaaatggtagaagtttttaatttggataaatccaatttcttatttttttcttttgtgatctgttctttttgtgtcctaaggaattgttttctcaaagattgtaaagtttttctgtatgttttattctagaagttttctaatttgagcttttacatttaggcctaggatccattttgaattaatttgtgtatagtataaataaaaggcaaggctcctttttttcctttaagaattctgttatttcagcaccattagtttaaaagactatactttccatatagaattactttgatatctttgtcaaaaactaattaacaacatacgtatgggtctatttctggagtctattctgttctattgatctacaggtctatgtttactactacactaactttattattacaccttaagtcttgaaataatataatgtaactctcaagatttgtaggatattttaaaaaaattatttgtctattctaggtcctttgcattttcaaataaatttatgagtacgtttgtaatatttatcttgtagctgcaaccttcttaaaatcaattcttactcctatagtaggtttaccgtagatgtctctggatttcctaaatacatgattacttgatctttaaataaagacatacttatcgtttgaaccagaaatttgtgaaaaaggccttttttttccttttagttatgaaaacccaacaaggttctgtagcactacaactcactagctcatttcatagaagggcctcatgtgtccaggggcccctcaaaaggggagccatcagctgccctgtccttttccaagttctaaaaaagcagctgcgtgtagagtctatatttatataatgacttaacaggacaggtggttgggacattttgcccaactttaatcccgtctttcaagtaaaaataactttttttcctttttaaagaagtatattaattttttgtgttttacaaaagaaataatacagaaaaggtattaagaatgagaaaagcctactctcttgtgctcctttcctgatacacctcttccactcattttagtggagagaaaacggagaatattggtaggaggacagaaggaggtagacaggcagaaggaggtgaatcctgggagccaagggcagagagaggcaagtccccagagaagtgggaatggccaacagctccctgagaagataccttccgtccttcctgggcaagcaggggaagtctcaagaatatacagagaaggaagagtggcagagcccaggctggggatgttaaaagggactcccggtgaggatgggggcgggcccgaaagcaccacctgactccgggctgcaggagggggcgtgggacgggggcggagcctctggcgatgacaacagccacacgtgatcggccaacactgagtcttacctcgttgtggcgtcagaaccgccgtcgctcgctcccttctcggcagtggtacctgttcccggtgtccctgaggacgtgcgggccaggtacggccccgaaagtaggaagcggagggggagcaggtaagggacccggagggggtccctggggttggtgtgggggag

SEQ ID NO: 44241 - DNA, 2300 bp, Homo sapien
agaaataagaaaaaaacacattgaaaaggataggaaggaaagttttacattacccacatcaccccttcctgaaccccaggctgcacagcttggaggtaccatccacttgggggaaggagaaggaagtgaacaccagactttttcttggatcccaacactaggcccatcccagtaatacccagcactggacccgcccccatggtcccagactctaggccagtacctgcagactgagcctccaggcctgctttagcactagtctggatcccacagccccaggctccaggcctgctctaaaaactcagtgtctaggcctgccccactgccaaactgaccccctgggctgcaggcttcagcttcacccacctcccccatccctggtgccagacctgcccccacatatttaggcttcaggctgccttggtacttgtcagtcatgtattaaatgttttacacatattaaatatgtaatttagtcctgaaaactctgtgagatacttcaaactattagcctcattttatagatgaagcacagagaagttgcagtatccaagttttacattcaagtttatacaaaagctaagtaagtacaattaattcaaactaggatttgtccaatgccattcttcttactaatatgcaaagtcttcaacacccgaatccttcagccattttataactctgagtctaaccatctgcatgaaaagctgttcacagaggattcaggaatttttctccccacaaacgaattttttgcctctatcacaactagtcattccttaataactgtgacaatgatgctctactgtttttaagacttttttctgaccactgaacttttttctggagtcatttatatcaaactgattagtggtaactttatattcataatgagctgcaatcttcctaaaaacaacttatgagaagtttacacatctccctttctattgcatatatttcaagctaacaaatcaagagcaaatctacttagacaagtacccaaatccttagcaacaaaaagtttagtgtgttgggtggctaaatgtgactaatttttgttagtactacaagtagctttcaatacatcagtatggctaaataaggtcatggaaaacataaataggatggagatgtctagggaaaatgaaaaactattcttttctgaatgagagtgttgaaaaaagttgggatattaggggtacagtattgaagaaaaaagggttatgtgtatggtataaactggaagaaagagggcatgatactgagctcaaactagttaaaatttgtgacttacagttgcgatctggaaatctaagggcaaggtgctgtaggattatggtctcagtgactcacctaatggaaggacctcacatgcccgggagcccctcaaaagagtaggttccaactgacctgtacatcttaaacttcaaaaaatatgtctgcctaaagggtctatatttatattatgacttcagcagcagaaacaggtggctggcctttttatcctcctatctggaatctttttccaaatgtacatatctttatcatatttctgattattaaaagtatataataagtttatggaaaaattggaaaagaataagaaattatcaaaacaaaagtaagaagcacaatccaaatcattacctcctttcctaattcaccccattccctccaatctggtttcaaggattggactccaagggaaatgatggctattagtggctgagaggcgattggatggaggagactgccacttttcttttcttgtagcttagaaaaggataagtaatcctccctctcagcacaaccacaaaaaaagtaacaatggttaatataactttgggaaaatgcagcccctccctggtaatcagagaaaggcaaattctgaccacagggagaaggcgccacttttgacctctggaattagcaaagacaaaaatgagtgacagggcctggtgtggtgtggggtgggaggttggtaagccggtccacttctgcagcgctgctggtgggaggggaaagtggggaccagagatgggggatgacataatcctcacgtgatcaggagctgacgtgaaccgaagtccttatattcccgggcttctttctcctctgggtaccagctccttactgccctgcagacaagcgtgccgtgcgtgcttgtggccaagggaaggaagaggtaaattccttaaatcccagcaggttggagtgaaggaaccactggacccccggggtcagtagtgggtgaatctaatgactggaataggtccagacttgctttcccaaaaccgctg

SEQ ID NO: 44242 - DNA, 2300 bp, Homo sapien
ttatggttttaggtctaacatttaagtctttaatccatcttgaattaatttgtgtaacttattagtaatttaaatatataaatacaacacttagaaaataaaagttctctttatatgaaatacacattctcaagtatatcctatgatgttcaggatatattcatctgcatttctaatgatataaaaatacagtaagaccctgaaacaacttgagtttggatataacatgattggtgatagcaggtggggagagagtaaaatggatggatgatatttaagtccaagtgctcagtgaagaattgtttgtggcaacaaatcacagctgagtccttgatgaatttgggttgtgtagccagctagccaaatagactcacatcagtcattccatccatccatctctcagtaacataacctggaattttatagaatgaatttctggacttcacttatcatgttatcatgtaatttaattgtatactcatattttaaatacacaaatatgtatactgttacaaaaatgtaataccacatataaaattaactttcaatttgcctttttttgtttaacaatatacattgaacaatttttttcatgtgagtaaatgtaactccacatcattttttcatcactgtataatgtggctctatatgaatgatcaaacttttcttaaaccaatttccttttagaaacatataagtttttggctctttaaaaaaaacactattgccacaactactacaatgaccatatttggcataggagtattaatgtatgataaatctctagaagaggaattgatgtgtccaaaagcacatatcttctaaagtttgatattgccaaaatgacttccaaaaatgttgtactacttaatagtctcacagtacatgtgaatatttgttttaccatatgctcatcaactctgaatataatcaatatttgtcttttctaattgtacagatgaaaaattaactcttatttttattttcaatagatctcaattctatgagcatatgctattattcccttctttcagatgaggaaactcaggttcacaatgtgtacctgacgattaattgatgattcttcaggcagcacagcttcctggtaacaccaccatgaggactctggaatgaaacattactcttttttaaaaaattctgtatcattttcctcacaaaacttctaatatcacaacagctttcactttaaaagcacttactatatgccacatgtacaataagcactgtacatgtattaactcatgtcattaaagtaattttttctttgtcttttctgactataaaaagataaaagttgcccagtgcagtggctcaggcctgtaattccagccctttgggaggttgaggcaggaggatcacttgagcccaggagttcgagaccagcttggggaacatagaccctgtctctacaaaaaaattaaaagactagctggacatggtggcacacacctgtagtcccagatacttgggagtctgaggcaagaggatcactcgtttcgaggagtttgaggctgcagtgagctgtgatcgcaccactgcaacccagcctgggcaacagagtgagaccctgtctcaaaaaaaaaaaagagaaagaaagacagaaaaaagaagagagagagagagagagagagagattaaagttacctttttaaaaaggatatagaagtacgaaaaataaaaagtaaaaattgcattcagaaatctcactcttgttccagggtctttttttgttgttgtttcacaactgctgccaaggccaccctgctctacaacagctaagaaccagattgcagaggaaatggaggctagaggagggacgactgatggaggagttatcctgggagtggaagaatggaagagacaattctcgaaagaagtagaaaagttcagtagctccagaaaaagaggtagcccctccctagtaatcagagtcaagcaaataacatttttcccgctgggataggaaacaacagaaaagactgacagggccaaatgtataagtggggggcggggagggagagagggtgggcccacttctgccgcgcttttggtgggagtggaaattagggacccgagctcactggtgacgtagatctcatgtgaccaggagtcgacgtgtgcagaagtcctggtaatctggtccttgttcccgtctggataccagcttccttcagcagcgcaggcggtggtccctgaggcccgtggaaggagtcaaacttgcgggaattttgcaggttggtgtcactgtaggtgttgactggggatttctagtgtggggg

SEQ ID NO: 44243 - DNA, 2300 bp, Homo sapien
tttaaaagacaaatattgagtgtgattttataatttgatgttttggagctatgtactaatatatccatatacctctagaagaatatatatgtaattttatatggaatacatatctccaaaacgtctaactacatacacactgggcatatactcttcctttattcactgtgtcatctggtttagcagggtaggaaattctacaggagtttggggccaaaactagagttagtaagcatttgtctggcttgtcttgcctcagtgctgcatttaatgcttttggttccttatcataaacaacagatatcaaatattttttataacaatgccacttttctaaagacatctctattttctagctgtgataatttttttaaaaatgatttcaagttggagaaaggaacatttgcactcaggataaggttcagtctcaagttaagttgtttcacacaccccctgcttatttctaatatattttgaaacattcgcaccaaagggtagatggttttgaaactactttctgcataatatgtacttaacttctgagctcatactaagaagatatttgtagggatggtttgaaaggtttggaaaggaaagcagggaataaaagactccctttctctgatgactgtgatatcaaaaacatcaaagttacataaaatggtgaagatctgacgaccagactgctccctgaagattcactttacagatcatttcgaaaacaccaactgtgttcagaaagagtcccgcctttcaggcgcctgtagtcccagctactccggaggctgaagcaggagaatggcatgaaccctggaggcggagcttgcagtgagccgagatcgcgccactgactccagcctgggcgacagagcgagactccgtctcgggggaaaaaaaaaaaagaaaaagaaagagtcccgcctttttatatatttttttcttttcttttttttttttttggagacggagtctcgctctgccgcctagactgaagtgcagtggtgcgacgcggctcactgcaacctctgcctcccgggttcaacgattctcctgcctcagcctcccgagtagctgggactacaggcacgtgccaccacgcctggctaatttttttgtatttttagtagagacggagtttcaccgtattagccaggatggtctcgatctcctgacctcgtgatccgcccgcctcggcctcccaaagtgctgggattacaggcgtgagccaccatgcccggccaaaaataaaattttaaacgagctagtatgtatcaaaagtaatggcttgatgttgtgtggagcccagaaaaaatattttgtgtggtacaggtcaacataaacaatgagagatttcattgtgcaggataaagcatttccttttttttttttttttttttttttttttttgacagggtcttgctctgtcgcccaggctggagtgcagtggtgcgatcccggctcactgcaacctccgcctcccaggttcaagcgattctcctgcctcagccccccgagtagctgggattacaggcgcacgccaccacgcccagctaatttttgtatttttagtagagatggggtctcaccatgttggccaggctggtctcacactactggcctcaagtgatccacccgcctcggcctcccaaagtgctgggattacaggtacgccaccgcgcccaaccagcatttctttcaaaattaaaaacttataatttataattttctgaagcatgcagattttttaaggaaataaaaagaaatatatacagtccactccacttccttgccccgctttctgacaaatgccctcctgcctccccaccttagccctcactctaaattttctagaagggtaggaattcaggggctacgtgggcattgatggctgtgcacacgcaaggggtagaagtgggagtgcagcgcaaagcatgttgccaggtagaaaaggagagaaagcagaaaaggccaaagccaaggcctgaagtgagagggggcagtggtggaggatgatgcagaccctccctggtaaccagaggagggcaaactccaaccgcagagcagtgatgccacttgtgggccctcagattggagaggaccgagaagagtgacagggctgtgcgctctggggcacctcatgcagacgggagtagggaggctgttttttgcgcgtgcatatggcggtggcgggtggggggaagggggagatcctgctgcactggccgcccaagttggggggcgagctcggtggtgacgcgcggccctcacgtgacccagagctgcagagcgacgcagccttc

SEQ ID NO: 44244 - DNA, 2300 bp, Homo sapien
attttttaataggatttccatttgaattgctctgaatctatagatcagttttggaagaattgacatcttaacaatactgaatcttctcagtattgtttgtgacccatgagcatggtaagtcctccacttatttaggtctttaattctctcagcaatgatgtgtggtgttcagtgtacaggcactgcacatctgtggacagattgttcataaatatttcatactcttgatgatgctatacatggctttgtttgttaaacacaattgctaattactatattttcacagtactatcagcaaccaagtgtttaacatcagtgaggcatttttttggttgaaagcacagcttactctaggatggaaaaggtatttgatccttaacctgtgtttacctgtatttccgtatctgcttttacaagtcattggcgatatattgaaactatggaggaaaatgttccagagacaattctacaggtcatcttcagaaatcacaccaaaagaacatagtttagtagctttcaactttatatgtgtggtcagaaatgattttgttgcaatgtgtggctcaggctggagtgcaatggtgcaatcatagctcactgcagccttgaactcccaggctcaagcaatcctctcacctcagcctcctgaataactgactacaggtgtgtgcccccatgctcagctaaacttaaaaacatttttcagagacagagttttgctatgttgtttagacttctctcacactcctaacctcaagcaatcctcctacctcagccatctgagtagctgggattatagccacgagccaccatgcctggcgagatttacttctttacccaccagtaaatcaacctcaataaattcttggaatttggagtggtgagagggtgagcaagcatatatgtatgtgagtatgtatacatttgtatgtcactgaagctgtcaggaatttttattgtaaggactacttgaggttaattactgtgcatcatgtcaatcctatttagttcctagtacatattaggaacaagctcgggatagtggtgtttgttttttctcagctttccttggccagaatggttaccatggtgactcagtgactgcggtgtgatttggtgcagactgagcatccatttaggattcttgcccgaatctctcacaccacattgcctgtccatcagatatagtattagcttttcatcttatgtgtaattaatcacttttcaagggctcagaagaaagttgcttcacttatctgaggttaagctacagataacataaaaagacactaagtaccttgaaataaaaggaaatgagttgttgatattcctctcctgccccaatctctattgggaggttagaagagaaattcttggaatcatacagcatgtgctcttttgtgtcttgcttctttcagtcaacataatgtatgtgaaattaatatttattgtggtctatattgtagattgcttattctcattggtgtaaagtattatattatttggatatttcacactatatttatctgtgatggagatttgtgtattttccagtttttgacatctcatgaataatggtgttatgaatgttcatgttcattcttttggatgaacatatattttcttttttaaaaaaatcttattatcaataatatttgaactatttaatatctgtcatcttaaaattattattcataacactttttaccttgtagctatagacaaatacattcccattttagcaggttaatgaaattatctttataatactatagaagcatttatttgaagaataccagaaggaacatcctgaaaaccaagaactcaaaatgcctttttatcccaaagacatgttttacaaatatatacccattcatccatttgttttcacaaatgaagctacagagaactttgaatataatgatgtgcagcaggggcttattcctaacatatttaaaatttaggtcaaccaaacttctctgtggaaactgagttgaaatccgaaatcttacaatcctaatttcgagccacattcattttaacttaattttaacatgttttgcaaaatgttccaatataaacttaatagttcctataccaccaaacatggatcctcatgattttattttctagattggctgataggctgaataatctcctgtagggtaagaagtgtcaactgtatcaagcacatggaggtggactggctacaggagaaaggttttccaaatcaaattccaagtatttctttctctttttatattaccattaggagaaataactaatgtagatgacgggtt

SEQ ID NO: 44245 - DNA, 2300 bp, Homo sapien
agttccactaattagtaagctttctcaggaggtagcctgaagagtggaagagtgaagtttttatttatttatttatttatttatttatttatttatttatttatttatttatttgagaaaggcaaggggacagagggctgtgcagaagcatttctgatgtggaggacaagcctgagcaccacggttgccatagaaaccagaagtcattactgtgaccttgatgacttttaatagagacccctgtgggctggtgagaatagcagggtcccgccttcaggtgtttgggactcaactgagggtgtgagtgccccacagtgggggctgaagtgccttgggatgtggggagacgaagggatcccagatctaagtcccctcactcccagtttgaaacaagttgctctcactgtttcatgagggagagagctaggaccctcctggccccagtgagtggggtgtcctgctcctggtgtcctggagctactttctatgtaaaggtgggacgtgggaggatgagacaagtaaggactctctgagcccagtgtccccctctgtaaaatggggataattatgccaacccgcaggattgctgcaagctgcagtgataacacaggtgcaagcccatagccctgtggttactgcacgatcaggaatgcctgtgtgaattcaggcctcttcttagtcctttacagatttgttgttaggagatagaggaggaaaggaggagaaaaaggccctggtgagaaacccattgtatcttctggttgtaatgatcactacccaattgtatcagtgtcactggtcactgacccagtgcctaagatggttcctggcacactgttactctaagaaagcacagtgattgctggattctctctgtccctgtgcagatcttcatcaggttattgaactcataacaggtgtatgaaggagatgggctttgaggatctgggtcgtgatggctgctgaagcttctacttcagatttgaagggcagcagtcctaaggagacccccaacacttccatccctggtgggatatgatgcctggctcaagtgagctcatagatctggacagaagcatgttgtggaatacctctgtgaggtttataatatagtctaaaagcagagaaactcctttgatcccatctttggagaagaggtttagcatgtggaatttcctttcatcagcagctatgtgctttgaagccgcccttgaggcccatgtttaaaatgcctttcgttgttacaaagcaatgaataattcatttggggaatcaacttgatgtttaacatgtatttgaaataaatttacatatgttttctgcctgtataaataatgatcagtgattcccatgtatctctcagatgggcattgaaatacacagttggtcagaaggtcttccaagcaactggagattgtaatatgcatttttcaatggtaaccatgttattatccattctgtaatacattttttaagaaggcaaaaatgtacaaagtattagttaaaactgtcaaaatgtcagatacaaaagttcaatattttgaaaaataataatttccatataatttgctctattataatgatacccagtcatgtcccctaaaataaccagctaggcctaaatattattatcattgtttcccagaacataagattttcagttctgtactactaggactctctatccctcctattgccctgtccccagacaaacacaatactttgtcactatagattaagttttatgtcctagacatttatttaaatggaattgtagaaatgtttttctgcgtttgtttttgatttttggtttggcttctttcattcacccaatttatttttagatgtatccattttgttgcacatatcaatagttcattcttttttattgctgaatagtattccagtatatggctatatcataaattttttatccattcacctgttgttggatattttaattatttccaattaggatctcttgtaaacaaagcttctatgaatatttgtgaataagtctttccatggaaataggctttctttctctaataaatacttaggagtgcaatggctggatcatgtggtagatgtaagattaacattgtaagaaactgcctgtttccaagtgtttgtaccatttttcattaccaccagtaatgtatcactgtttcatcctccacaacctcgacagagcttggtataatctgtctttttaatttttttaattctcacaggagtttagtaggatctcattgaaattttcatttacatttcccttataacgagtgatgctgagcatc

SEQ ID NO: 44246 - DNA, 2300 bp, Homo sapien
agtgcagtcaccagtacaatgggtttggtccttattcctggccccttactgcccatctcctctttgatcctggcctgttactactggataagaggagaataaggatggtgtgaggaggagaaagtttgaaaaagtagccactctttccccttatcttgagggactttaaaaacaaatctagggtcatcggcaggttttgcccagtccctgaggaggacattaggggaacatgagagcacccagacttctctttagtgggtcatcagtccagtccttgcatgctgacccgtggtccatctgagagatgtgataggccagccctgcccctcatggcttctactattactaagtaataccaaaacccatccataatttaactacctctgcttccaagatctttccacacagaggtaagtgtgaacaacatcagcctttggaggttgaaactaggcagggaccatatggctttgggtggacctgatgcttgatcagatattttgtcatgcactataaggaatcttgttttaagaataaataatatgcatagtcattacacttgttaaaataattgtgaatagtgaattctgtcccttctagtaactgagagtcctttcccagatggaatcttctcacagaactgaaggaccttacccatggccgggtaggttttgggttaggtctgacaccagaacccaggacgatctcttgaatttcactccagcgtctgctctatcagacatggcattagactgagtgtttgagcctatcagagactcatagaaactgtgcctctctgcattaacctgcttgccaagaaatacgttaaaataaaatctaaatgctatgttgatttgcttgatctccctcaatattcacttggttaattaattcaaattaaaatgtgtaagcacatttttctcttaacaaactccaacaactggggatatcagcaatcatgctgaattccaggggctgcttctccttttcactgtctttgaatttcttcttgtggcctcaaacctgaacccattttcaactccataggtatgtggttttgtagacaggagggtgacagagggattacaatggaagtagcagtgctatatttgtgtttttatcccatgttgtttgaagctgtaatttgttcattttcatttctgtgttgtaatgcattataggactataacactattcttctgttgatgaacatttgcattgctttatgttttgtacttaatgatcaatcttgttcacatcttttggtggacataaaaactcatttctgttgcatatataccaggagtgcaactactgagtcagagcatacatgaatgtttaaccttagtaaatactgacagctttccaaagtgctttttcaatttgtagttccagccagaatgtatatgtgggttctagttactctgtatccttaccaactctccacattatttgtatttcaactattatatgcccatttcacagatgggctaacccctgggcctagaagaggttacttttctaaagtaaataccaagtctgaattctagattctttccactatgccaggttttcaacttttagattatgagtttccagtactcaagtattggttgttccaattacacaggataacacttttgtaactttaaaattatatgtattttggccgggtgcagtggctcatacctgtaatcccagcactttgggaggtcgagtcaggtggatcacttgaagtcaagtgttcaagaccagcctgtccaacataggaaaccccatctgtactaaaatacaaaaattagccaggtatggtggcacatgcctgtgatcccagctactcaggaggctgaggcacaagaattgcttgaacccaggacgcagagttgcatgagccgagatggtgccaccgcactccagcctgggtgacagagtgagactctgtctcaaaaataaaaaataaaaaaaaattacatgcattttgagttacccccacaaatgaatagaatgatacctgtaccctgatatgcatctatattagtagtcactcaacatcacatctcaatgatgacgattgttgtggtggttgaggttaaattgtttcctttggtctaagacatgggctgacaaactttttccataaagggccagaaagtaaatatttcaggctttgtgggatatctatttatgatttattttactcctagtattatttcatcttttatacaggttattaaggttagtattgctgcataacaaattactccaaaatttaatcatttatattcaagaagagttcagctgct

SEQ ID NO: 44247 - DNA, 2300 bp, Homo sapien
tgttataaggatacatgcacccgtatgttcattgcagcactaatcacaatagcaaagatatggaatcaactgaaatgcccatcaatgatagactagataaagaaaatgtggtacatatacaccatggaatactatgcagccataaaaaggaatgagatcatgtcttttgcaggcacatggatggagctagaagccattattctcagcaaactaatgcaggaacagaaaaccaaacaccatgtgttctcactgggagctgaatgatgagaacacatggacacatgtcagggaacaacacacacaggggcctgctgggggcagggagggagagcataaggaagaatagctggtggctgccaggcttaatacctgggtgatgagatgatctatacagcaaaccaccatggcacatgtttatctacataacaaaccttcacatcctgcacatgtgcccctgagcttaaaataaaagttgaagaaagaaaattatcattgtgggtaactattagaagtgaaattactggcacaaaagatcaaatattaatttttttttttgagacgaagtctcactctgtcgcccagactggagtgcaatggcgtgatctcggctcactgcaacctctgcctctcgggttcaagcaattctcctgcctcagcctaccgagtagctgggattacaggcgcccaccaccacgcccagctagttttggtatttttagtagagatggggtttcaccatcctggtcaggctggtcttgaactcctgacctcaggtgatccacccgcctcagcttcccaaagcgctgggattacaggtgtgagccaccgtgcctggccgatatttttatttttaaataatttacaaagttgatcttcagaaaaatttcaccaacatattcaataagagcaggggagagtgcatgtgtccccagtccttcaacaaatctgttaaaaattttcatgtaatctaatctatcagcatttgtctctttgttgtacagtcacactgcgtatcgattggtcaacgacaacggacagcatagaatacgataggctatagtatgtagcctaggagtgtagtaggctataccatatagatttgtataactacactctacgatgttcgcaccaccacgaaattgcctgatgcatttctcagaacatatccccgttattaagtggcacgtgactataaaggccttccacaccaaaagcttatgtggagataaacggagtctacccataagagaacaaacaagtgctacttattcacagcttttttatagcaaggaagtcaagccaccatcatttgagtctggcagagattcaaagacaggcaggggagtgggaaagctttatagtggaaaacaaaaacacaaagacttcagctacgctctgattggatgttgttgacgtgaggaagctagaggcaggccaactagaggcaagcatcctatgtgattgaatatgggttcatatttgggtttttcttgtttgtcatcaggtcaaaaaaattaaaaaggccagaaaggctagcaaattgattaaagtcctgaacatttctgcagatgctatactttggctttttgagctgcttgcagcaaaggttgtgggtcacagttctattttcgtatgtggtctggtcattgtatattcagtttctcacttaagataaattaatcgttgttttattttgcttcaaatataactttattttttattcatttgaaaatttatgtttgtacatgtcaggaaaaagggacaatttcatttattttggaaaatttttcttaagttttttctaaagggcaatattctattctttatacagtacttaagttcacattcatacgattttatcgggtgggtctacgttatttcagtggaatttaagagcaacattatcaagactcctcttctggaccgcccaactcattaaaaaaaaaactgtgattttcattaagattctttctttgattaatttcttaacaagaaaaaaaggacaaaagggcccagggaggtaagagggtacctgctggagaggtggtgggtggctggaagcggctggctaggaggcggggcgtggggcggtggaactcctgggctgcggcattcacgtgatctgcacgggcgcagatgtaggcaccggtccgagtgcctgccctctgtccccgcggctgggtctcgtctgctccggttcctgggctcctaattcttggtccagcttcttccaggtcagtgtgcgggccttccacgctgccagcggaacactggaatggcggaaggggaacgggtacggc

SEQ ID NO: 44248 - DNA, 2300 bp, Homo sapien
tttttcaagagacctttgaaggaaaatctaccaaacttccaaatgccggcagggttgggggcaggagtgataaaattcacagctttacaagactgaatcatcccatccaggaatctggcatcctaactgtctaattatccaacaggcacatttcttttcaattatttcaaaattcagaatttactttagatcttcaataactgctaaaagttgatctgaaaataatcaggctaaagaccaaggccctttttaacctggcctgtggagtggtttctatataagaggtaattagtgacctacctacttcaagtactgtaatgaagatgaaacagaaaaaggcagtgggacaatatgatatatattaaggagagcaagacttgaggtagcaaaaccagaaagggatcttccaccatagaccaggagtggggagttgtttgcctaaaaaaatgtagcaagagtggagatggaagaaaagtgggaaaatccagatatttagaagagaaggtcaagattacttggtgggagggaggaagagggaatgagggatgattcccagatttcttgcttgggcaacagtgtgggttctggagccatctattaagataagagaaatgaagaggagggagttttgtgtgtggaaaagatcaaggaaggatggtaaaatcacttgggacatattgcatttgaggtccttcagggacattcaggtggatatatctaatcgttaattaaaacggatctgaatcaaatttatgctgaagttcatgtagaaaaacaaacatacaagaatgtgttggaaaaaagagaatctactgaggggacctagctctaccagatatatgaaattatatatcctctataattcaactggtatatggatagcaaacagaccaatgaaatagaataaaaagcccagaaggttttccaagtacatatggatatttgatatgtaataaaggtggtatctcaaatccctaaagcaaagatggactttctgatgccagaacaactgagaaaccgattggaaaaagaaaacaaaagatccatcaatactttatgccatacacaaatataaactctaaatgtaaagaaaaccatatgaatactagaagaaaacatgggtgaatgcttcttggaccttatgtaggaaaagatttcttaactatgaatcgaaatctagaggcaataaaagttaaataaatttgactactttttttaatgcatggcagaaaaacaccataaacaaagccaaaaagcaactgacaaactggagagaaaattgcaacatatataacagttaatgtattaagaaaacttgaaaattgaggtgagaaggaccaacaacccactagaaaaatgtggaaaagacatgaaccgacaattcacaaagaaagatatttaaattgtccttaaacacagataaggcaaaataaaatgccattgagatattacttctcaactatcatatcagtgaacatttaaaagtatgtcataggttatgttgggaagggcattgggaaacaaaacactcccctatatttctgatgggaatgcaaaaataggtctgagattctggggagggaatagcctggagatgtaaatctggaagtcattggtctttactggaaatgaatgagatcaaacagggagacagaacttgaggactgaggagagaggaggcccaggacagaaccctaggaacactgccactcaaggtggcagctcagcttcctggcaggcagcaccaccctgggctctggagtcaggcagagacagtcttgaaagcgggctctggagttctggggctgagcgctcttggcaaagtcgggtaccctctttgatcagctgtcacacctggcgataatggcatcagagagagataccctgcgaggatgccgtgagatgcgccaggtaaagcacctggggtcagaaagccaccccctcctcctcttctccgtgacccccctttgctacacaaacacaccccgaccccgaccgtccccagcctcccggtccttcggggttggatggtgaggtgggtcaggcaaggggggccgagctcgggtgacgcggcgctcacgtgacccgccgggcgcctacgtgggcaccagcccccgcgcccgcccgcccgccctgcggtccggtcctggcgcccgcgcagaaccagctgtctgagctgcccgggcagcgggggagcagcgagcgggcttccgcgagccggagaaggcacaggcctgtcccgggtcccggcaggtcagtgtgaaggtgggcgctgccggcggaaccacggaaggggtgga

SEQ ID NO: 44249 - DNA, 2300 bp, Homo sapien
cagtatattcagtgttttcagagacatttacacattcaggaatgtgtagaataatgaatgactttgaaaaaatatgtcacatcagaaatggctgaaataactggggaggttaaaccccccaaaaaagtcttggtgagaacataattctttaaggattatgtgagatggcatattgaaaatacttagtgcaatgcctggcataaagtacacaattaatcttaatattaaaaggatgttaattagtagtattgttagcactgtgtcatactattattattactattattatagttaatgcttatagagtgctttctatgtgctaggctctattccagatcctttacataggttgactcattgactcagttattcctcttacaattctatgaggtaggtactattattgtctccaatgttgtagatgaggaagctgagtcacagaagattgagtagattgcctagtgtgtctcacagaatggaaggggaaagaaccagaatagaagctgtggcaattttaagctgtcaaggatgaaaggtacttttattattttatacctgttctgtaccactccacagggcagagccaggaccaatgtgtgtaaactactgggaggcagattttaactcaacagaagcaaaaatcaattaattaattaattttaaaactctgaatgattagaactttctgagatttcagtgagatatcttataaggcagtgagttctccatcacaggatttaagaagaataaggatagaaatgaatgaaatgggacttctctaggaaagaaactatacaaatgagaaaccaacccttgatgaaaaaataagaaggcatagtgaaacttggttttaaagacacatctcacagagaaattggaaagtaaaacagttataaaaaagatatgaaggtaaactaatatttgtctaaatgctatctcaacacaaagttaatcagatatcagagaaaagcaacaaacagttcttaaaaggggaaatttcacatgaatttctgttcagaaacttactaaacagcctggctttaaaacaaaatcccaggatcctcacagatcagatggtcatctaccctgaaagtgtaaaacacagagggaagggaagtagtatgctctgtaggggaaagagcatctgcataagaaagtagcatccaggctgatgtgagtagatgagaggcaggcataaggttaaagatcataaaatactgttagataaaaaaaaatacatattgcaatgacaattgaaaatgctagcataattgtagtcctgctattcagtatgtggtcaacagaattattgcatagtttaatatggaatgccctccctgctgcatctatcttttggggtccagcagtcccagaactcaaatatttgttgatttagtgaattaatataaacttcctcaaccagaagcaccaagaggtggctggttaaggattgagagtcccagtaaaatctatttattctattatgaataactactgaataatttatatatatgtacacatgtatataaatatattttataatctattcagtgtgtatacatgcatatatatgcgtgtatatatatacacgcatatatatgtgtgtatatatatacacacatagagagaataatgccaagctctccaccaaggactatcccatttcagataataagtgttctggactgtttgtacttagatggacaaatacgtatttgatttatgaaaatcaaagtattcattctttttagatctacaaactttacaaactcaactctttctacaggtctcgaactgaatgattaccaatttagatctgggggctcaaaaaaacaaaatgtgatgtcaagaaaaagtgaaagattgtctcccatgaaagtgacaagagatgaaacatgctgaatgagcctaaatggacatgatggagatacggatgtggattaaaactgagagtgttgggatataaggatataatactgatttatgaaggtgaacagtcaaacgtcagtgcaggatctgaactgcaggggaaataaggggccttggtggctaaggaagggaggaggggagaaagaggtggtactaggggaagtagcacagaggaagaggcaatactacccgagactagatgcggaccgtctctggcaaccaggaaaaggcaaatacaaagagaggtgagtgacaatgcctggtgtgtctcgggtcagagaacactagcaggcactagcaggtggctgcggcagggccgcagatcaaagtggtaactggggatctgagttcggcagtgacgcgcgtccctc

SEQ ID NO: 44250 - DNA, 2300 bp, Homo sapien
agtattgttagcactgtgtcatactattattattactattattatagttaatgcttatagagtgctttctatgtgctaggctctattccagatcctttacataggttgactcattgactcagttattcctcttacaattctatgaggtaggtactattattgtctccaatgttgtagatgaggaagctgagtcacagaagattgagtagattgcctagtgtgtctcacagaatggaaggggaaagaaccagaatagaagctgtggcaattttaagctgtcaaggatgaaaggtacttttattattttatacctgttctgtaccactccacagggcagagccaggaccaatgtgtgtaaactactgggaggcagattttaactcaacagaagcaaaaatcaattaattaattaattttaaaactctgaatgattagaactttctgagatttcagtgagatatcttataaggcagtgagttctccatcacaggatttaagaagaataaggatagaaatgaatgaaatgggacttctctaggaaagaaactatacaaatgagaaaccaacccttgatgaaaaaataagaaggcatagtgaaacttggttttaaagacacatctcacagagaaattggaaagtaaaacagttataaaaaagatatgaaggtaaactaatatttgtctaaatgctatctcaacacaaagttaatcagatatcagagaaaagcaacaaacagttcttaaaaggggaaatttcacatgaatttctgttcagaaacttactaaacagcctggctttaaaacaaaatcccaggatcctcacagatcagatggtcatctaccctgaaagtgtaaaacacagagggaagggaagtagtatgctctgtaggggaaagagcatctgcataagaaagtagcatccaggctgatgtgagtagatgagaggcaggcataaggttaaagatcataaaatactgttagataaaaaaaaatacatattgcaatgacaattgaaaatgctagcataattgtagtcctgctattcagtatgtggtcaacagaattattgcatagtttaatatggaatgccctccctgctgcatctatcttttggggtccagcagtcccagaactcaaatatttgttgatttagtgaattaatataaacttcctcaaccagaagcaccaagaggtggctggttaaggattgagagtcccagtaaaatctatttattctattatgaataactactgaataatttatatatatgtacacatgtatataaatatattttataatctattcagtgtgtatacatgcatatatatgcgtgtatatatatacacgcatatatatgtgtgtatatatatacacacatagagagaataatgccaagctctccaccaaggactatcccatttcagataataagtgttctggactgtttgtacttagatggacaaatacgtatttgatttatgaaaatcaaagtattcattctttttagatctacaaactttacaaactcaactctttctacaggtctcgaactgaatgattaccaatttagatctgggggctcaaaaaaacaaaatgtgatgtcaagaaaaagtgaaagattgtctcccatgaaagtgacaagagatgaaacatgctgaatgagcctaaatggacatgatggagatacggatgtggattaaaactgagagtgttgggatataaggatataatactgatttatgaaggtgaacagtcaaacgtcagtgcaggatctgaactgcaggggaaataaggggccttggtggctaaggaagggaggaggggagaaagaggtggtactaggggaagtagcacagaggaagaggcaatactacccgagactagatgcggaccgtctctggcaaccaggaaaaggcaaatacaaagagaggtgagtgacaatgcctggtgtgtctcgggtcagagaacactagcaggcactagcaggtggctgcggcagggccgcagatcaaagtggtaactggggatctgagttcggcagtgacgcgcgtccctcacgtgaccaggagcctctatgtgcccaagtccctctcgtcccggtcttttttttgcctgtccaccatctccctattaccctttggtcgagagggaaagcagaagaagtaagttccctctaccctcttaaatcggtgtgagtgtcggcgctgcctagtaacccggggaatggggttgacagaatcgggatggcggagtccaggcctttccctaagctccagccccgccccccgcgcccacatttc

SEQ ID NO: 44251 - DNA, 2300 bp, Homo sapien
caatcctatgaagtaggaactattattatcacctctgtttcatatacgaggaacttaggtataaagtgagtaaatatcttgcccaagatcacatagttaagtggcagagccaggatttaaattcaggaagtatttgctcttaaccactaaactatgctgcatataggatgctccaaggaaaaatgtaatctatggaactgtggaactactacaggagattgactgtagtatcttttatcaagggatgtaagattacaaagccctctgttgcttatgcactttctatactggaactatcaatggacttagctccacccttcccttctcagaatttagactactttcccagataggagcttattaattttcaaaatattcctggacagttaggaaggttatgtggtattatcctgtttgagaactgaggacagaagggaggcacttacccaagattctgtaatcagggaaggttctgcaatcaggatcagatctcctgatcctcactatacagcaaacttagcttttctgatggtgacctagaaggtcaaacaaaaggacaagaaagaacataaaataaaaagatatgagatatggctttcttctacatcagccaatgcaatttcatcacacacaaaggacaccaaagctgataaataatgtacaagtgtttctttttcctttcttgtggccacattttcaaatttaatttattgtacatttgtataatttctgacaaatttgttttttaactttccttaaatataatttcaaatggatgaaataaaaaagaaatagtattataaacctacacgaatccatcatccagctttcaacaattaccaactgaaggccatcttgtttcatctataaccccacccactgctcccccccacccccgactttttcaagctcaccggaatatctgacttctgtattttattatagaaaaatttaaacgtataccaaggaaagcagattaatatacgcaacccactgcctatcactcagcaaaaaaatattattaatttagggccaattttgtttcatctatacccctccccatttccccctaccgctgagattattttgaagcaaatcctagtcattaatgtatttagaagccaatcccagacattatttaatccgtaaatattttcgtatgtctctacaaaaaaggacaatttgaaaacataatcacaatactactgtgacgcctaaaaaaactgacatcaattccctaaaaaacatcaaatatcgaatccgtgtcccaattttcccgatgcgtcttaaacatatttttacagttggtgtgttcgattcaggatccaaacaaggcctactcatcgcatgtggttcatctccagctcgctctcgttctccatctctttctttcttgcactccccccccccccaccttttatttaacttttcaatataggaaaattacaatctctgctattttgaggcaattcccaaataacaaattatttcattggtaaaaattggtatatctattttatctttaatttattctaggaaagaagttgatggcagaaagggcactacaattagcgaatttatataatttataatttttctcattctattacgcgtattatttatctccataacaatagctaatatcttcaggggccaggcttcacattacgtgccttatacgcactattatacagtacacgtctctgaggtagatactattattatcaccattttacaaacatggaaaccgagacacagaaagaacaggagccttgcccaagctgggcgttggcgagcaggaatctgaatccagctctgaccgattgtgaaggcactaggtaatcccgtctatacccgacgaaaaaaggaaatcatcgaccctttctccccacccccaccccgaaacctgaaacgagaatccagatcttcccagcagccgacgtgtgatcactgccgttcctccaaccgccatagtaaagccaggtttctctggcaactgatatccataggcagacacgtcaccctggaggagggcgtatgcccttcagccaatcacaatcgtcttgtctaagttttagaatgttccataatcaaatgattggacaaccacccccacgtcagcaatgacacttcgccgcagtaaaggcgggtgctagcaacctgcttcttcactgttaaggtctacagcaaaccaatcctcttcctccgttagtacgagttccggccaatgacgttcgccctcttaggtttttttttttagcccgccctccaaaagcgtgacagccgttgggtcataagtc

SEQ ID NO: 44252 - DNA, 2300 bp, Homo sapien
gaataaaaaaatcaacgtgaacgatataacacagcatctaaaatatagaaagcatacaaaaaaactgaggatcacaaaacataaatcatttgcccagggtactgagactagtaagtggtggaatgaggtttacaattaggtctctttctcttactccaaagacacaataaagtttaccaataccactacagaaaatagggtgcaaaaacacatatctgatacaaatttcaagagaaaaggaaaatcagttttcaataccagggtccaggttttactgatgagttcttatctatctttactgacggaacagctatctgtattttcagtttgggtgagttgcgagcatttgaaaaggtgaggaaaaagggttaggatcttcagcatcagtgcttgcgtcattcattaactctttgattaaacaaggcaaggacaaaagaaaagagggatggagaggggcctttttttttttttaacccaaggagaaaaggaaagaaatgagcaaaattatttggatcttgggtcacagtcccctgcctactagtgctatttacagaagttgattttattttttcctaggaatgaacgatatccatgatgcctatagatattaccgttcagcaaatcagaaaggggaggggggagggaaacaaaatcccagaatcccagggaccaaacagccaatcctttgctgggatttggcggcatctagtggcagactcgagaggtataaaccttactcacagaactttctggaaaattaacagtgcgtatttgcctgaagaaggtcagtgtgcttgcttggagatcaggacgcaaaggtaagagcgcctcagtcgccacagaaatccggagtccctaacggaggggaaggctgtcgtagatagatattctcacaggaaaattgtatttgtgccaagagaactgcacgcaaccttgaagggagggggtaggtgtggaggaggggagggaggacgatactagagaacttgaaagaagcctccctttggagttgctaatgcggcgatggaagggtttggctctgaatcattggagggctgtggtttacgataggattttggcacggaggaaaacgtaggaagtgtatttttaaagtaattaaatcagtacggaaagccaaaatatttctgacagtgcccctttatctgttattgtcgcctttccttaattatttattttccttttcattagaacattttcaaatataacacagaaatagataacaacctgcgcgcagtagcaaacccctccctgcaccgcccccaccatcacgcacgcgcgcgcgcccgccgtggctctcaccagtcccgacgccaggggcgcacgcctgcgcaaacacagcacctcccgagccacgagggccgctcacacagcaaccccagcaccacgcgagcctgcccgcgcactaacacactggccttaatgccttgcgcccgttgcactcacgaccctcacttgcaaacacagcagaacccccactgcgccttttttttccgtgttcggggagttgcgccacaggactgggggcgtggccccagatttgacctcgcgcttccccactcgcgggaaccttagctcatttccgcctatcctatttccgcaggccacgtagacacttcctctcccagtggggggggaaaaaaaccacaaacccataatgcctccctgcaggaaaaaaaaaaaaaaggaaaaggaaaaaaaaaaaccctctggtcagaggaactctgggtcgtgaaataggccacgtgaacattctgccctgtagacttatgacccaacggctgtcacgcttttggagggcgggctaaaaaaaaaaacctaagagggcgaacgtcattggccggaactcgtactaacggaggaagaggattggtttgctgtagaccttaacagtgaagaagcaggttgctagcacccgcctttactgcggcgaagtgtcattgctgacgtgggggtggttgtccaatcatttgattatggaacattctaaaacttagacaagacgattgtgattggctgaagggcatacgccctcctccagggtgacgtgtctgcctatggatatcagttgccagagaaacctggctttactatggcggttggaggaacggcagtgatcacacgtcggctgctgggaagatctggattctcgtttcaggtttcggggtgggggtggggagaaagggtcgatgatttccttttttcgtcgggtatagacgggattacctagtgccttcacaatcggtcagagctggattcagattcctgctcgccaacgccca

SEQ ID NO: 44253 - DNA, 2300 bp, Homo sapien
aataatatgggcagatatgccaggaattatccaggttccactatttacaagttatatgaccaaagataagtaattacacactgcagaattcactttcattatctataaaataatgatgatatcacccaatttgcaggcctattgttgagattaatgggtgtatagagtgtgtggcccataacaggttttcaataactgtttcctcaccaccctgataacttcaacacacatagaagagatttagacatatggctgggtgcagtggctcacacctgtaatcccagcactttgggaggcgaggcgggtggatcacctgaggtcaggagtttgagaccagcctggccaacatggtgaaaccccatctctactaaaaatagaaaaattagccgggcgtggtggcacatgcctgtaatcccagctactcgggaggctgaggcgggagaattgcttgaaccagggttggggttgggtggaggggagggcggagattgcagtgagctgagattgcagtgagctgagatcgcgccacttcactccagcctgggcgacagagagaaattccgttaaaaaaaaaaagagatttagacataaataaaaaaggcaactgcagagtaaagagaacattatttggggaattaaaaaacaagaaagaaaacatttagaagccttgatgtgatatgctattatagaatggagatgaggaagggtatgagaatgaaacatcgaaatatttccacttacttggtttgctttcctgcactcttcttgacactccagtcaacattagccaaagcagggaacaagatatttctaatgtattttgaggcttggaaagacaagtcatcatggttaaacaacagagtactattaggggcttgggctagaggcaggtgaagttcaaatcctggttcccatacttgttgcgtacactaagaaaataatttgacatatctacacattagtttttaatctgtaaaataggactgataatatagagggtgtctgaaaacatatactgtgcatcatttattattttgctttacattctgtagcaccctctagtggtgtgtacaaaaatatgcattgcatttctactctccaaagcagtggctctcaaacttcagtgtgtgctggaatcactgggatagtttgtaataacacagattactaaaccccaccctgcgaacttctgattcattaagtttgaggtgggacctgagaatccgaatttctgacaacttttcaggtgacgctgatgtttctggtacatccaggaaacacaccttgggaaccactgctctaaaaaaatccctcctgtgtggtgtacaagtatataagatagataattgaaaggggtatgatttttgttgtttgactttgatccagtagtgctcatctaataaggacttggtgatgaataaaaaaatcaacgtgaacgatataacacagcatctaaaatatagaaagcatacaaaaaaactgaggatcacaaaacataaatcatttgcccagggtactgagactagtaagtggtggaatgaggtttacaattaggtctctttctcttactccaaagacacaataaagtttaccaataccactacagaaaatagggtgcaaaaacacatatctgatacaaatttcaagagaaaaggaaaatcagttttcaataccagggtccaggttttactgatgagttcttatctatctttactgacggaacagctatctgtattttcagtttgggtgagttgcgagcatttgaaaaggtgaggaaaaagggttaggatcttcagcatcagtgcttgcgtcattcattaactctttgattaaacaaggcaaggacaaaagaaaagagggatggagaggggcctttttttttttttaacccaaggagaaaaggaaagaaatgagcaaaattatttggatcttgggtcacagtcccctgcctactagtgctatttacagaagttgattttattttttcctaggaatgaacgatatccatgatgcctatagatattaccgttcagcaaatcagaaaggggaggggggagggaaacaaaatcccagaatcccagggaccaaacagccaatcctttgctgggatttggcggcatctagtggcagactcgagaggtataaaccttactcacagaactttctggaaaattaacagtgcgtatttgcctgaagaaggtcagtgtgcttgcttggagatcaggacgcaaaggtaagagcgcctcagtcgccacagaaatccggagtccctaacggaggggaaggctgtcgtagataga

SEQ ID NO: 44254 - DNA, 2300 bp, Homo sapien
ggtggctcacacctgtaatcccaacactttgagaggccgaagctggcggatcacgaagtcaggagttcgagaccagcctgaccaatatggtgaaacctcttctctactaaaaatacaaaaattagtcaggcgtggtggcgggcacctgtaatcccagctactcagtaggctgaggcaggagaatcgcttgaacccacgaggcggaggttgcagtgagcagagattgcgctattgcactctagcctgggtgacagagcgagactccatctcaaaaaaaaaaaaagaaaaagaaaaaaaaaaagaaaagtggctttgtgtatgagatgttggtgttgtaggtcctagtaacccttgataatgacatgactagaaactgacctgtcatcataaagacaggccttggttcacctcacatgtactctgtaattcatttttacactattctgacaaaggaggttgtgctggacccattttcgaggtgaagaaccagaggcaaacaaaatattttgcaataattttaaaatgaggggagtaagtaaaatggttttctcctttgatttccagttcagggtccctcagatgaccctgttgcccagtactcaccctgatcccctgagccctaccctggctagaggatgtaagcaaaggatgttggcaaaaaagctctgagggggaaagttggatccaactgctatttctgtttctatagatctaattattttcccttttctccaatcataataaatctaaagggagttatttggacacatttcccaggctggaaaaagccatttcacacaggagagaaaatatggccaacagagtaagctggtcttggctttttgtgactttaacatactgcacctgttgtagctggaggagcaaagatgaatggcttgaaatccaggggtggggcatcctgcatttgggtattctctatttaggccaaattctgaggggtgtttgtgtgtggggtgtgtgtgtgtgtgtgtgtgtgctggaaaggaacattggagccttaaataccactttgtggcttacatgcctattaaaatagaactttttttcccctggctatctataggggagaaggactgagaagctagagagggaagatatctcaaaaccacgctaaggagggaatgcacagtgtaggaggtaaagtgtggagatgggaaagagtgatttgtattgaagtgagaggggctagaaaaaaagggattagagaatggggaatgaagagggtgctggaggatgaagagaggtgggcagggttctgggaccaagcccttgagaggactgggcagtattttgaaatttcttccagttatcaagttattctattgatcatggcaaagcttttgctctgtccagtttgaaagacagtcctctccaatcagcctgtaaaagttggtgagctgggttacatgactgctgtgtccagagcctggtgctaaggcctgctgaggagatgaaaaagagcttccctttcctggggaagcttatggactagccgggaagacagtgtaggattgcatgggtaaaaagtaaaccactttaggcagtgacatgaaagggggccaccatgctatggagttgttggttgaggagagagttgagaagaaaagatgtgaatggctggctggttcctagaacactcctaactgactcttggctaagggttccctggagatcacatggattttctccctgccctctcagactgaagaattctttttccctagctggagcagtagggcccggacagaggttctagaaatggatgaactctccaacaattttttcagcctgcttggtgcctccaaaatacctgctacaggtcctgggataacagtgactttagaagactcaaaaaaggacatgacgaatggcacgggtttgattttcagttttattcacgttaataataataataattcacgttaaaaaaagcctcagcccacttttaggcaggccccagagtcctaagcaaggcccaggctgctgttgtaactttgtaataattgagcactggtcatgacagactccattatgagctcaggatcagcctatatatatgagcaggaggggacaggctgcaggcagttgcgggttgcaggagttcaggaaaggaggtgggactagagtcaacctggaatagctctacagtaacaatggcagcctttttgttgctgggacatccatacaggcaacttagctggtgaaaggactctggattggttggcagtctgcttttttttttccaaggtaggcattgagaaggcaccaagatcaaaact

SEQ ID NO: 44255 - DNA, 2300 bp, Homo sapien
aatattaaggcaatggagatggaagaaaggagaagagaaatgtgtgttaagggaatgtggttgataaattggtatctgtgggtttattgggaacacatattttctttccagtagagttgctgtccccagagctgctgctgagaactcaggggaagctttgtgagagggctcagtctgagtgatgtcccctgtgtggagagctgtctcatctattcgagctgtgaaggatcatttgcctcatcctctaaatctgaactcccaaagtttgggctcactcctgccatctgatgagctgaggagacacatttggcgatttcttgctcttggtcctcccccttctccagggccattccgacagtgaccatccagaagtttattgctggctcaatcctacagttgagcttccaaagcaggcatagtctgtggctggcgagcagggctggggagggcgaggggctctaggacccttttccatcagtcacatggccttagtctcgtctgctctggaaagctactattataccgttttgcaaggggcagcatttccagagatccttttttcttggggctgatacaagagcaaaggatctagagttctagtactctaagcaagcctcaaacggtgcaggatttggccccagtgggcccacaggggcatctgccaaagactcgtccatttcctaacagcagagcccaagccagtaacatgtccaaagtcacagcccaaagagaaaactgtaagacacaatcttgcctttctcccaccccaggaaggtactagtctctgctcagtatctccctcctcttctctcctctcccaaggcaaaatcacaggaaaagttccaggagaccataccttccttctccggagtcttccaacaggtgcccctcttattatatgccagccagttgttttaaaggccatccatgggaggacaccggcctctaggtcaagggagctgtgaagggagacaggactgacaaggagcccagacagacactgtttaagattcacctgttctagaaaaccttcccaggctgatcccatctagcagtgggcatttaaataccttcacagtctttagaaatagcttattgctaaggcaggttttatatagtatttccctgtttttgctgcttagccatttttgtcttaccgcttctttctctgtggcaaggactatatttcgtttcttctctccaccctcactgccacctgctgcttcactctaacccactccctgcctcttgtctgcctggcttaagctctctgatgaagatattacactctcaggatagaatactgactacctgattcccagatcgtgttcttgacttgtctcgaagtcgattatccttcttggaaatcacccacatcttcaacgctggccttttctttaacctagtctgtgaacttgcataggtcttgcccacttctgggtctttattattgtagctataaaattattacaattctagcctcccccagcctaatcacaatctgttcatcgaattgacagcctgcattttgtcttcatgcagttgaaactgagaaggatttggaggaaattatcttaaaagacaattttttcttctctattgtgttcgtagagctgggggtgggggtgggggaggaacgcttattttccaaggaatcgggaggggaaaggtggagagggccaagggcagctaggagtgatgtggggagctggagcagattcggaaggactttgggagctaatatctaggtttttgactctgagcccctgttggggctctcacttcatggcttctcacgcttgtgctgcatatcccacaccaattagacccaaggatcagttggaagtttccaggacatcttcattttatttccaccctcaatccacatttccagatgtctctgcagcaaagcgaaattccaggcaagccttagggaaaaaaggaaaaacaaagaaaatgaaacaattggcagtgaaaggcagaaagagaagatggagcccttagagaagggagtatccctgagtaggtggggaaaaggggaggagaagggaggaggagaggaggaggaaagcaggcctgtccctttaagggggttggctgtcaatcagaaagcccttttcattgcaggagaagaggacaaagatactcagagagaaaaagtaaaagaccgaagaaggaggctggagagaccaggatccttccagctgaacaaagtcagccacaaagcagactagccagccggctacaattggagtcagagtcccaaagacatgggtaagtttcaaaaactttagcattga

SEQ ID NO: 44256 - DNA, 2300 bp, Homo sapien
ttgacagatctcaatgattgaccattgggaatagtcccatctgagagccacaaaaccatccacagctgttactttgaatcttcgtgctgtccatttttgctgatccctcacaactagtgttagtcatgttgcttccattctagaaagataatagtagctgctttttaagtggcctctagagactcttttaatataggatttacatgtaggaatctttggtctaacaaaggatttttcttacctttaggtgttccaacattcactaaacgtgtggtgctttcagcagttgtgagatcctgactacagaacgaggtagcttagaaactaaaagatccttaaaacttgccagttggtttgggggtttctcagagatttttaaactgttggaaaatggcatctatgagaaaatgaaaaagtagtctagattgttacacctaaagacgagttactctaatatgaaggactgttatttaaagcatttcacaaaactatttattgaggtgcaaaaagaaaacattggaacatcaatatatttatttttctcattcttttaaaatttctgtggagtattttaatgtttactcattaaaatgtatgtttaaagtaatgtgtaatgtatacatgtacagtagtacatgtatataatctataaatccttatacatatgttggggcccatgctcaatagttttttaatagactaaaatgtatgcggaaaatttgatttagaggattgtgtgaatctcgtcttcatcagaagagtgttttagagtgtatgtgtggggaacggggttggtttaaataggagcacatgagattcagttacatcaatttattttatttaaatataacaactattagtgatacagcattcattcatattcagcaaatattttctgagcatgtcctatgcagcaagcattgccctaggctctgtgcatacggtggtgaacacaaacgttgtccttgacctcatagtccttccccactatagtttagtagggaagacagctgtcaaccaaataatcatacacttaaatgtaccaccaaaaatgggtaagtgttatgaaggaaaaatacagcaagttacaggaggctacaagagtataaactggggcaccatctctattctgagattatcgagaaaggttatcctgagaagtgacatttaagctggggcctgcggagattgattgcacgattgccttgtcaagagacagaggaagagtggcctagatggaagtagcgggtatgtgtgagggcctggacggggtcatgagatgagtgagggcctgtgccacaaggtcacagggtttcgggcaatggggaagcttcagagatggagctgcctgacagagaggtggagtgcaggctaaatgacctcaggagctttgtccttcttcaattccagggggaaaatcacaaactagttggaagtaccagagggctacagaaaacaacaaaaagagactagctggtcggctaggcacaattaaaacatcaaattctgccccagcagcaattccgggaaattcaagtaatgccccctgtgtggccctctagaactgtatctggtaagagtaaagggcagtgtgtcctctatgcctgcgctacagatgtggacattttttttaattgcctgaaaatttcataagctgtagccagttagagggcctagcaatgtgttgtgatcatgtgttttcctgagttatttgaaacaagagggtgtatgtactaccctcttggcaaaattaaaggattttgagctaggataaatgaggtagatcagaggataattgcaggaagtggggcagtggctagccctgcttgagggcttaggcccaggctgcagaggagctaagtggaagagcaatatttgacggtctattgccgctgtgcctactaatcggctaggggaggagaaggaggacaagggagaccagggttggacgatgagcatgaaagaagagtgggcgagccagggagcgcttgccacatggagggcgggaggcggctacaccgggtccccaccgccgagaaaggggcacgaggaggcggcgcgggccccgccccctcccctggcgggcgcgggcgcgggctcgagacgctgcgcggcggcagcggcgggcgcgagcggcagctgtcaggccaccgaggtccaagccgcacttgctgccccattgaggacgaggaggcagcaggagcagtgacggtgactctaaggagccggattcccggcacgcagagctgacctgcctggcacccgcggccctctcctgtttccttcccattgtgttgggt

SEQ ID NO: 44257 - DNA, 2300 bp, Homo sapien
tagctctagcaacatatcggtgatcatgatatatgtattctctaagtcagagatcctttgtctgcagcaaataattcttttcttaaccctcacttgaattgcatttggtgtccatatttcccccagccatctcctaaaggccctctaggcttcttgtgccatgcatgtcaaaatgcttccagtctctatccattatctagttccaaagctgcttccactctttcaggtgttagctatcagatctgtctggcaacagaatccctattggtttgctctgttagcctgacaatgtaccacagacctgggtggcctaaacagcagacattaattgttcacagttctggaggttggaagtccaaatcaaagcgtcagctgggttgtttccttctgagtaataagagggaaggatctcttccagggatttttcctcagcttgtagatggcccacttctctgtatgctacttcacattttcttccctgtacacatgtctctttgtctgaatttccccttttgataggcacaatgcacgctagccatttcgagttagagcccaccctaatgaatgtaatttaacttcagtatcccactaaaaaacccatcttcaagtaggagagagacgaggggtcaggagtccaatagatgtatttggtgttttttttttggggggggggacacaactgaacccataggacataggaatcctgagttgtaggtgggaatacctcctgcctcttccattatgttaagagaacactggtaactgatgaagggaaagaaggtgactcctacccatcttttttcaagactacttgaatgttgagtaattttatacacacacacacgcacacacacacacatttatatatatatatatatatatatataaaatctggtttattccattaaattctctaggtataatgagagtgaaaaagctaaggaacattgttagagatataatgttgatctgactaatccttataaagggaaacctaggaatataagagacagaaatgaccatgtagtaaagggattaaatggaaaattattaaatgaaaattattactgtccttgaagcaagttgcgctatagatatattagagttgacaatgtttagttctcggaaaaagaatgcatgaaaaatcttcaggacgccacaggccacctgcccctcccctttactacctccccccgcaagaggtaataagaacccattaatctcatgacctcaggtctcaatcacacacccctttgtcaaagtttacccccgttatttctcagattcttacatgagctcggaaactagcgttcccctgtattttacttgcagcctctcaacaggtgcctgccttgagaaaattagcctctggggtagagtcgacttttgtccactgggggtcgcagatcccagtcctcagggcctcaagactgtgccgcgaaggaaggaaaggaagggttgggagcagcctcttctgaaaacctgatacctcccctccaccgcctcctctgtcgccaggcggaaaattccctctcccatcttctgaacacaagccaaagtgcctcctgcactcccgccccccgtacatttcctgcgggaaaccgtcggcctaccagctctgcaatcagccgcacagaattcaaattcggattcggctttgatgacctgccagagagaaagggactagaagttggatgacctcccacccccatattccttcccaggaagagatgaggagatgcaaaaggggttcaagacagcttgcgatcgtcttctcccgccccttgccacctccccgaacacccgcccccgacgcccgacaacacccccgcccacttcaatccaggcaaatcataaatcctacccagtcggcagcatccagatgagccacaactcctttctcagcgcaaccaggccatgggagtgctccatcccctgcctcgcagttactgattctccaagccgggcgccgcccagtcctggtggggcttcccccacccctctccgcgccgggaaatcgcgcgctctttctttacctgcgctccactggtgggcagcgtatgctcccgcgtcgacagctctgtttcgccttccggtccccatagctctgcaggggaacaggatcgctggcgcctcctgggccgctaagcgaccccggggctgcccggcttagcgagtgcttcgcagagaggtagccgagtcgaggcagcgcggttcccaaggaagtcacggctgcggccaccctccagttcggacctccgggcagccgcggttgctttcagtctctgcccattgagaca

SEQ ID NO: 44258 - DNA, 2300 bp, Homo sapien
attagagccatcagttggaacagactcacacacatgaggccagagataggatgtcctgtatccaattggagccaggttgcaaatactccccccatccctgcacaaaatgtctctcgctttgttccagtagtccaactctggcacctttacacaatccatttcctgtcattatttttgtccgagctctgacacctattcttggtcttatgtgattccatccctaccaagtccagctgcaaatacctaatttggtgataaagccaatttaaacactgaacaagagtcttctgggaggcaagagtcagatgtcacgggacaggggagcagaagcaaaagtctgaaggaaacctaagagctactgccaccatcacccctaagtgtgcgaggtgagcaacctgccttctccatacatccacactttccaccttccaccaccactaccccactgttccatccacaggccacaatcctgagatggaaagtgcttcatctccaaatctgtattgtttactccaaggaactctacatcttggggttgtaaataagagggtggaaatgagtgagtgaagtgccttggcaggctgaagatgaagccaacggcagtggaagggcttcagactgttcacttgcttccaagcatcaggagtcaagaacaggccccacaggagcctcctagccacactatacataaaggaagtaatacctgctctctaagtcagggaaaaatggagcaggttttccagccactgccttcatggccattcactttggacagccctgcatgctgtttccatggagttgctccttctctggggccagtgatgccaaatccagcaaaggagaagtcccctgaagagctcacagaagggcaacctagcaacctgtccttgagccaggaaatgaaagagccatatcagcaacagagagctgtggtttgggggttaggttaaatggggtttgatttctcacacttcttcatcaagcatggcttgaagaaggaagacattatgacagacccatttgaaaatctgcaaagctgtggactcagaagaatgtacggagtccagattctttgcatacagttccaggaaggaccgcgggtaggaacctgtgctctggagttacatttcataacagatatgccatggacaaatacactgatgacaggcccatttacttataaccttcagcatcacgtggtggtgtttagaacagtggttcacgaatctctctacacctcagaatcaactatggggctgtttaaaactacaaatcacactctttacctgtagtcctagtacatcaaaatcccccaggggtaaggcccaggaatctgcatttataacaagctctccaaaatgattctgaggcagcccactttttactcactttagttaatagtatgagttctggattcagagattcggtccaaattttggcttcaccttgtaatttcagacaaatcattttacctctctgagccttgcctcccttggcgtcacaaagggctgtcgaaattatgttgcttttataaaaagggcagctttttgtagtataaaaaaaagtatttttaaaaaaacgaaggaaagaagagtgccaagaagagtttcctcttctgtacaatgggcaccataaaggttgccttcatcttccctcagccctctccctactacctcctcaccccctccctcagcactatcatcacattgagactgctgttgagatggtttgagactacctgtgcaaaagtgctcttcagacaatgctgcagggcaaacaattagcatctagagagcaacatacaggtgctaagttggatgctgtaacttctttgctgcgggatacagtgcaagacgcttaacctctctgtctttggctcagtttcttcatctgtgaaatggagataacagttcttgctcactaattctatgcagtcccaagttggtcctcccatcctggctttggtttttctccgctatcccttaatctaacagaatagaggagtgttggcaaggggtagcctttgaagtcagatatgttgacttgggagtgagctcttagctctgcacttcctaactgtaccgcctgggtgtttcagtcctttcctgttaagtgggcacactactacctccttcacagggctgctgagaagaaaggagacaggcgcatccgcacacagaaagcactcagtaaatgctgtttccccccttccccctatacaaaggtaaggaactctcattgttcacttggtttctgtcccacctcgtgtttcaggcatccggtctcaaagcccggagcag

SEQ ID NO: 44259 - DNA, 2300 bp, Homo sapien
tacacaattctcaaattaacagaaagtgctacaagagcaaagaaaagggaatgaagtgaggtggggaaggcttgagaaatccttgtggaaagaatgatttctgatctatatagatctataccaccatacatggggtgcaagtaaaagacatagttctacctccatcttaccttaaagcgctaaggttctgggtgagtatccagaaaatgatcttgaacgtttagtccttttaagtaactaccggatcctcaattttctcttccaacagacactgggtggtgctagtgtccaaaaattcctccctatcacggatttattacttcaatccacatacatctccacaaccaatgtgtcttgtgggccaaagtgctagggattggggatataaaggtgaatagcaatagcctcagttgttctgtgattataaactgactgctatcgtgttctgtggccgagaaagctgcaaatgtgacttttacatttcacaggagagcactactgtcacagaaatgtccagttgtaggggtgaatggccctgaactacccaccctcaccatgagcactcgtactccacgacgtggccaaggattagagcagacaacaccgagccccacttccaacctactgttaggttgtccttaggccccaatggctataaaaagcctagagagcctatataccggtcattcagcttggacctctgtgttacagatgttctaagctcactgggcaaaatgtgtctgcttattgcagaggcttctgttattgtgaaagagtgagtgtactttgttttttttttttaaaggtactcaaatgtcaactttattgtttctatataaacacctttttgtactgaaaactgtaaaaataacaaagtttgctgtgattgcagttcaaatttttgaaagccagaaaatctaattatgctatagccaaactacctaatgctttctttatccacaagtaactttgcttcaatttcttgatgttgggtttcatctcactgactttgggcttctaagacacatgggaatacttatatcgtcttggattctttgggtcaaatcaaacagtagagctaaagttattcaaatacattcagattacacagatcccttatgaattactagtatcatagtaggaagaaaaagatacaagaagaaaaatacatcctagaactcattatcaaaattattggtgtatagtctgttctagcatagattagctttctcaacctgctatataaaattaccagcaagaaaaaaaggtgcaagaataagatttatggctgaagtggcttggtgtcttgattctctattctagcattctcagaaggatcccatccgttagacacgcagaaactgcagggacatttgaatggtcttgattccttcttaactcccttaggctcctcgtttgttggtcttctttcatgcatacgaactctgccgagtaacatgtatctcgatcttgccatcttttctctctgcacagacagcaatgttcttactcctctcctgctgtaaagccactcatcttcgatttccctgaggacttctgctcctacagactctcgacggagtaaagcttccgatagaggggaaacagattcgctactagtgttgatagtcaagttactaaggttctttatcaacgtctcggagcagatttgagaggcccctgaatcgtcccgggaattttcttcggtgagcatttgtggagactctgggatgtaggttggattaaacttctgtgatgggtccatcggcgtcttgacacaacactaagcttctcctggatctttgaaacgtagcagaaactgatgacggagcctcaaattgctacaaggtagcccggaaagagcaagagtgagtgtacttcggatgaagggaatgtggaccctcaggactaaagcagtgggagaggcctgggaggtggggcctggggagggcgaggtctgctctgaagtcaccaagctcctgatcttagaagagatggtgggcgcaggctctggaggctcaagcggaggaggggaaggaggcgagtccggaaaccctcggccaatcagagagggctggggcggcgcctgctagaaggcttagcactgcagggctctgggcgggaaggctaacctggtgcggagccagcctgggtctcagccccgcgtacggcctttcacgagtcttcaagccttcaggtgagtacctgcggcctcgcaggagccagaggaccatggggacgggaaggcgtgggggtcgcgaggcgggggatgccgcgccttcgggagccagaggggctgg

SEQ ID NO: 44260 - DNA, 2300 bp, Homo sapien
ctcacttgtaagtaggagctaaatgatgagaacacatggacacatagagaggaacaacacacactggggcctatcggagggtggagagtgggaggagggacaggatcaggaaaaataactaatggttactaggcttaatgcctgggtgatgaaataatcggcacagaaaagccccatgacacacgtttacctctctaaaatacctgtacattctgtacatgtacccccgaacttaaaataaaatggaaaacaccctgatgcaataaagattatgactatattaaaaattaaggaaacaggcagggcgcagtggctgatgcctgtaatcccagcactttgggaggctgaggtggatggatcactttaggccaggagttcaaggccagcgtggccaacatgataaaaccccgtctccactaaaagtacaaaaattagccgggtgtggtggcgcatccctgtagtcttagctactggggagcctgaggcaggagaacctcttgaacccagcaggtggaggtggcagtgagctgagatcgcaccaatgcactccagcctgggtgacagattgttgtctcaaaaaaaagaaaaaaaaagaattagagaaacaaaataaggactatatattacaattttgcatcacgtagatgatgggaacatcctgtgagagcagctcatgccatagtcaccactggctcaggcaataaaggctttccagcccttgaggcaccacaagccatggctgaaagtgtggggaggtgacccggaaatgaaccagtgagagcctccctgggaggtttaaccttgcagattgtgaagaaaaacgatgtggctctttccctgttttttgtttgcttttttttttttaagaaaaatatcatgctgacttactgatatgaatacagagattgttgtggacaggtctcttgtgccttgtaccaaactacgagaaggattgtcttgctaaacgtttaagtagatttataagatcatcatttgtaaaggggactgttcagaaatggtgtactagagttcagtcacagagcttaccatatacgatcttatctaacaacaaaaatgagcctttttgtccttcttaatcgtgaaccaatttattaggagtagaataagttgtttgctaaagacatgacaggaaatacacttgaaagcctgacctttgaaatgacagttcatcgatgacctttatttcttcagcatttcttaagaatctttcttgttcaattcctgcaacttaatgttacttaaatgcatttaaggaatgcctttgcgtatattatcagagactcttgaaagctctctttctaacttgaacataatttccatttctggaatccctttctctccctcaggggcttcctaggagatttaaggcgatattttttaacccaatatctcttaaacttattagccatttccagcttttgagttgtgatttgtggttgttgttttgctttcctttttttttttttaattatttttttaaacctggtcgatgtcgagtgttgtcatatgtttttaataaaagtgcctttctgtttctattgtctgcttggaggctggggtatggccatttctcattctcctgattcacggaagatgttgatcagtactgaagcccggagccagaccgctaggtcctttgatgcccaggcggccatgtcagggagttcctgctcaagccagggtggcttagcccaggataacagtagcttctgagatgggtgacaattgttccacacgtggccacagtcattcttccggcataatggacttgggctcaggaggtctgtctctcttcagggatcatgagctgaaattgctaaactttgggagttttcagtgacacccttcaaagtgctcacagtgtggcatggatcagctgagaagggcggatgcgcttttgccccgtgaggcatctatctgtgtaactttctccgagctgggccacaaggggcgcttaggcccgcagacgcccactgtgattggttgacgagatgccacgcaacgggaccatccagtcaccttcaacgcaggtaggtttgctgagaggctccctgcgtgacacttcatccaatcagacgtgaagctggcccgagacgtggagccatgctgcgtaccgaagtgccccggcttccccggtccacaaccgccattgtctggtcgtgccatctaatggccactgcctccgccatggctggaccttcctctgagacgacctctgaggaacagctgatcacccaggagcccaaagaggccaactccactacgtcccagaagcagag

SEQ ID NO: 44261 - DNA, 2300 bp, Homo sapien
actagggaaaatgtctgggataaggaaaaagaggaaatagccaccctttacagcttcttctgtgcccccactcacttccacactccttcccccttattgcagagtgacagtctaatgaaaggggaagactattatattgcatcaagaatcagggccaatcatattttggagaaagctttgtactgaagtaagtgtttttattgtctcaaattaccatagtgggttaattttgtcagacacatgtgcctgaaagtgaaaaagccccacaacaatcaaattgaaaaaaaaaggagagtcgtcctagtttttttaattggtcactatcattttattaaacttgtggacaaatgtaaacctaaaagagccagtctttccagatggatcccagtgactgagcctaaatctaaactagagccaagcaagctgccacgtgcagactagagctcacacatgtactaggaattccccaaaagcccatacctctatctaactctgcaactttcagaggtcacctgaaccaaccagccagagctcacctgcccctgccaatcagggctcagtcgtgttgaccaatcagagatcaactgagtcaaccaatcagaactaattttgaatcctttatttgcatgaatggactgtactgagaacctcgatgggaactttctctataaaagccatatcctcttttagttctctggaacttcgcctttgttttacactgaagtctgcccctccctggtgtgcaagctgttcacaggaatagtctctttcctccaaattccttttcagagaacttgccttcataatatgatgccagaggtaggagacatgcttactcacagctttggattcaaatctttaattcaccacaattacaataaaacgaaaaatcaaacaaagaaataaaaagtggacaaaaacctcaaactaattttctcctcaatttacaaggctgaacagctaggagggcatttattggttcaggactggtcacctgctcacattctgagccagtggctcaggcccagggctgaagacacttcattagttgagccagtggagagtggggtttgggtgctctcattggatacttccatcgtaagtgatgcatactcacaggacattaagctttgcattaaaaaagattgtagactgggaaacaatagaattagacaaatgtgaatgagttagagtccttactttattttctcggaagcttgaaaggggtgctgttcattgaatttttgatttagctatttctgcactgtgggtttttgttatgtatttaaatgaattgtataatagaggtaatgttgaaaaaagattatatgaggtctgcttgttccattagtaatgtttgccccgtttgatgcttctaaattgttatttacagcagtaaactgtttccctttgtgtgtgtgtgtgtgtgtgtgtgtgtgtgtgtgtgtaatgtgatttaatttataatatttcaggtatgagttttgtaaccaagtttataaatgttctcagatttttgtagtgtgcatccttcaatgggtatcaacatcatgttttattttcttgaaataagttttctctgccaggcacaatagctcatgcctgtaatcccagcagcttgggaggccaaggcaggagaatcactggagtccaggagttgggaccagcctgaggaaacataaagaaaccatgtttctcacacacacacacatacacacacacaaaatacaaaacttagccaggtgtggtggtacgcgcctctactcccagctacttgggaggctgaagagggagcatcacttgaaaccaggaggcaggggttgcagtgagctgagaccgcaccactgcactgcaggtgtgccacagagcaagactctgtgtacctttgtctgaggtaggcaacccggccacttaggcgggcagacgccctctgtgattggctgacatgattccaagcaacaggatcatccgatcaccttcaatggagggaagattgctgagaggcgcccttggtgacacttcatccaatcagatgtcgagttggaatgtgacgtagagccatgcgaccataccaaagtgccccccacttccctggtccccaaccgtcactctctgttcttgctatctaatggccgctgcttccgccatggctgaggcttcctctgagacaacctcggaggaaggccagagcatccaggagcccaaagaggccaactccacgaaggcccagaagcagaagaggcgagggtgccgaggctcccgcaggcgccacgccaaccgccgtggggacagcttcgggg

SEQ ID NO: 44262 - DNA, 2300 bp, Homo sapien
tgccatctgcgtattctttttggtgaaattctattcatgttcatgctcattttctaatggaatctattttttactttttttttggagacagggtctcactctgtcacccagattggagtgcagtggcacaatcatgtctcactgaagctttgatgtggactcaagtaatcctcctgcctcagcctcctgagtacccaggaccacagatgtgcaccaccatacctgactaatgttttaattttttttagagatggggtctcactatgttgcccaggcttatctcaaacccctggcctcaagtgatgctctcaccttagcctcccaaagtgctgggaatacaggtgtgagccactgtgccaggccttctaatggaatatttatgtcttttttactgttgaattttgagagtttcttttccttttctatctcctcctaacaagtgcttttgcccagactggagtgcagtgatgtgatcgtagctcactgcagcctcgaactcctgggctaaaacgatcctcccacctcagcctcccaagtagctaagactgcaggcatgtgccaccatacctggctaatttttaatttttttgtatagagactgggtcttgtaatgttacctaggctggtctcaaactcctggcctcaagtgatcctctcgcctcaacctcccaaagtgctgggattacaggcatgagccaccatgctgggccagcttgtgtgtatctatgaaaaatccctctgggattttgatagtaattatgttaaatccatagataactgtggggaaaattgacatctttattatattgagttttgcagtcactgagcactgcgtgtatctccatgttttcagatctttgctagctttctttcatcaagttttacggaaagggatggatgtacttacgaactctcagtggcttcatcctggcagagaacaggaatgctgcttgctctgtgaactctgcagcctcagtgtcctcatttgtggtgacagctccctcttaaggtcattgtaaagatttaaggagatgctgaatgcccaagtcctgcctccagtatatgtgcttttctccttaacttcccactcattaccttttgggccttgagttttcatctgtgaacccacataggataatagtgggactgacttccaaggggttgttgtgaggaatgggtatgagaattcaagtaaagcaccaaagagactgccagacacagtaggggtaccataagcagtagctgttattacgatatgattgtagtgaggtgaaactataatttcttcctttcactgacagaaaactctcaagcagctggtccaaagagcataaacagcacaaggcaagtagcaggatgttgctgaaggtttgggacagtggagagggtttattttagcacagcagacaatatgaaagagagtatcagaaccacgtacctgctatgacccaacttttatagaaaaagaacaagaatagatatgtttgtgtttgtgtaaaagccgaagaacaccccagaccagactgtgggaagctggggaactttcacttctacttattcccctttctgtgtttgaaagttgttttttggcccggcgtggtggctcacacctgtaatcccagcactttgggaggctgaggcgggcagatcacttgaggtcaggagtttgagaccagcctggccaacatggcgaaaccccatgtttctactaaaaatacaaaaattatctgggcatggtggtgtgtgcctgtaatcccagctactaggaaggctgaggcaagagaatcgcttgaaaccaggagatgggggttgcagtgagccaagatcacgccattgcactccagcctgggcgacagtgagactttgtctcaaaaaaaaaaaaaaaaaaaaaaaggaaaaaagttatttctttttagttgagcgtgtgctacactaaacaatgttacaatacatttttaaattgaatgtattttttttttgagacaaggtcttgctttgtcgcccaggctggagtgtagtggcatgatcatagctcactgcagcctcaacttcctgggctcaagtgaccctcctgcctcagctccccaagcagctaggactacaggcatgtgccactacgcctggctaattttttcatttttattttttgtagagatggggtcttgctgtgttgcccaggttggtcttgaactcttggcctcaagcaatcctcctccagagcctcccaaagtgttgggattacaggcatgagccactgtgcctggccagaaattgttttgaaaggctaaccagtaaaacat

SEQ ID NO: 44263 - DNA, 2300 bp, Homo sapien
cgacttctcacagctctaccccttacactgacactttctaatagtttgacagctagaaataatggagaaaattaagtaaaaagtctttccgtgctacctctgttatttttgtttttaaatttggccaagcccagacatgtgtgctatcgttgggtgttgggggaaaaaataaaagacaagatgatttgtctgcaattcaaacccaagagggtttcctaggtgtggagtgatgggttctgaaatgccaaatgagaaagaaggtcagggagctacaaaagaggtacagaggtagggacaaggcagtgcttcatttaccttcagcaaacctggtgatttaccttctccttcagtcccttcaccatcaccaatccttcccctgaaaaaaccattgtggactgcctgatgataagttgggaagtgagagtgggtaggtgtggagcaagaataacaacatcctgggtaccgtacattctgaaggaacagagggaattcctgttttgttttaacctgggacagaggggattggtttgttctctccaggctgaggcagtaattcctgactctagggactgctgatatggaaattactactaccactctgggtggagtcagatgagtatattaaagagtctcattgtactgtcctaaaataagcaagatctttgctaatatccaagctttacagaacggtgggatgaggtgaaggccctgtacctttatccccagtggtcttcagtactataggaagtaatggggcctgtgtggcacagtggagggcaatgagtgagctggttatgccaattcctactatagtcacctccttggctgccagccttcaagggagagatctttgccttagtgggttctgcccttctgcttctgaagagaacctagtctttctgtatgggcattcaggcaattcttggggtggggagttgggggagagagagcacttgaaaagaatttatggtggcctttttctcagtgatatttgagaaataccaagacacatctgaatgtatctgagtttaagtcttggctctatttgttattagctctgtgaccgtgggcaagttattgatttatatgcaatctgactaatctgagttttcttagctgctttaagcagacaaagaggacaggaaagggtaatacacttaagaaccagcaaagggctattgtgaggatgaagcaataacaacaaaatgggtttaaagcacttatcatagtgcgtggtccatagaactgcaaacgttggattttgcttattttaggacagtacaaagagactctttaatatactcttctgactccagccagagtggtagtaatttccatatcagcagtccctagaatcaggtattacagcctcagcctggagagaacagggcaatcccctctatcccaggtgaaatgattattatcatttattatttattagccagaggtcttaggtgagatcaaattcaatcattataatttatatttcaatatactgcttaacttcatgataggcaatgttctaggtgctcctcacatgtgaaattttaatatttttactgcaactctggaggtaagtactattattataccaattctacagatgaaaaagccaaggaatagcatgcttgaatcacttgcccaagatgccatgtttagatagtggtacagtggggattcgaacgcgggagctcaggtttcaaagtctgtgctctttacatatgcagctaaagagtcagacaagaaccaaaaggagatggagaatagagggtagaaagggcacaggttcaaggtgaaaggtcagaaactgcaaattcggagtttgggttggtctagcagcttaaaggcgtcatcatgaactgttcacctaagtaagttaagctcctgtttgagaatgactgataagcttgcaagccaacttacaaacaaactggggaaatgttccaatagatgactaagtcttttaggtctttttacctgtgtttttcggtctctataccagattagtcgcctggctctcccaaacagaccggccaactgacgtagtcgcgaaacggttaatgtcgaggcgggggcgggggaggcggaaataaagagagcggaagcaaagaggattgtgggagctccgttgtgcgtcgcttaagtgagggcggcggatgggcgaaggtccggtgactgcgactgtcgctgctttctgaggccacaggaaaggggccgtcggtcgccgccatgacagcgagcgaggcggaggtttgtagcacttcttatgggctgagggcgtagacacatcctgcttccag

SEQ ID NO: 44264 - DNA, 2300 bp, Homo sapien
tagtattatcttatgctaattcattgtgaaaataaactcaaatacatgtcctaatcatgtggcagcagttagttatcatgtggtcatacagatacttcagaatatgcttaaacacaaaagtaaaacacatacttgtagaaacctcacagactctctcattagactccgctttaaaaaaacacccacctcttatagtatgtgtaaaaggtatatatatttaaattagaccaccaggcacagtagctccacctgtaatcccagcactttaggagactgagttgggtcaatcacttgaggtcaggagttcgaaaccagcctggcaaacatggcaaaacccgtctctactaaaaatacaaaaaatagccaggtgtcgtggcacatgcctgtaatcccagctactcaggaggctgaggcaggagaatagcttgaacccgggaggtgggggttgcagttagccaagatcgccccaatacactctagcctgagcgacagagcaagactctgtctcaaaaaaatataaaataaaataaaataaaatagactatttcgttagcttcttattaacagttcctggtgctattacctgagtgcctgcattatcatgcagcacttgactcttgtttcatttggataatcaagtctcttgtttttggggactaagccatggcccattcagcctcactggcctcagacccctggggattggtgcattagggaccatagaacaaaccatcatcagcctcacttccacaagttttaaattggtcagcctcattagatattaatgaatgattcattttgaaagccacatacacaatgcaacacaccttcttgcaatctcaatgaaagaaagccggcatgctcaacagtcaaacaaccaagtaactgaagcaagataatgtatacattttaaaggcacgttggagaagctgttttcactataagttgcattggtagggcaaggcacagagtttaatactgaatggggcttgttttagtgacaaccccccacttctcctgccctctttctcttcttcctcctgccttctttcatttttcccctcctttccgcctatttaagttctatgctttcctgaaggatcaatgtagtttcttcataaatatagttaatgcaaagaattgcttttattgaagaattatgctcttatatgaaaatgtgcttccttttataaaataatattaggtagttttaaaaattgtcttctttgggcaaagtaagaaattagtaatcttggggtttcctctatttttttttaatcttacgcatccaagaacaggaatcacttgcccagaatatagagaagagagatgagataaacagcaaagtacactatataacacctaacaagttgattcaagttgaacaagttaagctccataatatattttctacgggagggagggggcaaattagcaggtgtgccttagtctcctttgggagtcagggaaggcttcactgaggagataacgtttgagctggagtttgaaggattagcaggggagaaatggcagggcattccaagcagggtgcctatgagcaaaaggcgcaaagcacaaaagagtacgacgtgtccagcagctctgagtaggcgagtggctgcagcgtagggttcttggagttaggtgatcaagggtgaggaagggactattttccctgcttggacgatttctcctacacctcattgcacggtgctgggcacacactgcaggagctcaataaatacttgttgaattgggacagaatgaaagagtgcgctgggaaccagggcatctggatgttttctcacgcacccgcagtgtgaccttggccaagtcccttttctgggactgcggttcctgcttagtagtcgagtacgagtgagaaagcggaggaggaggttggccagaggcgcctagcctttctagcggcctgaatccctgattcgatgcgtagagggcggggcgggccgcttggggccgcggcgggcggaggttcagttcctcctccggtccagcagggggcacggggagtggcttcccgccgcccttcccctccttgcgggcgccgggcagactgctgcagtcgcaagcggcgagcgcagtgggcggggcgggcctggccgggccgggcggcggcgctgcgctgacgggctgagtctggcggcggcggaagctgcagaggccaccggggcgctaactgggtggccggtgggccgctgtggcctcgagcagcctcttcgcgcggccccgcaccccggcaagcagcagcgggccgcgacgcccagcctgccagtgagctg

SEQ ID NO: 44265 - DNA, 2300 bp, Homo sapien
gtcattacttcaggagcttgttagtactggaaatactaaataattatcttaaggattaattctctatgctactggcaaagcaatgaagattatcttattaatagtataaaactagtggaaatttacaaaggaaaacagattgatagatttcaagaccaaaaaaagatccaaccaaaaaaccctgcaataaatactgtagacaaaatgttaatatccttaatacataaagaactcttacaaaattagtaatgaaaatattagcacataggaaaacaccatagcgaaatagctaatgaatatttaaaaatttgatcttgctggtaattaaataaataaaacttgatataaaaatgtttctgtgctggtgcagtggctcatgcctgtaattccagtggtttgggaggctggggcggacagatggcttgagctcaggagtttgagacgagcctgggcaacatggcaaaaccccatctctacaaaaaatacaataattaagtgggcatgttgcacctgtggtcccagctacttgggaggctgacatgggagaatcgctcgagcctgggagttggaggctgacatgggagaatcgcttgagcctgggagtttgaggctgcagtgagctgtgtttgtgccactgtactccagcctcaatgagagaagtgagtccctgtctcaaaaaagcaagaagtttctgtcctataagataggtaaaaaaatttttagcaattttagtgctgttaagattgtgatgaaatgagcacttttatatactgccctggggagtataaattgatgctgcctttcagaaaggtgttgactaaattgatccttagaaatgttcatattctttgactcagtacttacctttcaagcaactgtatcctgagataatatattttgataaataattataaacaatgctcatctcagtattatttctaatattaaaaaattagaaacagcttatgtatcattggggaataaagttaaataaattatgatacatttagccaatggaatattatataggcattaaaatgttttcaagtaatatacttaggaaaatgtttagcatattaatgttaagtgaaaaaagcaatatactaaaatatatatacacagaatggttgctgattctgtaaaaaatatgtatgcacataaaaataaactaccaaaatattatagattagttattgctggataatggaattattgatcattttattattcattcctttctttccaacatctttgcaatgagcctgtacagcattaatatgaaaaagttacttaaatataacaaatacttcttgaacatctacctgtgtagatgcttgttagtgcttttctctgccctgcaatggccccactcttcctttaacaataataatagctgtcatatattgggcactttttatgtgtgctacaagtgctgtgtatgcattctcatgtgatcatcacgatacctccattgggacacagacttggagagagtgttatttgcttaaaatcaattagctaggaagtgacagagcaagaatttgaactgtctgattccagagcttactcataaccactatgctgtatgctttgtttatggatgaagattttactttagtcctaatttaaatactactttcttttaaaatagtgtactacaaaaattttcagacagctacaaaggtagagagaaaagtgtaatggaccccatgttcctgtcacccagcttcaacatttattcatatacggcatcatgcttcatctgtacctctatccactccccaacccctgccttattttgaggcaaatcctagacatgtatcattcataaatattttagtatatttccttaaaaggtaggggctcttttaaaaatacaaaaaacctcacattccttataaatgttataaatatgtcctgttaattatatcttaaaattgtatggattctgtagttctcttgatttctttcgtgttgtgtttttgaaggtggaacctaacttcttgtggaacaagtgttgccagctcagaaggcagtgaggagctgttttcatctgtgtctgttggagatcaagatgattgctattccctgttagatgatcaggacttcacttcttttgatttatttcctgaggggagtgtctgcagtgatgtctcttcttctattagcacttactgggattggtcagatagcgagtttgaatggcaggtaagtttttttgtccttttcttgacattgttactaccgaagtagaagtataaacttttcttttgatattttcatctctacttcaaagtaaa

SEQ ID NO: 44266 - DNA, 2300 bp, Homo sapien
attgcaactctcccaaactttaatcctgcagcttcagcccactgctagatatttccattgatgacctgtcatctgaaacctagcattcatcatgtgctgtgttgtataattgtatgtctgtgttattgtattactttcccaagtaaagtttttgtgtaaggacttaacactgctttgaatcccctgtacctattatactgctgtgtacaaagtaggagttcaaatacatgtgatcacaatagtcttcatgactaaagtagctcttcgcttttttggtaaccgcagaagcctagaaatcatccagagttcagatacagttgcaagctctatagaaccaaaacacagcaaaaaggtactgttttataccttgtaaaaatgaagtcagtatatttgaaaattgtcatttgctccttgtagaagaaaagactttacctttttgatgaatgacttaaatatatttatttaaaattaaatccattctaacttttggaggtaatggatatatttataaccttggtcatggcggtgaccatgcatatacttgagtatatgcatatgtgcaaaagtatacataaatatatataaaattatagcatgtatttttgctgtttgtcttaaattgattttctgtatgttaggcttgcttttattcctcctttgtctacactttgtcttctatgatttttttctaatttttctcttgtaatacttctggttcttaaagtgttttactttattttaacagcatatttaaaattattttattatttatttattttttgagactgagtcttactctgtcgtccaggctggtatgcagtggcacaaacacgtctcattgcagcctcaacctcccaggttcaagcgatccttacatctcagaccacaggcatgtgtcaccacacccaactaattttttttcctttctttttttttttaatagagatgaggtctcgctatgttggacaggctgctctggaactcctgggcccaagcgatcctcccacctcagccttgcaaaatgctggaattacaggcatgataatttttttttttttttttttttttttagagagacggggtctcgccacattgcctaggctggtcttgaactcctaggctcaagcagtcctcctgcctctgcctcacaaagtgctgagattacaggcgtgagctactttgcccggccttaatttattttaattgtcttgaggtcactaatacagacttgaggtcaaagaccaagatgtatttgtctttatattgacaatatgtttagcacagtctctggcaaaaagccagttagtggcacatcattcaggtctccccagatggagaccagtgcttctttttcattacagtgtggaggccctagtcatattctcattatacattaaaaactttaatgatgattgactcttcggttaccattttaataagtcttgattatgagtctaagcttttcaaaaacatctttcattgaataactatatgcaaagaatatatatttatatacttatgttgctgctttgtataaaataggcatggatcagaattaatgtcctctgattctatatttgccattagtcttttttctttttttttcttttgagatggagtctgactatctcccaggctggagtagtgcagtggcaccatctcggctcactgcaacctccacctcccaggttcaagcgattctcctgcctcagtgtcccgagtaactacaggcacaggccaccacacccagctaatttttgtatttttagtagagacagggtttcaccatgttggccaggctggtctcgaactcctgacctcaggtgatccacctgccttggcctcccgaagtgctgggattacaggcatgagccaccacgccgggctgccattagtcttatattaaaggaagccctcttagcacagccagcagcacgtcagtctcataaactaacttttaatcgatgtggaaaatatattgtagtatttaaaatgtagtctgaacaaattttgctttccttccccacaccctccttatttttataaagttaccaggcagtgacattgccagtgggagtgatgtactttctgatgtcatacccagtattccaagttcaccttgcctgcttcctaaaaagaaaaacaagcaccggaatttagatgaactcccttggagtgcaatgacaaatgatgagcaggtaaagatcttgacattcttaattaaaagcttttatgtggagactaggtaaagctcagtttattgcctgtttaaagctactggggaaatgtggattgcttag

SEQ ID NO: 44267 - DNA, 2300 bp, Homo sapien
cagaggttagtaagatttcttttttttttactttttgttacgtcaagtagcttattaagaaaaagattcatgacttaaattcttaattctcagttgatacaaaggcttataatcatgtgttttaaaattttgatttcattttcgttccttgaaggttaaagaatggaaactggggataaaaattaatacactgcagctttgccaaggtctgtgatatggttgtaaccttttaaagactactaaagtcataatttgaaatttttactaaaataaaacatatgtgtctatggttttcaattggagtagtctttcttactttcccccttcccctctttggttctcctaaccagcttagaggacccaaagagagcttagggatagacaccagaatactctgtggaggtggaacaacttaacctcactgttttcccttccaagtataggaagagcaaatagagcatagtaactgtatctaaattctctacctgctcttagcaaaagcaaaatcccacagaatgattgcctgctgtctttacctattcttcaaggaaaacaggccacttttggagaccatagagcaccatttatctgtcaaatacttggaaactatttacttaacggtcatcagtaaaaaaccctaaacaaggtcatgatataatttaagaccaattcccctactctcccaataatcacatagtcttattactttcaatttaacttgagtcactattaagcaagtttaccaaagtgccacaaagttgatttttaacgtttgtaaaggtttgaatgtttatagaagtgcatcatgaaattttgtgtaaatccagatgaactgtcattatagtactataaattagagatagtccataaagttgggttgaaggagattgaaaatatttcctttgattaaaagaaaataattaactaacttgggcttgcttgtgattgaagagggagattagatagtcctctgtccccccaaaaaagaaactagcagagaaagacataaaaagctctttggtgtctgttcatgtgctgtacattttttccgttttaatgtcttgtgtagataattcaaagtttgaactatttctttcttggaataagtaataatttattcaatatggtgtatctctgagttcaatttaaaacaatccaactcagtaatatttatttttaaatacaaatcctaactaaccaattaattaataaaaaggcaagacttacttgctgtagtattggttctcatctgtagagaactgacattggagcaaattttaagtctcccctttgaaaataagccttgttaactgagggcgtaatacatttcccacagatttatccagaaacattttattagagatcttatagtagtatctcagttcctactacagctttctaaaggatgagacttgcatttaacaaaatgacatatataatatttttctatagttttgcaactgaattaaaggaaggtgatgtattataatgtgtagtgaggtataaagggctagttcattctctcccaacaagaacttagaataaaataacacttttttttcatgagacttacctcatttttgttaggctatggcagttttgtccagttcctctgtcccttgagtgaattagatattggtgaattaatctcagaaactgacctataaaataatgactcattatagattgggtgaacttctcattttatttagcttttaaaagtgctaaatcctctcataaaggaaaaattataggaaactatagcggtatccagattctgatgagctttaaaaattataaaatatagcaaatgtcttcatattttagccagaaatattagtacacaaccaatatagaagtcttgtttgtttctgggttctccagcagagactttttgtttgtggcttactctgtatagcctcatgtgccttaaaggtggtgaactctagtttttgtcaatatcaggcttttcaaaactcaaaaacaatccaaatgttgtaatttgttttgcataatgcccatggaattggatatcagtaagcaaagccattaaatcgaaccaatcaatgctaatagagtataaaaacaaaaaccttcaaattttaagtttcatttgtgtaactttattttcggcctagctagatcattgaagagccttgaaagttatctaaagtatggcttaatgtatttttttccctctgaaaaagatcatatgccaggatacttcttcaaaccagatcacttttaatatctagaaagataattttcaaggtataggcaaaagcacttcaaggacagag

SEQ ID NO: 44268 - DNA, 2300 bp, Homo sapien
cagctgaggccctgaagcaaggggaagaggcctgaattagtgtgcaagagaaggaggagacccctcacacccaggaattgtaaagactatgcctcccccaaatgccacctccttctactcttacctgaaatcccactattatttactcctttgaattaagacagccgtaatatagtgaaaaatgcacacattttgtagttaaaactggcttgtattgccattggcaagttgcctggctctttgggccccagtcttctgtattttttttaaaaaatgggggatgataggccgggcgcggtggctcacgcctgtaatcccagcactttgggaggccaaggcgggcagatcacgaggtcaggagatcgagaccacggtgaaaccccgtctctactaaaaatacaaaaaattagccgggcgcggtggcggacgcctgtcgtcccagctactcgggaggctgaggcaggagaatggcgtgaacccgggaggcagagcttgcagtgagccgagatcgcgccactgcactccagcctgggcgacagagcgagactccgtctcaaaaaaaaaaaaagggggggggatgataatggtggttatcaaggcgaaagtaagataaatcgtgtacagtggcaagcatagggccaattattagcaggcttttaaaaatttttttaatttttttattttttgagacagggtctactgtcgtccaggctggagtgcagtatcctgatcatggctcactgcagccttgacctcccggactcaagcgatcctcccacctcagcctccctagtaactaagtctacagagttatttttataatattacggatattaacacgtcctggagaacctgcaaacacttattggagggagaaccatacagccttcaatcatagcccaggacttttaatgtgatacatcactatggagcaagaattcaggaagatagttctagaaaaagggagggggaggaggaagaaggggtagtggggaaggcgggaactctcccaggtccacagcacaaacccggggaatacgcgcgctttaggagcctgcagaacgggcttctgcaaagcgcgctgcaataagaagcgcaggaacctagtacagcagacgtttcaagtgccgcgcatcaaaagacggggcccccgtagtgtaagcattcttggatgcactatgcacttagcagatttctatacttgcactctgacataagttcattactaaaaagcttaagtccttggagctttctcaaaaagcacgttgggtttcttgcagcgtgcacctgagcagcggactgctcttcaaattcagccccaaattcccgctcccggaatgcacggtgggttctgaattcaaaaatccagagcaagcagccttctagccaatcattgcaccttatcactatcctgactttggcgcgaactgtacagaactagatagtcctatccatttgtcactaatttctagcaggggagagtcgtgctcagaacccaattgcatggtagactaacaagttcactttcgcatgtttgggctgctgaactttccgcgctttcctcaacgccatctctcggtcttttccgtgggggaagcaaagggcatcgctccacccaagtgctgcggggtaaagacggttgggcggaggaacactgccaaaatacctctccacgggctggtgcgaggtctcaccccgccccctcgccccctcgccccctcgccccctcgtctcctcgcccccaaatcggctttcacaacccagccgctttttccaatctgggtctctgctcaagttgggagtagttagttaagcagcaatttggggccactgttccccgcaaagcatgttcactacctgcaccatgcttgcgcacgctcgccctatttttcgtacgccctggacacgaatgcgtcccccgggggtcgcactcacaactagatgtactgtgaatgctaatagggggcgtttaaccgacgcgtgtgcatacgctttgaacctgcggaaggcaccgtaccgctatatagggcgcgcaagtgccagacggcgccagaaagaggtcccggcgccagaaaagcgctcgcccgagccattggtcccagagccagttccaaccccgggatcgccgcggaaccacgcacagagtctgcagaagtgcacagctttatcgacagcgcttgaagcatggagtctcttcgcgggtacacccacagtgatattggctaccgcagcctggcagtcggcgaggacatcgaggaagtgaatggttagtgcttggacagggacgggagctttcgcga

SEQ ID NO: 44269 - DNA, 2300 bp, Homo sapien
aagatgatgaaacgagaaaccaacaggacaggaagaggtttgtttttattttaaatgtattgtctacttgatgatttgcctagggatcttattggctaggatcctgaatgagctcccctcactctgactgctggctccttaacaccccaatgtaagtgaagggtcccgtggcttgatcaaatggtctcatccatggacagccctgctggtcagctaaggcccagggtccgggggctagtgccatgctaaaggccagactggaggtgccagggatccaaccagaaaggaaagacttgaccaggtggtgtccttccaccaaggggccaccccgtgttgctgcctgccgtacccagctggttggaagcacctggcagttggcattgaggaccactaacagtaaagtaggtgcggagggggttggcgggaggtggtagtgaaggttgcacagggccagccggctagcgtagggaagtttgcatgagctccgtaggcaaggagaaatggaaaattggctggctatctcccttcaaaagaattggctgttaaaaaaaaaaaaaaagaaaaaaggaaaaacagaagcagaaacggcaggacatcttctgttttaaaaatacagaccattttccccctcccatgtatataaacaacgaaaaccaggagggtagcttggtattggttcccgcccgaaggtcctttcctttcacacccgacctctctagatccccgacttaaccccgattgaagaagaaattttccaggatgggggtggggttttgctggatttgtcgaaagagatggtccacaggggaagagtgcataaacttggcgagaggcgagagagggagaataaccttaatcatgcacaggctccggccttaacagttgagtgggtggtggaccgaggccaagcggccaaataagtggagtagaaaggcgcgagtctgcgctgcgtgccacgtaccaaacgctcaattctccctcctgggccctgtatccatctctcgttcgctctctgtggctaatgcagagcgatggaacagcctcgggagaatagctggagaaagctcagagaaagacaaattaaaaggagctcagcgcagcagcaaatgctggagaacagcgctcagctgacccgttaaatgagtaattcggtaaaggtgtgttaatcagtgcggcgccccgagagcccagcgaaacactctgggaagatacctggcgtggcaacgggactcttcaacgctgcgatctagaaacgctgctagtcctgggtcgtagtccctctcccctgtctcgcttaaagagaggggttcctgggttgcaatacgttggagagcaggtgatcagatgcatggttggcgagcccctggcgcatggcagaatgattgaggccagggtcctagctgcaagcccatccctgcgtcccagtacattacctgcctgccccatgactggcggggctggagaaccctgagacttaaggatcttataggtggcaggggtggaaaagaagagttctctccggtcctggaaagctctaattgtcagaaaaactaggtggtttgcgtctttaaaagcaagttccagtctgcggggaaccaagcaggtgaactcctgactgaactagatacctgttcagcggctagaactggagactgggagagctggaaaacttttagtggctttccatacctgcactcagttgagcgctcgccccaatcctgtacgccggcctactctggtaaggacgctagacggcgctgccgggacacgctttccttctccggagaaaggtaagagagcgctttttttttttttttaaaccaggggatgggggacttggggttggcagcctttctcaatctgcctcccctccccgcgctcccaaatctaaaggggtgtggaagaggaggaggagcagaagcagctcttttcgtgacgcgccagagcgcttctctctaattcccacctcctccccggtgcaatcagtcagccaggaggctccaaactgttagcgacaaaaacgcagctctcggtcactcccactaccctcccacccgcactccaggcatattttggaggcggcagcagcggtggcaggatgtgaggcgagcctggagctcatttccaggcgcccttccctcttcggaactaagggagacttgtgggcttttgcacactggctgtagggttcccgggaaagactggagcagcgaacaggagggagagaggtggacaggcagagtctgcacctgccgcctgcacctccgttagggcgacagggcagctggtgtttcgctcct

SEQ ID NO: 44270 - DNA, 2300 bp, Homo sapien
cttagtcccctataccagaaacctgggcattatcctcagcattccctcatccttgtccctgacatccctatgcattctatctaccaaatggctctctacactcttctctccatccctatttccactgctttagtttacttcttgaattgctttagcatctccctaatgggtcttcctgactccagtctctccccctttcctcaccattctcttttctacattatcttctggatgctctttctgtagaagtcactctagaataagccaaaacatgaaccctttccactgatggctgataaataaaatatacaagctgagaaggaaagaaatcacaaaacagcatctaaaaacagcatttaaatggtgggactttatgcctctggggtttaactaccttcttaggtaatattttaatgcttgatttattgtctttttcctctctaattatctgacataggacccttagagaagaaatattgtctttttaaatgtagttcatagaatagaacataatgcccatataataaaaaatgaatgctctgatttttcagaagggaaaataacttaaaacgccaaaatcagtgtatccctgtatggcttagtcccttaggtacataaatgatggtggataacattgtggagagagttaaattagaatggtatcctggggtgagattctaatgtcaggacaaggagtgtgccacaaggatccatcaaatgattttaagcttaagagaaacatgatcataggaaagattaggaagtgattagggattatgaagaaattaaagacaggaagattatttgagaagaaacatggacattccctaagtgggcatggatgtcttagaagtttctgaggtcacagcaacaagattttgtctcttagttgacttgtttttaagggtcggtatgaagggtaggtaacttaaaaatttgattttgaggtttctgtattggacaacataggaatttaggaggggaatcatctcctgcatatattaaaataagcaagaggccattagtttgaagctgtttccatactttgagttcctatctaacaaaccgcaaactaacttagcatgtaaacagactgaaacttaacataagctgtataaaagacagcctaatttcagccaaacacaactagccaggctccagctaattacaggcagtcaagtgacaagaccatgtccaaataaggcaaatgccttgctgtagccaatcaggtgatttttctcttttgtgtccaaactcagcctataaaaattcacttctcatgttgctgggaatagctctctgaaactcttctggttctgagtactgacaaattcatgactcgtttttctttttttttttttttggttgttgtttatgtgtaaacaaactgttaacgttgtctaacgtttttcttttaacagggaaaagggggagtcatatcatgaacattctgattgtatgtgtctgtaggacatgtatgaaatgtgaatctagattgggagtttgacatctacaggccaaatcatgccaactgcctggttttataaatgaacttttattagaacatggccatggtcatttcttcaggtattatttatggctgcttttgtgctacaagtagttgggataatcttttgcccacaaagcctcaaatgcctgctatcttgcccgtttcagaaaaaggtcactaacctgtatactaggatttaggagtctggaaaatgaactgcagaattttcatgggttgggggctttttcgtgttctagaacatacccattattcccccttcaacctctaggggggtccctactagccgttggcatgggacaaaccattgtcaagagggagggatacatgggacttttttgacttgattataagggcttaattttcttggttctaagtcttttctgaccactcctgtttcttccgacctttaagggctcccaaccatgtgacaggttcccttaaatcccaatggagtggcaggggccttcctcactcactcccttccactcctggtatctctggaaattggaacagtcccagagtaaaagccgacgttggccctgagtcttcctttccctggaaccttaggagggagagagatcttcctctctcttcgggcgtgttaagacagcggggttggcctgtacttcctctggccctggctgaagaggtgaggcctggtgggaggtgtcctagggtaggacaagccggtcagggggtcattaggacggtcttgtcagagcgggtagggcggggacaagagggcgggagaagatggatgaggggaggg

SEQ ID NO: 44271 - DNA, 2300 bp, Homo sapien
gggggcggtcccaagagccatgtggctaatccctatggagtctccaagtggctagcctcccacagagccttgcaactagtgagcccaatgatctagcctggattgttttcctggcctggacttgccctttagacaggctaaaacggtctttgccattaggggccacggggcattttcccccacaccccacgttcagcaaatcgtattgttaaaaaaaaaaaaaaagttttgacttatgaacagctcttccctttagcaaagattctcttcagagttcctttaaatgttgtattttttgactccgtgtcttatttctaaaaactaaatgtgtatgtaaaagtgtaattttctgttaactagttcacctgcccttctctagttaagaaatgttaatttcagactcacatttaggaagattcagtagagttttactgatcatccaggaattcttaaagtgtgttttaaaacggtttattttgtgtggtaaaattgtcaagatttgaattattggaaagtgtaatagctgaaagtgtaatttcaaatatgtatcatatttgaattatcgagaaaattcgatccagcacacccgggtttgtttttgggggaaggtagtggttggttttctctgcaaccgttaacagagaattttctttatttagcgagacccggttcctcacacaggctgtggccattacacagctcactgagacttgaaagttaaggaatgtaaagaggtcaaactctggcattgaaacagacaggaaataaacaaaatctaccaatatgtaaagatattacagaaattagaagaatgagtcagaaatggagagctctaggtcagtgggaagaattattcgtataaatcttcttagaagaggtaggtaattattaatcaaaaaataaagaaagaaacaggaaacaagtccccccacatcgctttccgaccccggagttagggtgcgcagaatgccgtctgggagctccagagaaagtaagcagtgtcgggacatttactaaagtgctctctgcagagcatgagtttagaatgcggttagtttatgcaccgactccccttcccaggaatgtttcaaggggctctttctcaaagctgaatcacgtttgtgagattcttttaagccatatgtcagtcccccagcgctttaaaggaaaacggaagcaaacaacttgggcacttggaaaagttttgcaatgaatgagcgaatgaatgaaacccggccggaacgctggaggctggaagggatgcaggaattttctccgcgcgctgcgaatacggcatatgcaaaacttaggacccagggcaggccgggctttggagacgagtcagtcttactcaaccctgcgcacctgagaacaggtgctgttctgagtgaacgactgggacctggcacgaactagcctggggccagaggagataaggcctgccgggagaagagttcccagcggctctgtccattctgctcttgccctcggctaatggctttgaaggccaagctgtgacagccccggggcgtactcggtgccttcctctgttcaaataggtgctcgcctaggactgattcccaacccatggcaagtcatttccttctgtaactcggtaggtctttgcaagaaatggagcgataaaatcagagggacagaaagagaaaacagccaactagaaaagtcagaagtgtttcttgggaagtctagggcgcgggttgtttggactgtggcagggctgtggggcccagactgggagcggcgcggagcgagaccggttttccggggctggcagctgcctggaaaaagtttcctgtggaacactcgccagcgggggcgggggcaggggcggctggcgcagcagtggacgtgggagggggcaggagggccgggggaggccgcgaagggcctgctcgcaaaccgttatagtccttcagcacctccctcggccggtggccctcctagcctgcctccccgccgggcggctgcccacctggcgacgtgacgctgcaccaatccctttcgagctgctcccgggtcccctctccttgcaccgcccccctccccaccctgaaagaggcgcaccctgacggggcagacacagcgctctcgacacggagcacccttctagcttcttcgtctccaggactgacgctcaggctcctctctcgccttagcccaacttgctttcccgcctcgcaaactccggtttccctccactcccaactcttttcactacacgtttcccctcctctatctcccacgccacgaaccccgatccccagactcctctctcccgc

SEQ ID NO: 44272 - DNA, 2300 bp, Homo sapien
tgctactgctactactgctactactactactactagagctggaaactttcagaagcaggttgaactcaagtctcctgactgagtccagttctttttgttcccattgcttctttgcatataatcagtacacaattaatactggacagtggaatctttaatttcagtctccttgactccttctgcatcctcttttggagtcctgtggccaggggacggtacagggaattttaatgacgagaagacagggctggtttcccccttagcagacatatatgtttgcagcatcagaagtctagggctggaagctacctttgacatcatttcctctgcgaatgcatgtataatttctacagaacctattagaaaggatcacccagcctctgcttttgtacaactttcccttaaaaaactgccaattccactgctgtttggcccaatagtgagaactttttcctgctgcctcttggtgcttttgcctatggcccctattctgcctgctgaagacactcttgccagcatggacttaaacccctccagctctgacaatcctctttctcttttgttttacatgaagggtctggcagccaaagcaatcactcaaagttcaaaccttatcattttttgctttgttcctcttggccttggttttgtacatcagctttgaaaataccatcccagggttaatgctggggttaatttataactaagagtgctctagttttgcaatacaggacatgctataaaaatggaaagatgttgctttctgagagatgcaggtggattcttgggcatttgctgtaagtactttttttctctttggaaactttgaacatctctatcagcaagtcagagtcccaaataaccaagttggcaagtcagagtcccaaaccaaattcctggctctaggggtgaaggtctaagtgtggtcatctaataattgactttctaccagcctcagtgacttttaaagaaagaggactctgatgatgatatggagattggatagagtggtgaacaaagggggttggtatggaggatataggagatggtgtgatctgttaggagctgatatagtagctcaggccatgaactgagaggcagaggcagcaggaatgaagagaagggagaagttttgagagttatttaagagttagtattcataagacatcatgcttcattagatatggggaatgagaataaaaggaggctatgattattcccaggtatctggcttaggtgtctctatagacagtgatgtgataaactgagatgtggaatgaagatgagggagcaagcttaaggtgtagggagatgatatgtttacatctggcaactttgagattttcttattgagactgaggtctgtgtggaccatcctggtggttatatccaaaagaaagctggataaatggctaggagctcaggagagcaatctgagagagatacagtttctagcaattgagtgcggagggtaagatcactcaggaagaagatggagggtggaggaaggatcctttttctgagttcatagacctcttccttctaagcacacatgtccactttcattggatttccacacctgacttctttactccatttctttgcactctttcaggatcagagaaccttacaccttatctttctggctttctttataataattaaaagtaacatgcataggtgtaagaataatagtgttaagatgtcttacaacttagaaatgactgtttagatgttactaagattaatggtgaaagaaatgtaaaatttagaaaattattctttcattttctggttgttcgaaaatacctctatggcttccatgcattgcaaaatgcatgaatttcagctcatgaccttgtacgtggctccataaaccaccacccatccattccaactaatcatatattgtacaaattactttcattttgtcttttagccaaataagatgcgagtgttctctcatctcatagattttatcttaagaaaatgccagatgaaaaaaaaaatctaaaattctaatctacaatgaataatgtatacagagggagtactagtttaacctaagaatatcccctctctccaaaaggctgcctctagttcagaaaaaaagtgattcaatttccataaatttaatttactcacagcgttttcataatgttgctataacatctgaatgacagtccatggcattatttccgtggttgcagcaagccacttctcctactccctgtccatattagatgcatctcctgtttttcaagggagagaaacccctgctcagcccctgatgagcacat

SEQ ID NO: 44273 - DNA, 2300 bp, Homo sapien
cactggttttttagagcactttttaataccaaagaaaataaaactgatgtcaacaataataaaaaagcgacactttagagtagagtcttttcattctggatagcaatgtttctcaaggtcttgtgactttatagaacacagtttatcagttctctgttcttgatgttgttatatttcaataaactattattcttagtattatgtccttgttacacattagcagaatttgtcccacaattttgcagaatgtttcatgaacagaagcggtttttatagagctgcaatactgagaagctttgagctttgaaattatatcagagcttttgagataacttgctattagaaatcacatgaataaacaagtgggactacatcaaactaaagtttctgcacaacaaagaaaataatcaacagaatgaaaaggtaacccatggaatgggagaaaatatttgcaaaccatgcatccaataaggagtcaatatccacaattagaaacttataaaattaatacccacaataagaaacttataaaactcaatgtcaagaaaaaactagcaagtaacctgattttaaaaatgagtaaaagacactgggtagttattttttccaatgaaaatgtgcaaatggtcaaaaggtacatgaaaaggtgactgtagttaataatatgtaatgtatatttgaaatttgctaagaaggtagatctaaagcgttctcatctcacacgaaatggtaactatgtgaggtgatggatatgttacctggcttgattgtggtaatcatttcacagtgtacacatatatcaaatcatcacattacccatcttgaatatatataatttttgtcaattgtacaaaaaaatcacattccaagaccaaaataaacagacattaatctgggagagatcaaagtactttgtaggtaaaagagcctcaggaggaggcactgaccaccagttccttttacttctataagagctaatcaaatttttcttacttgcccaataatgtatttctatccatttttgcattattatacattttgaggtaatctcgtgggtacaaaaagtttacaattgtcatatcttaaaaataatgaagaaaatgtggtaaaaataagttgaatagcagatgaaaccaaaattgtcagctttattaagaggggaagataaattgcaggactttgcttgtgagagtgaaatgagactaacagaactccagacttaaggaaacctatccatcagcctagaagcatatttctctagtctagaagacgcagagagccttcaagttacactgctttgagatttcttcacagtgaagtgaatatcaggaatagggaaggacgttgggaattctctgcttgtgttctttgcccctttctctactttgttgttcatttctttcttattgaaatgaaagaactagcttgggtatatttttgtttatctaatcatatggacaaacaaaagcacttgaaaagcactcctaagtttgcggctgattttttaacttggcctatggtgattttacgcttaatacattttttttttcaatttcagtataatcagattttgtctgaggatttttctttggaaatgacctaaggaaagaagtataagaaacttgaataaaaggagagatatattatgtcccaggttcagattcaaaattgtaaagaattaattctacctaaaataaagtattaattcactgtaatccaaatcaaaatacttagcgtatgtttttttgtgaagtttggccagtaggtcttaaatttaccagaaataaagtacaaaagaggatcagaaaaaatatatgtaaggaacgttttaaccacatctttattatatgaaaaagagatttgctgttgcttctctttttccattaaaacacctatcctagggggttgaatggaaattgaacagacataggttaccattacactttaaagtactttaagaggaacatttcttccctttaactgtatttcggtttaagttggtcatttttctcctaagcgaaggaagaacctcgtgctttccccatcacggagagggggcggagcatcctctaggagcttggaagaaagctgcgcccagccagtcttcggggaggagctgcattacacacaggcttcggaggcttccgtggagaagcttggaggtaatggctgtcgtaaatgctagttattttcagagagttctcgaagatttggaataaaggtgagaaaagaagagagtgctgcttaggaataacgggaaaggagtgtcgttctgtgagggtcgttgtttctgtgaggga

SEQ ID NO: 44274 - DNA, 2300 bp, Homo sapien
ggggttatttcttttttttttttttttttttttgagacggagtcttgctctgtcgcccaggctggagtgcactggcgcgatctcggctcactgcaagctccgcctcccgggttcacgccattctcctgcctcagcctcccgagtagctgggactacaggcgccagccaccgccccctgctgattttttgtatttttagtagagacggggtttcaccgtgttagccaggatggtctcgatctcctgacctcatgatctgcccacctcggcctcccaaagtgctggtattaccggtgtgagccaccgtgcccggccacgctggtgttatattcaccaatttcctcacagtttgaatgtgagcgacatcatctttggttctaccaaagaaacatgattccaagcccaggagggagtgaatagtggtggaaagagggcatacctcctgttttggagtcagactttggctccgattttgtctcaccctcttcctagctttgtgaccgtggcattagcaagagtgcccttgtttcctggatctctattagttgtatcatttatttgcttcttagtcaatttaagtagaaaaatgccatcttattgctgttttatatttgcatctctttgattattagggaaggtgaatatcttttatgtattagttttaatctttattttgaatatttgggttttgaggagtcccgatatatagcacctccctttctccactgaacaaactggatagatagatataaaacaaatggagttgcagatggaagccaaaatgtcaacattacaacagtacaagaggaagaggaagttgcggggtattgattattgtgagaatcaaatgggcttatatattaactattattttattttatttttttgagatggagtcttattctgttgcccaggctagagtgcagtggcgcgatctcagctcactgcaacctccacctcccgggttcaagtcattctcccacctcagccctctgattagctgggattacaggcacccaccaacacgcctggataatttttgtatttttagtagagatggggtttcatcatgttggccaggctggtctcgaaccgctggcctcaaatgatctgcccacctcggccttccaaagtgctgggattacaggcttgataacagaactccaaatttaagcaaacctaccaaaatagcctagaggtttgtagctgtacaggaagggacagagattcctgtggtggcaccatatgagcttgccctcaaggaagtaaatattaggagtggggaaaaattatactctcagaacattgtgaattgtctatttatgtcttttgcccatttttactctgccatttatttcttattaatatgtaagaactactttagtgatatttttgcgttgaaaacagttttgtcaattttgttcttatattttcaaatttggtttattgtgtttttgccaataagaatttttttgtttccaatttcaggatattcagatacctacatatctctttaaggattttggttgatgttttatgtttagaaatgactttagttgaaaaaaacgatgaaactttctgaaagatgaatgagaagacctgaataaaaagagagatatacatcatgtgccagggccagaagaattaaaatttcagggaattgcttatccacaaaataatgtattaattcattgcagtacaaataaggatgtagaggggctttttaatagagcttgaccagtcggatcttgaaatcgtttttagaaataagttgccaaagtaggcaagaaaaatatgtaaaagatgttctttactgagtctttattatatggtaaaggcatttctacctttgtttttcccagaaaatcacacactcttgtagtttgaatgtaaattaaacagacacatgttgccattccgctttcaactgctttaaaaatgatgatcttttcgctttaagggaattgcagtttaacttggtgatcctcttccctttgagggaaaggtccccttgctattcccatcactgggagggggcggagcctcgtcggagccgctcggaagggagctgtacccggccagtattgggggaggggcagcatttcaagaggctgcagctgacaagaagcttcaaggtaatggctgtcttaaagccagttattttctgggaatttcttcgggccttggtgttaaagtaaaaaaaaggaaagaaaagaaatagagattgttgcctgagagaggtgggaatggaatggttttgtttgaactgctgttattggaacggaattaatcctctgaatt

SEQ ID NO: 44275 - DNA, 2300 bp, Homo sapien
atcttttatcaaacagaggttgataaaaggaagcacatttttttcaagaccgtaaagacctttatagacttgagcttctacttgtgcatatgctgcctgaagtttcctgacagcattgacccgctgctgaaccaaggcaggtagggtctgagcaactaagccagctgtgccaatagaagttgcaagggccccccaggactttgctgccactctcaggcctcagccccctacgttgcacaggccccagtctccaaggatttgcaggcatcagccagcacctcactctcacaggcctccacctcccctgccgtttcctctgcctgcaggaatgcagcgacctctgcaggttcctctggctccccgggcaaggctccttctgccaggtacacgccctgccagacctcggctcccactcctgggtcctcctgctcccgggtgcgctcactcccagatgctcctgttcccaggtcctcccgctcccgggtcctcctgctcccagatcctcccactcccggatcctcccactcccctggcgcaagtgtctctccccgctcctcatgttcctggaaacagcacgcagtctgcatggggccggaccaggatatggtctttatattaataataaatacagtatagaaagaaatggaccagatactggaatagggactgaaacgtcaccatgggaactcacaggcgccacaagcaatttctgcatcctctttgttgtccttttccttctcctccttgtcctcatcctcagcctcctcctcgtcctcctctttgtcttcatcctcttcctcttcttcacagccctcctccactccttcatagtcctcctcctctccttcatagtcctcctctctttcataaacctcctcctctccttcataatcctcctcctctccttcttcttcttcctccccctctccttcttcttcttcctccccctcttcaccctcctcctcctcctcaaattcctcctcctccttttcctcctcaaattcttcttcctcctcctctcccagctcctcctcctctcccagttcctcctcctctcctagctcctcctcctcttctactagctgaaaaaaaccagttctcgatggggacccaggcctcatcttcctcctcctccaaaacagcttctattgcctcctggaaatcctcaggggctacctctgcctcggcttcagccacccattcttcaggcaccaaggcactcccgatgaatccagggtccagggctgccccgtcacaagctccactctggctatgttgggccaggtctcacttctcagaggtagacatggcaggagggactcaccagtcaggacctcaactggagcaacaaatggggctgcagcgacaaaggcagcaaagatggcggccacccagatcactgccgctgaggagagggagtccgctggcagtcaggcctgctgcaaagtggtgggggtggcagagaaggcggccaaatgggagacaacagtctgtgatagtggctgtggaagccccggaacacgaaggtggggcgaagtgggacccgccaaggctgccactaaaatggctgctgacaaggtcagccacaggggcagagcctggatgggtcaacaaatggcaacttcccttcttacaagctgtaaactcacttgctgagacgtgacaatggagatgctctgtgtctaatgagtgagcaaggtcctcagtttcccttgaggcctcagggcgctgggctacccacccctgctgcccctcactgagctcacacaagtgtggtccttttaatcctaccgttgccaacaaactatagtgttctgatatgctgggcctcctggggcatgtgaccttaatttgtttcccagtttccacctggagacaccttgtgccagtagggacactgtcataaataaataaataaatcagtatatagatcaaatatcagtgatggtacagagagagaatttggatattttagcattattaaatctacttagaaaagaatacataaagtttaaatggatgcggtcagaacggagttgaagaagtgttaaaaacaggaaaatggggaggagccaagatggccgaataggaacagctccggtctacagctcccagcgtgagcgacgcagaagacgggtgatttctgcatttccatctgaggtaccgggttcatctcactagggagtgccagacagtgggcgcaggccagtgtgtgtgcgcaccgtgcgcgagccgaagcagggcgaggcattgcctcacctgggaagcgcaaggggtcagggagttccctttccgagtca

SEQ ID NO: 44276 - DNA, 2300 bp, Homo sapien
tattttgccactggagattctgcagtttacataacaaagtacctacactcaggcaacttattttatgtttggtaaatttggatttttgtatattgcatttgtttgtttatggaaagccacacttgtatattccctttggtagagaggcactgggaattatatgttttacttatttaaaatatttgagtgccttttatgcatagcagtagtgaaagaacaaatcagtttctgctttcgaaaagtttaagatctagttaatgcagatcataatcgggtgttccaacttgtagcgactttgctaccccaggggacatttggcaatgtctggagatatttctggttctcacaactggagggggaggtgctacaggtatctaatgggtagaggccagagatgctgctaagcatcctacagtgcacaagacagcccacaacaaaaaactttctggcccaaagaatcaagagtgcccatgttgagaaactctgagttacgcatacattaagttttttttttttaactgcaagtattagatgataagtatcaaatgagtgatacaaggtgatacagagaagagaaagattatcctagactgaattggtgaggggaggcatcatgaaggaagtggggttcaagactaagtgtcatgtcactcctttgctcataatagaagaaaccctgctacctctctgacctcacctcctaccactctccccctcgcccctccactgcggctgattggcttatgcatttccttgaaaatatcaagtatgcttctgtctcatggaatttattcttcttgttttctctgattcaagtgccattcccctagatatccacatagctcacttcctcacttcctgcacatctctgttctgttcagtctcttactagagaacctttctgtaatcatactttttataaaatattaactcctgttccctccactttatttccccttactatgttttttggtctccctagcaaggctataccctgcccagaccagacactcaagaaatctgtatagaatgagtaaattagttaagtattaataacggcagggctctttagcccaagcaatgagaagaaacttgagggaaggaccctgactacagttatccccagtggcctaaaacagtgcctacctcatatagagacttcataaatagtgaataaagaatgataaaatagagagccaaaggaaattagtataaacaaaatcagctcataaccatcttaaaaagtattcttagaacaattactcccttctatgtatactggatctaagtacatctattaaatattttatccttaatttttactattcttatcagctttttcactttacattcgttcctgatatatgccttgcattaaacaaacaaacattaaacaaagtttctgaaatctctaccctagatgtatattaggccaggtattatattaaaactagctgcattttaagaagtctaatctaaaggcagccctttacaagccagttctagttttctattttcatttgcacttaaacactaattcacccaccctacactcagggagccactacagataattatgctaatgctaatcgcaatagcagctaatgtttactgaggactttttgtgctagagtctgtcctggaggctctgcataaattatctggttttgttcatactacaggaaacccatgttataacattaacatatgttaaccaactctaaattactttctgttcctggcccaaagcccaaacccccaaatccctgagctttgactctgcaccctgattcttgccactttctcttttcccttgcctctaggcatcctcctttccaggggaccacaagcgctctccccctccctctttgagaaccatgacaaccaccgattccccctccccttcccctgtcatccctcccccagacggcaacccggcgggcacaaggtcggacgacctgctacgtaactcgcgcgtgtgactgcctagtaacagtgtctcgagtcggaagcgctcggagcgaggggcggggtgggagagctggcgcgcgcacgcgtaaagtctttgcagcctcgctacggggcggagtcttgcctgtcagcaggggcagagtagcgatcgtcgccaaagcgcgcggttttatttctctccgctttggacggggcaaactagcttttgggagtgaagcgggtacgcagttatccaacaatgtctggtgagtcaggacagcctgaggctggtccctcacatgcagggctagattggccgaaccctgagaggaatcgggctggggtcccgg

SEQ ID NO: 44277 - DNA, 2300 bp, Homo sapien
ctctgacctcacctcctaccactctccccctcgcccctccactgcggctgattggcttatgcatttccttgaaaatatcaagtatgcttctgtctcatggaatttattcttcttgttttctctgattcaagtgccattcccctagatatccacatagctcacttcctcacttcctgcacatctctgttctgttcagtctcttactagagaacctttctgtaatcatactttttataaaatattaactcctgttccctccactttatttccccttactatgttttttggtctccctagcaaggctataccctgcccagaccagacactcaagaaatctgtatagaatgagtaaattagttaagtattaataacggcagggctctttagcccaagcaatgagaagaaacttgagggaaggaccctgactacagttatccccagtggcctaaaacagtgcctacctcatatagagacttcataaatagtgaataaagaatgataaaatagagagccaaaggaaattagtataaacaaaatcagctcataaccatcttaaaaagtattcttagaacaattactcccttctatgtatactggatctaagtacatctattaaatattttatccttaatttttactattcttatcagctttttcactttacattcgttcctgatatatgccttgcattaaacaaacaaacattaaacaaagtttctgaaatctctaccctagatgtatattaggccaggtattatattaaaactagctgcattttaagaagtctaatctaaaggcagccctttacaagccagttctagttttctattttcatttgcacttaaacactaattcacccaccctacactcagggagccactacagataattatgctaatgctaatcgcaatagcagctaatgtttactgaggactttttgtgctagagtctgtcctggaggctctgcataaattatctggttttgttcatactacaggaaacccatgttataacattaacatatgttaaccaactctaaattactttctgttcctggcccaaagcccaaacccccaaatccctgagctttgactctgcaccctgattcttgccactttctcttttcccttgcctctaggcatcctcctttccaggggaccacaagcgctctccccctccctctttgagaaccatgacaaccaccgattccccctccccttcccctgtcatccctcccccagacggcaacccggcgggcacaaggtcggacgacctgctacgtaactcgcgcgtgtgactgcctagtaacagtgtctcgagtcggaagcgctcggagcgaggggcggggtgggagagctggcgcgcgcacgcgtaaagtctttgcagcctcgctacggggcggagtcttgcctgtcagcaggggcagagtagcgatcgtcgccaaagcgcgcggttttatttctctccgctttggacggggcaaactagcttttgggagtgaagcgggtacgcagttatccaacaatgtctggtgagtcaggacagcctgaggctggtccctcacatgcagggctagattggccgaaccctgagaggaatcgggctggggtcccgggaggggtgatccgaagagctggttcccaagggcccaggtcctggatccaaaaggttcttgagcagattatggactcacctcgccagtgtgtcaccccctcggaggtggtgcctgtaactgtgctggccgtccagaggtacctgttagaggatgagccacgcgacacggtgcccaagcctcccctttattgctatgatgtgacgatctcagatggggtgtaccaggagaagtgctacctggaccccagcttgaactctctcgtatatcaaaatattcttaaagttggcattcaaatgagaatttccagggtctcatgtctttacaatgagaaaaggataggccaggggatcctgtgcatagataacgtccactgtggggagacttcagacagtatttctttagaaactcccttcagaaatagagcgcaccaggagaaaccagagaggcctttaagaggcgggaagagtcattacctggcgctgtggaataacgaagatccctatggagatatctggttaacagacaagcaacctgaggaacacaactttagcggtaagtgtttggaaagaacggcagagggttttaaaaaaaatagttttcaggagcttgcgtgaacgggaaaggaaatgaaaatgcttttgtattgttaattacaagccaggagtggtaggtagacaagttttct

SEQ ID NO: 44278 - DNA, 2300 bp, Homo sapien
acaaaatgataatagcaaaaatattatttaaaattttgaccaaacaaaaatggaatgactaagtaaaccgaggtatttccattaatggaatatcatttatccaacaaagcattgtctacaaagattataagataaaatatataatgactgagatattaaatgaaaaactaatttaaaaatatataaatatgatcatgtaactaagaaaaaatccctacacaaaataatgaaaagaaatcttaagataaacaaagaaatattattttttaaaatttgacttctaatggatttaggtaacttctcattaatctgcttttaaagtttttcatgagaagattttttaaggagtaatttaattggcagaaaaggatagatcaaatttctgggattttactaattatttaaatgttgaatgttgatgttgaatttatcacaaaagactgtccatcagcaatctctaagctaatggttttgacaacatttataataacaataataacatttctgtttttagtctgataattttctctggtgaatacaggctttattgtgatcctaaaaacacatcaaaatgatagggctagtagcaaaataatgaactatttgtgtttactcttaaattgaccataagctaatacacaagacctttaatcttttcagttcaattatatgaattattaggctgttactaggtgtatgatgctagtagtaccaggtactatgggagggtacgctaatgagtaattggcagctatgatatgatagcaaggttcatatttgtattatacatctgctgggatttattcagcaggttctgctgctgattccctgaactccttccctctgctgagtggtgtgaactgttaattctcacctgcagggtccactccaacactgatatttcagatgtttaaaagcggacaagaagtagggagaagaaacagcttcattgaccacctccatcaacaacgtctcctatttttttattttcggttgtcctgtccccttgactctagtaaaccttcctgattccagattacctgacttggaccttggactaccattgtccctaccttccttttgacctggtagctttttgcttccctggaagcctgatgcctgtttgtctagtttgctgactcttggcccagtcagactcctgatatctctgtttgtcttgttcgttcatctattccttcatcagcccttggcacacattgcaatctccccatcccagcaattttcacagaccagttgaccccgtagcgtatgtgtcctaatgctcttagtgtccagtgtgctcctgaataaaaacagagcttgaactaaaggaagcaatgaaacaaataaagttgtctatacatctgggagaactaaaaatttaaaaatgtaaatgttaaaaattaaaccttcaacaaccttttttagagtataacacatggggcacaaaaattaatggaatgcagcaacttgcaggtatcaatcaatcaacaaatatttgagtgcctgccatgggcaaggcactatacttgaaaggaaaggaattctagctactgaaatatgtttgttttccaacgaataaacaaggtaacagaggatatcccttggggagcctgctaagaaaacacacacacacacacacacacacacacacacacacacagagagagagagagagagagagagagaaattagaagagaaaaaagcaataaaattcattctactaatgccatagcaattaaactcatggatcttaacttactccaggctgaactggttgatagcatatttcagcagggcttggcaaaccagtttagtgttttagatattctgagagaggtaactttcagccttgtcacgtgggattccccagagtccagttcctctttccaatccactccatgtttatgaaagtgcattagttggaacagtaagaagaaaaaaaaatgtactgcaggaagtcatccaatcctaataagttgacatgtagaataaagttgatggtgttatttattactaaggtagtcctggttaagggttacctgtgtgtacagctggaggaggggcaagcaaaggggaatgtagataactaaagtgaaatagagctgatgtatccagaggttatgttgctagaggtgagatcagttacctacgtgcaactgaaatttcaaacttctgttcagcagggacgtgagtggacaatggtgactgatagttggaaatatcagcaaacatcttaaattttatactcaaatgaatgagcaatgaaccaggagaataggtccagttttttttggct

SEQ ID NO: 44279 - DNA, 2300 bp, Homo sapien
caaccattttgcatttactgggcctgtagtaattgtagcttcctaacatttctttttcatatttcaatgcctttccttgtgttgttttctgcctagaaaagtttactgtctcaaactcagcccaggtctaacctcctctgggaagcttttccttacttctcagtctgggttaggtgcttctctgttatccactactaccctgtcatatctccatcatagtgcttacactatatacatatatcactctatactgcactttccattttacttgtccttctcatcaaaactaatttatgagcttcttgataggagagttgatgtcttatttgattttgcaccacaatgctcagcccatggcttatggcagatgtacaacaaatatttaagaaaataatgaatggaaaaacattaataaatgtctctctgaacttcatttttgtagctataaaataccttctttcttctgaacacattgtttcttcaaagtacaatatagttggctgtcattcaggtaatatcaattgaattttgaatgctcttcaccagcaaaatcagacaatttctggaattgtaccatttctcagaggtggttggtcctacccatttttcccctaggtaatttttatctcagagattaccatcagtatttgggggtaccatgctattggtctcatatacccactttgacctctaaagtccttttcaatacctaagagtatatgtttcacaaaattgcacatttatttatgttctaggtgttgtttggtatatgatgttaattttcctctaggtttctctcaagccataagagtatcaagtacagaattggtccatgcttaatctttgtaaataacattgattaagtaaatgctgggccagggattgaggggagtaattgatcagaaatttaacaaatgttgagctgcataaagtagactgtatttatttgaactgaaaaagtggctaagactgaacatcttgaacatcattttctctgatattacctcaaattaaaactttaatattattttagaattgtgtctctgaacctgtttaataattttaacatgttttttatattgctaagcattgttctaagtgctttattacatgtattaactcatttaatcatctgaaaactctgtgaggtaggtgcaattattatcccccttttacagatgatgaggaaactgagccacagggaagttccccaaggtcaaaagttattcataactatcagacagcaggtatattaattcagcttaattcaaggctcatttgttaaccatctagtaaatataatagttgacagggtagacaaaaattgaatacttaagcaaggataaatcgtaatgtaataatgccatgagtgaatcgcctaggcgagtcaggctcctttcagttagtgggaaatggagaaagattatgtagttaaggtcatgaatagcgcaggaacatccgctagggtaagtcaggtttgtgaaaaatgcagaagaaaggcttggttctgaggtgtgtgaaaacagtcattcttttgtgaggactaaaattagttttagaagaggcatctgatgcggtacatgaaacctagggtaacggtgaggaaatacacatgtatgaggcttcttaggagcagggaaagagaaaggtgccatttgaagtcagtaagaaagggtaacagcgcgcttttcctgcccttcccccctctagagaatcagtaaatagcctgattctactcaaattccttccctacccaaattcccttgactacaactcagaccctttggatctgcgctttttagaagtactgtacttcacattctggcaccgtaagcccgaaatgtcctttaggcaaatgttaggagggaaaaatgtattcttgcaattcaaaaccgactcgaatcctgccagaaagctttatgtttgcggactttatcgttcctcgcctgtccgttttttataaaacgacgcgacacacctagccacacagcctcagatcctattctaacatcgatccatcctgttacccttttaagaggcggatcccgcagtgtcctttcctccctcccagccacctctacccccagtcggctgggcggagcttcacgctaaagccccagagcccgacgcggcagccgcggtagcggagaagactggagctccgaggagctgcatctgcggcaacctgtgtgctgacgctacgtgcctcctggctccgacgtagctcgcagctccccagtctcactccattccttccccacctggcgcgcacctgctcaagaccagggtcctgccaagcg

SEQ ID NO: 44280 - DNA, 2300 bp, Homo sapien
cttctaacagtcaggaccctcagctgcaggtctgttggagtttgctggaggtctactccagaccctgtttgcctgggtatcaccagcggaggctgcagaacagcaaatattgcagaacagcagatgtggctgcctgatccttcctctggaagcttcgtctcagaggggcaccccactgtatgaggtgtcagtcggccccttctgggaagtgtctcctagttaggctactgaggggtcagggacccacttgaggaggcagtctgtccgttctcagatctcaaactccgtgctgggagaaccactactcttcaaagctgtcagacagggatgtttaagtctgcagaagtttctgctgccttttgttcacctatgccctacccccagaggtggagtctacagagtcaggcaggcctccttgagctgtggtgggctccacccagtttgagcttgcccgccactttgtttacctactcaagcctcagcaatggcgtacgcccctcccccagccccactgctgccttgcagtttgatctcagactgctgtgttagcagtgagcgaggctccatgggcatgggaccctctgagccaggcgcgggttataatctcctggtgtgccatttgctaaggctgttggaaaagtgcagtattagagtgggagtgtcccgattttccaggtacggtctgtcacggcttccctttgctaggaaagggaattccctgaccccttgcacttcctgggtgaggcgatggcctgccctgctccgtgggctgtacccacttgtctggcaagccccagtgagatgaacccagtacctcagttggaaatgcagaaatcacccgtcttctgcatcactcacactgggagctacagactggagctgttcctattcggccatcttggaacctcctctaaaagtccttttagagttgcatgtgtgtatttgtatttattccagattggagttggatcattaacccagattagcaccttaacttaatatcagtgggaggtttctctagttggttataccttaacattcaataagtgctcttcttttgcttaagattattggtctcaggtcatataaactagagggaatataaaccttgataagcattggaatggcatgagcaatctgacattcttttaacattgggaaagataatgtttgtactttatttttttccacaaaacttatataattggtggtagagaggtaagtattttagataattagacctttagtaataagattagtcttagtttaggcttgtctttaataggtagtgaatagaaatgtgcatttctatatgttatcttcattgctaacctgatcacgtctgtgtaaaaccttagaacaccttgagcaaattttatattgcttttgaggatatagaaaaatggtacatcatggacatatgtagtttgtacatttgggtttgtaaacattgtttggctcaaattactatcccaatatgtaaatccttatacatgctagtagtgagctcttgagataatttatcatcttataaattgggaaatatttctgtattccccaaatcttagattccttatcatataagccctattttctacaatttgggggactatttgtctttaagcaagccttcatataagatgcaaattgggtctcaaaggcaatactgttgaattatagatagttaatctgaggagggggaggtgtttgttgtatataatagcttccttactaagttatgagttccctaaaatcggtaaccaaatctcatgcgtgtttatataacctacaactttcatatagatagtaggtgctcaaaaatgttaattgaatgaatgggtatccttcctttgtctcattgagacccatttaaaatcattttagcaattgggttattatactaagaatgtttcaccaaactaaaactgaatttgttttattttacaggtgcagtagacattgttgcaatcatgatcggcaatctgaaaggcacaaaaattctgcaatctattcaaagaggcatacaagtgacaatggtcatagaagtagggaaaaaacatggcccttgggtgaatcactattcaatttttttcgtttctgtgtccttttttattattacggcggcaactgtgggctattttatcttttattctgctcgaaggctacggaatgcaagagctcaaagcaggaagcaggtttgtaatggtcctttcttccactattaaaaaaaatttactgttctaattgtagtttcagggtcctgcattttaatacattgtacttgctagacaatgatctcc

SEQ ID NO: 44281 - DNA, 2300 bp, Homo sapien
gatatttgtgctgaaattaagtcccatcatagaatttttttagttcacaattatgtcccaaaatgggagtgaaagtgccttgattatcacctcttttcctttttagggtctaggccttcctattcactgtttctgttagacttatttgctggtcaggtaataatctgagaggtttctgcttttcctgtgacagcaaagaaatactttggctaatattctccttggcattaagctaaatatcttccacaaaatgatatcttatataggagacaggtttgggcatcaatgagattcctcacctactgatacttatagattcttaccttccaaaatatatttgctacaaatatttgtagcatttgtagcaaatatatattggcaagtacctgttatgcttattgatgaatggtagtttacattttgtgtaataaacattttattgagtatctgctatatgccagacattatactaaatacttacattatctctaattttcatgtaacataaatgtcagctggggacgggggtacatataggagggaagctgcttacattctcccaaaggtctgggggcctactttttgccgaatttctaagtttgttcattttacagttcaaaatagaaagatcacttatcttgccatgctgcacatgctaccattatattccacacatgtattagtcgggtttgtgttgctgtaaaggaatacctgaggctgggtaattcataaagaaaagaggttgatttacctcatggttctgcaggctatacaagaagcttggcgccaacctccgcttctggtgaaagcttcaggaatctacctatcatggcagaaaggaaaggggaagcacgcgtgtcacagggagagagagggagcaggcgccaggctcttttaaacaaccagcgggaactgagaactcactcattaccataaggatggcactaagcccttcatgagggatcctcctccatgacccaaatacctcccaccacgccccacctccaacattgggggtcacacttcaatgagatttggaggggacaaatattcaccatttcaacacagcatctaccaagtgtcatacttagcctctacttcaattcatatgtatattatattcactacttcaattcatatgtatattatattcacttgaggcattcctgtctgtagtagaccttagtgaaggggaatgaagtatttgcagcatcaccagtaacttcaaattgacaaatatcttaacaaatatcacctgggattttttcctctggctagttcaccatacatagagggacaatgtgttattgaactgtatagactctctttatagtctttccctcacctggtagattcttcccacaccccaacttcacttctgactcaattatgcataatgttttagtttttattccataaatgagcctgtggcttgcttttgcatatccagacacatctagatatatgctcagtgaaacaataaaaggcgaccactctcagaatcaatcttcttcattaagcaatcgtggttataagcaccaatatttttcttaataccaaacagtgtaaaggttggtactaccctcattttatagataagtaaacaagctcaaagaattaaatgactcgtgcagggttattcattgagtaagtgataaagtcagattttgaaccattggaatccaaatcctatgcactttccaccaaacaagacacgattcaaaaaggaaattggaaaaaaaatgcatattaatgtcctctgagcttgcaaataggaagattgctttgaaaattcatagtatttgaatccattaggggtgggggaaatgtatttttaccattatggtcccaacagtattgtttaagaaagtagggaaacataagttaagtaaaaagtctcagtaacttggaaaatcctgccttatatcaggtaaatgggacatttattatggctaattaagttttatcttttaaaattgatttgtacattgacttttacctgataaatatttattgatcctctctatctttttcatcatacttcttttaaaaaatagtttttctaatacctgctgtttttttttttacagaggcaattaaaggcagatgctaaaaaagctattggaaggcttcaactacgcacactgaaacaaggagacaaggtacattcatgacttttaaatgctatttattttaaagcagtgctaccaagccattgttcaggctaaatgttcttcctaagtatgcttttattggcatttatgaaccttattgactttatatgcatttgattctagagg

SEQ ID NO: 44282 - DNA, 2300 bp, Homo sapien
acatgtatttcaaaaaatagctatagaacttatggaaataatacaccattttaaatcttaccaaagtcatgaaactgtaaaacactaatgaaagagataaatcaaagaagatctaaataaatggaaacatataccatgttcatgggtcagaagacttgctgttgttaagatgtcggttccccaccaaactaatttatggatttgatgcagtttcaataaaaatcctagtgtaaatcttttatagaaattgacaggctgattctaagcttagatgaaaatgcaaaagaactagaatgaacaaaacaattttgataaagaacaactttggatgattcatgctacctgatttcaagaattattttaaagtcacagcagtcaagatagtgtcgtattggaaaaaggatagatttatagatcaaagaaacagaagagagagtacagaaataaacccatatatatatggtcagttgattttccataaaagtgcaaaagcaattcaatgaagaaaggatagccttttcaggaggatagccctttgttggctatccatatgcagtgattggatatccttaagcaaaaaacaagcaaacagacaaaaaagaacttaaatccattcttcataccctatgtaaacattatttcaatagatcatagaccttaacataaaacctagaactatgaaatttttagaacaaaacgttaaagaaaaatattttcatgacttgggtgacaaatatttcttagatataactccaaaaacaagtccaaaaaagaaaaaagttgatacatttggccttgtcaaaattaagaatttctgttctttgaaaggcactgttaaaagaaggaaaagataaggtacagactgggagaaaatatttgcaaatcatatgtctgttaaagggctgtacccagaatataaagaactcttaaaacttaacagtaagaatacaaacaacctaatagaaaactggcaagcaaaacagacaattcaccaaaaaaatatatatatgaatggcaaataaacacataaaagatgttcaacatcattaataattaaagaaatacaaattaaagccacaatgaaatacaactacgcattcattagaatggctaaaatgcatacaactgaaaataccaagagctgggcgagatttggagcaactggtacactcattcatttgctggtgagaatgcaaaatgtatagccaatttgaaaatgtttggcagttccttatgaagttaaaaatacacttaccatagcacctagcaatctcactactagatatttaccctaaagggagaaaaaatctacgttcacataaaaacacaactgttcatagcagctttattcataattgtcaaatactggaaaaaagccaaatattgttcaactggtgaatggataaactgtggtacatacatatcatggtatactatttagcaataaaagtgtgatgggaatcccattgatacatacagcattatggatgaatctcaaatgcattatactaagtttaaaaagccagactcaaaagctagataatgcatgattccatttatatgacattcggggaaagccaaaactataaaaacagatcagtggttgccaggaggtggggatgagaggaaaggttaactacaaagagtttagaggagtttgttgggagtaatagcactattctatatcttgattgtgataaggattaagtgacgacatatttttcaaaacgtgcagaactgtacactaaaagggtgaattttactgtatgtgaattataccttaattttttaaaaatgagaaaagttatagagcttgcacaaatggtattttatatatcctaaatcaggaaaaataaatcagtgctacatgtttccctttgttctgttccccttttgtttcagtttattcttttacctttttaaagtctggatacttttaaatcacctttgggaactttacagttacataatcattcagtgatataatgctcctccttttataggaatttaggctggttaagtacatgtatgttctgatcttgttctgtagtttaatgtattttttcttatctgtcagagtaacaataactacttgcttgtaggaaattggccctgatggagatagttgtgctgtgtgcattgaattgtataaaccaaatgatttggtacgcatcttaacgtgcaagtaagtttgattttcttctatatcttcaataaaatagctgacccacaaaaatgactgtgatggaagaaaactattttgaatatttccaaattaatgtaaaaaatgtttatttttt

SEQ ID NO: 44283 - DNA, 2300 bp, Homo sapien
catattgtatttgaggtaactatggaccatatgcataagcagtatagtgtcatggtttgtaatcagacaaatctaggttcaaattccagctttgctgtttatttagctatacgatcttaagcaagttacttctctgagcctcctttccttcattcgtaaagtaagcatgtaaaaatgtgcaagcttattaatgaaaattaaatgacataatacatatacagtaccagtacagcaccagtactgtaccagcaatgcagacagtgtgcaatcccagtccttccccaagcaatttatattgacattgaatagagtggcacgctctatttttttaaggtgcttctaggaaaatacttttatttgcaagggtgcgaaattaagtcgtttattattgagccaaaaatttagatcacataagtaatttaattagaaaaaaatgtttacataattggtgaaatgtttatttactaaagcaggagctctctaaacgccctgctgtaagccaaaagtggccctgatcctgtaacagggagcatgtgggtatacctggaagaaattgcagagtaaacaggtagaaaagccatccagttctggatagcttttgccacactgtaacctttaagggtattggaaaaggatgtggtttgatggggaaggaagtaaaaaggggaaggaaaggtaaaaagaaaggaagatatctctcaacgtttgctacatttactgatctttctccaggaagagaagaagaaattacctcccttagtacacattcaaattgcgatggcttttcccaaagatacattgcagtctggactctgaaaggattatctctttccaaactgtccagatagctgccttgggactacttactgccatttagtagaagagaatcccagattgccccttttctcattcacaagaaaaatccctgcttggagcacacgcctgcctcactcgagatggcacacatcttggaaggttaccccagagatgctcctccagggcagagttccttggcttggcatctgcgtgtgccccaccccatttttttttaatccacatgactttgaggctctattctcaaaacagcttgccaagagccctttgcttatacatggcctcccaactccttcctccctctaaactttttttcacttttaatgcactctttaattccggtggacttagttattgcaataaataaaaacatctgtcaaatatttcctcacagcgatatcatgcaaattattgacctcattcaccttagtgttcaaaccgctgcgcatcattgccaagatacaaagagatcaagtttgcttccaaagggatttttttaagagtttaagaaaaaaaaaaatgcacataaattgtttagattccaaaataggaagctggacaagagattttctgtggttcattacagcagtttaataaacagataggggcgacagtgaaggaaaggagcggtgcacggagtgaagaaaacgcgtggcttctggaaattttatattcttcctatataaccaaaaagagcttaatctaggcatgaattttggatttagagaaggaatcgtatcactgactgtgtgaccttggataagtcgcctcacccgacagtgctttcctttattaatgtgcaaagcggggacgaatgtccacttcgcaagactgctgtgaggattacgtgagatcgcctgagtctatagtgagagctcattaaatgttagttgttgctactgctacttcctggaatgaaccgatattccaaaattccagaaactttgttttctacagtttaatgccttcggctgtaaaatgataaaaagaagcaacacctttacacctgggactcacttatttgaaccaaaaaaatgctttaaacttcagataggcaaaacacacttaactgatggctgggacccgctttgaaagcacccccacccattctcaccccagtgtattgtgggaagggtagtcccatgttccagtcgcttgagcacagaaaagcgcgtaggaaactacaactcccaagaggtaaagaagcgggactatttcccagtctggcggtagcgctgtgggagggaattggcaatctctctgcctacgtgggagagaagggagggttgggggaagtgtggaaaacctgaacctgagctgctgtcgcctgaggaagatttggtgggaggagaagcagaggggaagagacgggttgagagtgaggtgaggagggcatctaggtcactgctcccggggggcacaaagttcgcgatgtggctgaagcctgaggaagtgcttctgaaaaa

SEQ ID NO: 44284 - DNA, 2300 bp, Homo sapien
gaatatgttgcagcccttcaaagttccacatcatcatctggtttttcaggtcttccttttaaatctttagccaggctcttgtttgctctagctgaaatcatagccttggacagctgggttgttaccaaccaattgctattgttttctataataccctgggaacagagttttttcaccaagctgagctgtgaataaaatcaaatgataacaacaccctgggaatagagattttccagggagttgcaagtttggtcaaatattgtctatgccctagggatagggcttttaatgaaactccaaaagatccactggttgccatactgctggctttcatttctgagcttgggcaggtggatagagttaaaagacccacagactcttctggtcttactcaggcaggctcattagtttttctcgaataggtgcttttcagtttattgcatgcctttggttaattccagtgttctgaaatggtttattttgaatgttttgccactattttgttgcttttgttggggagtgtgttcacaggggttctgagcttgccattctagaagtcaggttgttgacatatctaattttgataggtatgtctctgagatattgctttaatatttgttatgtatacagattgtggcttataaataacagtaaacattagaacttttttttcttgtagaaacgtaagcatgcatctgggacaactacattctttctttttcagcttgctattagttctgagtctacagagccatctgataattttgaggtgcaatctttgacaagtcagagggaatgcagtaaaactgtgaacactgaagccttaatgacagtatttcaccctcagaatttggagactcttaattctaaaatggtaggaaaacaaaatatttaaacctatgggctgaaacatttggtgaaaagtaaaaatcttaaaagcagactagaaggtatcacaactgaaaactcttcttttgggacttgaaaagttttccagcaggtactactgtgtaacttatttagttccactgtacacaaggactattatcaggaatgaagataaaagataaaagttggacattggggatttttacagatacataatagtcgtacatatttattgacattgggttttatttgcatggatttctaatccttacatagatgtgatttggggagaatgatggtttaaagctttgcctcccaagtataacacttttaccatttttatatgagtttagctaagaattaaaatagtaaattaagctgctatgctcacatgagtttaaaagattttcatgatgacaaggattcagtgtttcacccctgggtgaatactgattttggttttctatgttcttaatttctatagatgttgtttcaaggtaaagagagtgggaaagttattttgcagaagttaatttctcactaaatttagttgttttgatttttctgtcattacagttgaaagaaaaaatgaaggaacagtcatggaaaatactgtttgcagaatgtggacgtggtgttagtatgtttcgaaccaaaaagactcgagatcttgttgtaagagggattccagaaacattaagaggagaactctggatgcttttttcaggtattacgtttattcattgtatttatttaatagacattaactatgcctttctaggagttatgccctaagctaaagcaaaagaattacaaagatggttaatacaaagtcttactcatcttgagttcggactagtcaaagaaagaaaggtaagtagttatctataccttacctatctatccacacatccagcatctgagcacattagtttattaggcaagatatgtatactgggggaatctttagtgtcaacagtcagttaagggggaaaaaagctcatgaaattggtattctgttggataaattagtagcttgacatagattctagtgtaaagctcttttctgtttgtgctcagaaatcacttaagcataaggctaaatatcaaggtaatgaaatccaattatttatgtatatatggaaatagcttcattatatccaccttctgttgtatgttaatgtaataatcttcacaggtgctgttaatgacatggctactaatcctgactattatactgaagtggttgagcagtccttagggacctgcaacttggctactgaagaaattgaacgtgatttacgtcgctctctgcctgagcacccagcctttcagagtgatactggcatatctgctctgagaagggtactcacagcttatgcatacaggaatcccaaaattggatactgcca

SEQ ID NO: 44285 - DNA, 2300 bp, Homo sapien
ctctctctctcttttttttttttttttttttttaatgatagagtctcactctgttgcccaggctggagtgcagtggcatgatcttggctcactgcaacctccacctcccaggttcaagcgattctcctgtctcagcctcacgagtagctgggattacaggtgtgcaccaccatgccctgctattttttctttattgtatttttagtagatactgggtttcaccatgtcggccaggctggttatgaactcctgacctcaagtgatccacccacctcggcctcccaaagtgctaggattacaggcatgagccaccgcacccggcctagatgttggtttttaaggctactgtgaaactggggaggggggtgggaatagggcaatttaaaatgccacagagcttactggttttactgagattcagccattttattaaataaatgctacctgaattgctgtaagctattggttaatttccagagttctaaagttgattccgatgacttttgtcagtgttcttgttgcttttatagaggagagcatttttagaagttcttactctgccatttttactacatcccctcctagtatggcttcttgcatgggaaaatgattcagtaaaaactaagcttgacatcaaacagtgtactagattaggcaagaaattggcatagttaatatacaaatctatatgaaaggtatgaaagtataaaaatgagcaatggacatgaaaggattaatcacagaagagaaaatacaggttgatgttaaagtctgaaaaagaaagttcaacctcaaagaaattaaaattaaaacaatgagctaccatttttcactatcaaatcaataaagatgattatagttattacgattcacaatattggcaaagatgcagtgaaataaacatttaaacactattggtcagaaatataaattggtattttctttcaggaatttaatttggcaataatatgaagtcttttaaaaataccatgtgaccaaacaatttcatttctaggtatgtgtcctgagaaaaaagtatagttggatgaaaatttatataaaaaagataaccattgcagcattatatgtaatagtaaaaaatttgaattaacctaaatgtccaacaatagtagaatggttaaataatttatattagatccaccttagatttttttagtcattaaaaatactgttttagaagaatatttagtggcattgaatattactatatagtgctaagcaaaaaaataaagatttagtacacagtgtgatacaaattttaggagaaaaaggaagaaaaaactgcagaaaaatatatcaacttgttaacagtttatttctgggtacataggatacaagaggttttattttctcattcatacttttccattctctccaaattctatccattaaggatttattactttataataagggatgtggcaatgtatataaaagtaatgatctgacatttgtatgcaagataggtaagaagcagcagcaagttagagtggtagtgggaatgggaaggaaaaagcaaatccgaaagacgttttataagaagaaactctaggatatgaaacagatgcagcagatagagggttttcagcataatcaaaactaggataggtaagaagaatcctacttgataggggaaagaagatattcagttttggacaaaattgaggatgattcatatctgagggctatttctttataggtagttggaaatacagatgaagttcgttttctttcgttttagtatgtctttgaaaattatgtaggcttttttcagattagtgataattaaggtttttcactcttcgaaattagagaggttttgcttattatgttctgtatttattatattactgcttcacttttcttgaatgttactttataaaataactgattatcaaatgttagcctgacttcaccttgttttgccttggactggctcagagttctcatgtttccactgttattacactattattactctcagttgttcttgttgctgtcaaaaactattatgtttgaagaagtataattattacttgagcaatatttgctttttaatactgttttctatgaattttaggcaatgaatattttgacttcagtgctgcttctatatgcaaaagaggaagaagctttttggcttctggttgctgtatgtgaacgaatgttgcctgattattttaatcgtcgaattattggtaaaagaaaaaccacacacacacatatgcatacacacacagagatgtatatttcctttctaaacaatttcagtgtctctt

SEQ ID NO: 44286 - DNA, 2300 bp, Homo sapien
tggactggaagctctaacaggcattgcccacctggctaccagtggtggagcgtggtggggtcacctgccctgcctgttgggtgtttccagtgacaacaggatgttgcagccactggctaagttcaggcagaagcgggacatctgggctggaagctccagcaggtgttgctcgcctggctaccagtgacaggagcaggtggggtcgtccgccctgccgtgtaggtgtttcatgggacaacaggaggctgcagcctctggccgatttcaggcagaagcggtagtgctgggctggaagctggcaccaagccttgtctggtgaggagggtggaccaatcctactgctcccaggcaccatgactttggcctctattggggctgtggcgctggtgttggtctgttccaggatccgaggcttgtagaggtccccttggacttaagagttgcctctgcaaaccgtctgggtggctctctgcctcagtttagaggtgaggtgggaggatgagagtggcaagtagggggttagggcaggggaattctcccactcccagccttacacagatccccatggagagtgtgaattaccctctcccgtattggggagcttctcctgactccgcattgatgccagataggctgctgcccagcttccctcctctctgctctctgtgtccccttgctgctttgatggttcccagtgtggtttcttagatgattggcttttagggtcagtgttcactaaaccctttgtttcccctccataagagagcagcacccatgatctgcttctagtttgtcatattggcccctcccatgctgggcaccttttttttttttttttttttttttttgagacagtctcactctgtcgcccaggctggaatacagtggcatgatctcggctcactgcaacctctgcctcccgggttcaagtgattcttgtgcctcagtctcctgagtagctgcgattataggcatacgccaccacacctggctaatttttgtatttttagtagagacagggtttcaccaagttggccaggctggtcttgaactcctggcctcaagtgatctgcctgccttggcctcccaagtgctgggattacaggcatgagccaccattcctctgctgggcactttaaatgacttctgtatccatgcttaaattatccacttctcgatgatagtcatttgtgatttctttcatctcacttgccagaaatgtgtctatcttattgattttttcaataaaccaactcttaattttatttactgagtctaccgggtttttttaattttctgtatttcatcaattctagcttttttctttacctttgctttcaaatttcttagatatcataatgattgtatcattagtccttcttcttcatggaataggataaaagtacatattttctaagcttattacttcttggattatgttttttggcatagagagggaatgtacatctcccaatgcctttgaagtatttaatagcaacctcacatgatgactagatatgctgcttatgtggcaagagaggaatatatggaataggacttagaatactgttacttatatttatagacattaagtggctgttctttggcagtgatttctgagtatgaagagatgaatatcaaagtacatattagagtagaattgaactagtctactactactttttaaaaggaaaaatagataataactttataatataataacttataataactttttattattcatttaagaagttaaaacacaaatattttcttctagcagagagagactctaaggtaattcaaagagaatttctttactgcaatgttaaaatctgtgtactaaattgcttttaatctttttaaagttgcgtgttgtatcacaagatgtgaaattgagccttcaagaattggatgaactttatgtcatctttaaggtactgttgttcttctttaaatgaaaaataatgcttttttttagcagaattgtatcacagccattctaattatttttatctttattttagcagacatggtttttaaaatcttccaaaattactttttctaattagtaactttccttttttatttatttttaatagaaagagctgtttttatcttgttattggtgtttgggttgcccagtattgaagcatcatgaccccagtctgccatatttggaacagtatcagattgactgccagcagttcagagcgttgtatcacttgttgagtccctgggctcattctgcaaataaagactcactagctttatggacattcagattgttagatgaaaac

SEQ ID NO: 44287 - DNA, 2300 bp, Homo sapien
attcaaaagaaaggttttcctgctaaagcacaaaaaatacgtttacaaacctctggccttggaaaaagggagctaaaacctgtgggttaccatttgaatgtagacagtggtccagggagccacacttcgcctctattgttgttttgtttttttttttgggggggcggtttctttctttcttttttttttttcattttggaataaacactgaaaagatgcttttaccggtaaaccatcaaatggtgccaggaagatcaagtggtgataactgacaaatcagttattagttgagtaaatcgtcattagctgactctggcctataagatcatttcctttataaaatcagcaatagcagctactaagactactattattatgactactaccatttattgagggtttgtactatgtgccagggggcatgctaagtactttacatatatcatttaatcctcacaataactctgaaaggaagtattattagccccattttacagacgaggagactgagactcagagtggataagtaactggcccaaggtcatactgctagcacatggtagattccactttacttacaaacagaaacagaatggactaaaagaattaatgcagtcaaaggtcaactgcctggaagccttaattaaagaacaaggttaaattttgaccaatagatggcaccagtgtgtgagtttggtggcttactcaaggttgtgtccaatgcagggaagtcccagctagggcttagaactgaagcagcctgtctcatgctgagggagaaggaaaagaaagatggtcatcgttttgctcctgaatgaaatgacattacccttttccctttgtagctaaaccaggaagccagcaagttgggggaacaatggtggttccaccaagagctactttcagaagatttgagaatcttttctctttcaacatttcctgagcacctcctttgtgccaggcagtgttctgtgcaatgaagtcatatgggaatatcaaatacagccccaggttactgtataggaaaggaggcaaatgctatggtaggggaggctctgaatgagtgggggcacccaacctggtgcctgggatgtctggggaggcttcctacagcaggggtgtctgagctggttctgttagatgaatgagagtttcctaggcatgcgaaagtggaaaggcattccagacagggttaaggacacacacagaggtgttagaaagcatgccacattcaaagagaggcagtgtaaacttcaagagttgagagatgagtctcaagagacaggcaaaacccagacaactgaaaggcctagaatatcaagttaagtacttgatttgtgaagatatagcactgtgtgtgtgtgtgtgtgcgtgtggtgtgaacaaatgtatttttctgagtagagaagccacaggttctcaaggggatctgtgaccaaaaaaaaaaaaaaaaaaaaagataagcccaaaagtgttggcaaagtcatgatgtggtctaatctggttgtcagtgtggaagatgaatcacaaagggacagctggaggccaaaaaaaaaaaaaatttagtcgaagagtaattggagcaagggtaagcatgagggtctgagctgtggtaaatataaagggaattgaggaaaaaaattgctaggtcctagtagccctcctccccacatgcacacagccatctctgaggctcaaatgaggctgcacctgtcacatttcccctctaacctgcatccctactcccaacttacaagctgccctttgggacctttttgttccctttccaagccatccttgcagtttaatcaagtctgatttcacaaattgatggagagggcctggccccatgctgggtctccagccctacaaccccatgaagaaaaacttgtcaactgacctcaggtaggaaaagcaatgaattggccttgagctggtctctgaacctctgcccatggcttcacaatatgggcagagttcagttaagaaatcagcacagttccaagaaaaaggaaaacaccatccagtttatttttctcctgattcatctcatgccaacacacagacttcaatggacagcaggcaaaatggggaggcatccccagagcaagccgattctctacacactgccttcccttcctgtaagactcatcaaaaaggcaccccaaccttgcatggatctgctgttggtattccttggggtgaagccagaagtcaggctttccacagagagacgggactacatggccacctgggaaggctagggagtcaaagggcctgaggaatgactacttccctcc

SEQ ID NO: 44288 - DNA, 2300 bp, Homo sapien
tcttcaggacctgggatctatcttgcacttagaaaattcagggacagagagctctctcaagtccaaggcagcacatttcactgaactcatttcacctcatataataaacctctgtttattgagggccgggaccgtgccaggcccttgggttaggtggtgactgagctgttagaaagttttcctttgattgagccaaaatgtgtctccatgtagcttccagccatgggcctcagccctgccctttgaagtcacccagaacaagtgtaatctcattgcagtctaatcctcagatatttgaaaatatctgtcatttcccccagctttcgttcctccatggataaacatttctttgttggtttatttttattttttgtgcctttcctttttattactcaaataatatcagttcattgtggaactttttagaaaattcagaaaaacataaagtaaaaatccaccccactgttactcccagaaatgacaaccctaacactctttcttctcaccagtcttattttttctctgcacgctgtccattctacatcttttttcttaccaaaatgggatcatcctttaagtaatattttagagacttattttgttttcactctttcaatatgttaacttttccctcattcttctaccatgccaattttaatatgaaattgtgtaactgcccaatgatttatctaaccagcttttaaaagttgttttcaattttcctttgctgaaaagaacatagtgggactagaattggaagtggggtgaagatggggggtaggtgaacagagaaatgaggagcccttaaattagtcatgctatcttaccatctgatttttttttccattttctgtgttgaaaaattatacttcccagaacatgattgtgagcacctgcttggcattcagttgcaaggatttgccctaattaatgtaactggtttcctattattggacattgaagttgtttctaatttttgaccattacaaaccagactgtgatgaacatccaagaagctaaatctgtgctggggctggacactgaggtcaggaggaatattttcgagacctctgaagcataaggtccctgccagtagttgtaactagaagctttctggcaaaggcccagaaggctggctaaggccgaggactgtgctcaggcctctgggcttgcccgggttcagtacccatttatgtagcccctgtcagagagtgttcaggctggcatggtcctatgagaccactgggccagcaccctcatctcttacatgagggaactgaggcctggggctggggctggtccttcggcagctctgtagtcgggcagaactttgcctctccccagcaccctggcttctgaactggaagctaagctctgaggtttggaatctcacccagaggccctgtgaaatcctgcctgctctccttcactggaccacttactgctgaggctggagggggcactttgacaaatgaactgatcagtaaggggctgaggggcattgaaagaagacttaaggtttacccaacaagcatctgggcctgctctgcccagaatgccccttttttccctaacccagatgatatgcttaatggcagtcaccctacattcaggtccacctggcaaatctatctgaggttgagctgaaataacaagtgagtccctcactctccttaaaggggtcagctgtctcttcttgccaggaactggcttagttaaaggcctgtctattcagccctctgtccctgacatctctgtggtttcagagtgctaatgagctcctctccttcccctctcaggccttgctactccctggggaattcacacaaatggtgtgcgatttgccccttctgtgtttttctttctgacttggaggcaaagcaaatccctcacctcccactgacaccatgtttattcaactgggagagatttcacacccaggtaacccagctttccctccctgagccccttccctaaatctttatccccctcccaagtcatcccacccctgtcctccctgaataatttataagaccaggcagggcttataaaagggtctcccaggaaaagccaaaagagtgcagaaggttctgggaagtaggagaccccactggctttggtcccctaagaatggactctgctgcctgtgctgctgctgccacccctgttccagccctggctttggccctagctccagacctagcacaagccccactggcactccctggcctgttaagcccatcttgccttctctcctctggacaagaagtaaatgggagtgaaaggtaagttgagcttag

SEQ ID NO: 44289 - DNA, 2300 bp, Homo sapien
tcccaccccttcagccttgcttgctttcatgcccaaagactccccaggcctgagctcaggcatggctgcccttttagcgtgtcccagcctgccaagagggagtgccctggagagacccttgctcaggagcactgccaggggatcagtgccccatttgtacctgcaaggtagggatgggccgccttgggaaggaggatgatttctggtttgcttcactgagttcaccctaggcaacaaatccgactgtttgctttgatatgacttgaaaaatagagtcaagcataatgactatgaggcaagctctagaggtggccaggtttggtacccaggccttgctctgtactagcacagtgagaccatggataggaaacacctcagcacagtgcctggcacctagcaagtgttcaatgaaccgtggccttatcatttgtacatgggaatccttgggagggagttggtgttgtacactgcaaagtttgccaagctagatatctacagacctagattccaagtctaactattactgctcaacttgggatgttgggcaactcttttcatctcattgggccgaggtttcctcatctggaaatagtaatggctgtcttatttttgtaacatgttgtattggcctttaaaacatgcacactctttcacctagcaattctattcttaagactttgtcagtattatgtgcaaagatgctgggttatagtgaaaatgaaaataacaaaacgtctagtagtttacgattaaataaatcatattttatatgatagaatgcagtgcagccatgacagaatgatgtagttctgtgttttaattgacatggaaataggtccacgatatgttatttacaaatgatgtaaggttacataaactgtaggtatagtgtgattcaattttataaaacaaatcccatcgatatcttctacaatacatcaaaatgttagcaatgattatttctggctggtggcattatgaggacctctattttcttctttataattcattttctgaattcttttcaatagcatctagtatttttctacttagaaaaaactagaaagcttttttgcgttgggagagtaaagccagtcactgcgctctactactccacagcatgtttttttgtttgtttgttttggtttggttttatttctgttgttgtttgggtttttgtttgtttgctttgcttttttgagatggagtctcactctgtcacccaggctggagtgcagtggtatgatctcggctcattgcaacctccgcctcctgggtccaagtgattctcctgcctcagcttcccgtgtagctgggactacaggtgcgcaccaccacatccagctaatttttgtatttttagtagagacaaggtttaaccgcgttggccaggctgttttcgaactcctgacctcaggtgatccacccgcctcggcctcccaaagtgctgggattacaggcgtgagccactgcacacggccttcacagcacttttgagaggcttaaatgacatagtgcatggcactgccatgtgtggtaaaaaggagagccctgtccttatgctggcctactcagttccaccttgtaggacctgctctttgaactcagagtctgaacctacagtacccatgtttgcccttgagccttgggaccaaccttaggggtggggtagggctgagggcctgccagagaatcaagctgagtagaaaagtctatggagctgcaggccatgcagggctgcttgggcactggctcaccagggctgtgtttatgcagcttactccctgctgggcttcagggctgctagccagggacacctaattggtgggacagagccccctcctctcaccaccctcaaagctggaatgttctgaattccttcttgggccaaatccccctccccacaaggcctctcctgggttcacagaggtcaccacacaaaagcccagctggagtggagtttttgacagaaaaaaaaaaacacacacagaaaacccaccaaacctttttttttttttttctaaagtgcctcaatctttcccagcctccaggggtttaattctgatctgtaataagtctctgacccacggctcagatttgcagatggattttgcaaagctgtggttaacgattagaaatcctttatcacctcagcccgtggccccttgtacttcgctcccctccctcaggatccctttctccctctccaggggcatctccccctccaaggctctgcaaagaactgccctgtaagtatctccatcctgatatagttgctgccttttaaattcaccgaggtg

SEQ ID NO: 44290 - DNA, 2300 bp, Homo sapien
caaaaccttccccatctcctatatcaaggcattttccccataacatactacttaggttttggttgattaaagagcttttttattgctcgccaaattacttcatatatgttacaatctgtttatacaaatgactgtaagctccacaactgttaaaagtggtattacagatgatttatttgtagacattccagcagtatgatggctggtatctcttttatcatttgcaggttttgatatctataatactcataggatgagtttgttatagcagacaaccttctctaatccctctcttaaattcctttttttaatttaaataccttttcattttatataaaataaattgaataaaaaagggcaatggtgccagaattggcatgagttatgcaaatttgttatcctcaaaagactgtacgcagaatagtatactagttccctgtttttaataaagtgtgtagcagatgttatgctaagtaagtcagaaatcctgtgtgttcaactgaataaatctactgtctacagactatctctatctgatccactgcaatcacctcatcataccaaaactagacatcaaaaaccaaagatctaatgcctgtaaaattttaaaggtagacttggggggttggtggcaaagatgatatagaaagatgttaaataatttttaatatctaacatttgaatttcacaaatcttaattatttaggtagtcatcagcaattcactattcctttcactcaattgaaacataataacttgactcggagacttctgtcaaactaatgtcattcctaagctttcacttagagttaagtcctggtcaaagatttccattatgggccagatttacatttaaatgaccattttacttagactgagggcaggtagttgtcataaccactgagtagcccaagtaaccatgaaccaattaccctgaaattaatttggagttgccattcaaatagttatctctctcaaacactaaacctaaaattcttgtggttacagacaaattaaggtacaagacttgactttattacagtttgggcacaaaacaaaagagatttgggaaatttcttttctcccactctaagaaaaatatttgctactgagacttcaaggaaaatgaccgcaaatgtcctcatgccttctttctccatactcccagaatacctcttacccttttttgcccttacagatacttccctctgcttagaatgtccttcctctattgtccacctagaaaacttttccttcatatttaatatcaaatataatctgctttgtgaagccttccctgactcccttaagcatatttaaagttctccccactttgcacataccccctattaaagcaattattttataagtatttaagtttcttatttgcatacatatttgttcataggtatcaaagagtcttatttttcatccttagtacctggcacatagaagctgtctcataatacttaatgaaataaagacccatctccctctcgacattttttaaacaaactattctaacctggctttaaaaactcctttcgaaaaatatccctactggttcagccataatgtcgagttcctttcagattcttacctgtttgcctgccctattaaatctagatgctttaatgaaagcacatgtctttcctgctgttccatcactttgctctaaatctgttcactggcttcaagaaaaatttttggaacaaatttcaaactgcttttttttatccaatgtattccataacttcagatccattcatctgtttccattaagatcaattccaaagcttttcatttccccagaaatcttttaccaaattactcctatgctctttgcataatttctaaaggtaaggtttatctcaacgagactccatatatcattcagcaaactttaatttaaaaatgaaagcattttatctctaatcttggaaaacaaatttgaagtaattctcagttaacttatttagctgctttttagagatggttttagaggctttagagaacagaatcatatctgaacaaactaacggaagcacctcaggttgggagtgactcaccggtactccttggtatactcaaagtcttgtttgttgtaggcaggttttaggaaattgcactcaatgactccaattactcctacaccttctccacgagttggcttagaagaaaatattaatttcaacacttacattactgttggctgcctggaggcatttccttttgattccaaacaataatagaaaggttacataaccttcatgggcaagaaaagaccatcaagatctaga

SEQ ID NO: 44291 - DNA, 2300 bp, Homo sapien
atattttacatatttatggggtacatgtgagtactttatacatgcatacaatgtgtaatgatcaagtgagggtgtttggggtttccatcaccttgataatttatatgttggtaacattggaactcctcttttctagctactttgaaatatgtgatgtattattgctaattatagtcaccctggtctgctatggaacattagaacttttttcttctatctaactataagtttgtactcatttgccaaactctattcatttctccttctcatcctgagaaacaatccttacaattagttttattgatggtgagggaagatatataatcattttatttttaatttttaaagttctgttattttggtgtgtacctgaatggaaaatacaaggaagggaaaggttctggcttccagattaagctgatcaaaaggggctacagagattgttgaggcgcctaagtgaaaggtccttaatggagcaagagagactttatactgcaactgtttgctgatattcagaggcagaactacctatttttatcctttggccacattccaatgaactgtcccagcagatggaacagagactaagaattggaagggttatcctttgagtggagagttgaaattgtcaagatacatgatccctgactttcagatttctagaggatgatataaacaggttaggagatgcctaatctagtacctctgaccaatgacaatatctggaacttttgctaccctctctagataactacatttttcaccttaccctaactttacttctacagcaatcagagctgttttatctagacaagaaaggcagctgcccaaggccttctccagctacgttagctggtgaaaaggggcccttttttacatttataaagtgtgactctaacgtaatggaactatttatgtatacacaaaccacacaggaaaattagtcccattaccccatagtaatttcctatgtttttaacttaatagttttgcccataaataccaaaaggaataaaaaaggaaggactttttacaagtgttatttatttgtaggccaaatattctgcctgtcacctatcttaggatgctttttacctttctgatttctttttttctgatttgttttttcttgtgtaattgcagctttggctttacagataaagtaataaagaagagccagtgtcccattggggtctttggtaatggtttcaagtcaggctccatgcggctaggaaaggacgcccttgtcttcaccaagaatgggggtactctcactgttggacttctatcacagacctatctggaatgtgtccaggcccaggcagttattgtaccaattgttccattcaaccagcaaaacaatatcctttctggaaatggagaatgttggttaaaaattagtctaatctgagtgtttgattagattccaacttcaggtcaaatccaactgtcagaagttttaaaagaggtattcaaatgtcttaaatttaactgggatttttctctattaaacatttaaaaaacaagtagaacattgacataagcttagaaatgtttttgctatattgaaattttcattgttaggcagtttgatctatatagtgtatctctgctctaccaccaccccatggtaaagctccgaaggccttcctttttttttttttcccctaaggatagctacatttgcattaataggcctagaaacatactatttatcagcttatataatagcagaatagctcatttccctatatctgcacagctgttacttctgttagacacctggttctcttgactggaacagtatagcaataaggttttaacttattgcttccaaagaagttaaaaaattaagcctttgatcttttaaatataagactttgtttacatgatatctttgaagctatattctgcatgggcaactgattttggagcttgtctctacaacctttctccatttttcacctttcctccttctatagcagtaatatgcatgctgtatgtctatagttttgtctaaatatgcaatccaaagggcagatcttccttctcaatagcatcctaagatattattttttctttgactatatttgattttacaaaaaatgattattaccgaggattcattgcccagcctagaagccatcttgaactattccattttcaaccgtgaaaatgacctgctggcccagtttgatgccatcccaggcaaaaaaggcactcgtgttctcatttggaacatccgcaggtatagtattccaagggtgatagattctaataaacaaaggtagtatgatgaa

SEQ ID NO: 44292 - DNA, 2300 bp, Homo sapien
gcagatccaggatgcaaacacaggtctttttactggaaataccaagtagggaatgaggttaaaaaggtcgtctgggatcagggtgtgaccgggaggctccagtgtttggctttttagcctgaagttttctgagcagaggaatgtcatgaacagagctgtgcttcaggaaagttaatcttgcagcagtgtataacattgaaagagagagataaggatttataagagtagttaggaggttactgcaataagcttagaagtagagagtggaatagtagttactaaaggctgggaagggtgggaggggggatagctagaggtgggttaatggctacaaaattacaactaagataaaagaaataagttctaatgttttatagcactgtaggatggctataattaataacaattaactgtatattttcaaatagctagaagaatagattttgaatgttcccaacaaaagaaatgataaatgtttgaggtaatgaatatgctaattatcctgatttgatcattacacattgtataagtgtatcaaaacatcacattgtattctataaatatgtacaactattatgtgaattaaaaaaataaaaacacaaaaaagtggctgccactcatatgaaataaactttcccttagggccttctaaatgaaaaaaaagaaaaaaaaaagattgactataccaggcctcttaatccccttctgggactattggtgatgctgtactactgttaagacgttttctgcttacagtcagtgacagttttatcaatgactctggcaataccattgtgacccttgaaattaatctgtgttttgttttatttgatgaacattccacatatccaagtggctgtaactgatatcattaattgtgttataaaaaatgggtgttttgcatatttgtaatacttctctggattgtaaggggtgttcctgggaaaaaatgatataatttgatcagtagtaatagaacaagtatatggccaggacctgacctggctgtcttagcttagctttttggtatcactaaagcagtataggataccagggaaagggaagagggtggaagggaaggactctgtcttgctcaaagagcttagtagagacaggaacgattaaggaacctatccaacagattgtataaactgcccctcaattgtggccagtgagccacatttgtcagtgattgacaattatgtaaactggtgcctgtggcaaaaacatgcggcaactagacagtggcacccccctggggttgtggacgtgacacaattgttagactatggcaatatttgatgtctttggagtcttaaataattaactcattgtgaagacataaatcaggaggaatcgtgaacctatgtattttttctactttaattctatgttctccatttcctgaaaggatggacagccttacctttaaaactattacaaaatacctaagcaaaaatcactccctctaagtatgcttgctaccatcactgagatctaggcagaccattaagtcttttgattttaaactctaaccctttcagtgcctcttaggctataaacaggaatggcagtactctctgtgttctttaacagaggaggtgatgtaagaaagaagaaaataaaatgatcacaaataaactgtaatgtgtgtaatatgcatcatcttttaccaaagttgctccttcagcttttctccatagccactctttactgtatgtgtatacaaacagtaaaggggctaaaaggcaagaagtaataagacaaaaatggagcaaaatgctttgtatatgggagtagttattaatacttttttccaaagaccctgaagttcgaaggtggaaaggcagattgcatatcgctcgtatgaaatctggaaatcagctttagaactcaatctggcatcatctcttttgttctctataatttagtaagtgcactaccgttaatgctccctgataccttctcaaacatccaaatgaaggaaataaaggacatttcttatgtcttggcgtcactgaactagagattttgatacaatattggaaaaggggatctaatatcgcagatttctaccttttgcagataatgctgtagatccagatgtatctgccaggacggtctttatagatgttgaggaggtcaagaataaatcttgtttgacctttaccgatgatggatgtgggatgacacctcataaactacaccgaatgctcaggtaaaaatgtcttcattgtctttttcttgtcttaagctcatgaaccctatttaaggcttcataattttcattaatattttgc

SEQ ID NO: 44293 - DNA, 2300 bp, Homo sapien
tcttaggtagctcaccatgacattttcaatctgatagaagttctcaggacaggaaattctacaatgtttttcagtagctgctttttggtcctttgctctaacttgagcatggaaatacaaagcagtttggataagtctaaatctactgattaacatttgactatttactcatagattaccactcaatcatggaataactttaaaaccatacctttgtatgtgcttgacagtcaccctatacttaggaggtatcctcattttacagatgagaaaactggcctagaccagttaagaaacttactgaaacccacatggtctagtaacttaccagagcaaaaattcaagtccagattgcctctaaaaccctgtcgtgctatactgtcaactgagaagtgagattcaaatccaagtagtgtgccccgccccccaccattacctacaatcttttcttctttggcttcttgagatgtaagagggtttctctttaattaaaaaagtattgactaggtaatgtagtcatgggttcaaaattcaaagggcacaaaaagatacgtgaagaattttttctgcccttgtccctcagccatccagttcccctacctggaggcattcactcatcatttgtctgtaagttctcccaaacatattttgtgcatatacaagcaaacacacatatatatgtttttaagtgactagagctcccctttttatgcaaatagaagcatagtatacatatcgttctgcaccttgctattgcactaactatattttggagattgtttagtagcagttcatagagaactttgtcatcttggtaactgctgcatagtttttcattgaatgatacattttcatagtatgttcttggatattttcatttctgttttcataaacaatgttgcaaggaatgatagtaggttagaggatatatagtattgaggattctattcataactgaattgctgctttaaagggaatgtacatttatgattttagtagtatcctcatttgcccccaatagatgttgtaccaatttatattcctaccactagtgtattgagagcgcccgtttccccacaatctcaataaaacaagtgtgttatcaaacttttggatctttcccaatctgttaggtgaaaaatggtagtttaatgtacttttaaaaataaactttaagttctagaacagttttagatacagaaaggttgcatagtacaaagttccacatacgtacaactcagtttcccttgcataactctgatacatttgtcacagctaacgaaccttgttattagctaaagagcatagtttgttcacatttccttagtttttacctcatgtctttttttcttttccaggatcccatccaagatactgcattactttagtcatcatgactcctttggttccttttggctgtgacagattcttgtgtttttgatgaccttgctagttttaaggagtactggtagtcagtgtactttaaaatttgtgagattggacatcttttcatacacttaaagacatttgcatttccatttctggaaactaagagcctatgcttttaaccactatactatacctctttcttgattcaccataattatcaataaaacatatgtgggcctgaacatacacagacttctgattctgagtggagaaaactctcaagtctctgttacagatagaggagaaccattagtacaggtgatatagtcagactcgtgtctgatgactctggctacatcgtgaaggatgaagcagaggctcgactggaaacggtaggtaggctggataaatccttgaaagaaaagcagtgttgataagttcaaaggaaattacagaagagccaggaattagtggtaatggatgagagaatcaagaagtcaaaggtgactcgttttatgagctggatattttgggtcttcttttgaacctaaatgagaaattcaaaataaatatttggacaatgttcagcatacctgtcacttgagatctactttctctttctgttgccatagctctgtgctactacaattcccagagccccatgctccatcacaatacccttagaagtccgccgcgcggagttctgggacttgaggtccgcggcctatttacccaagttggaggtaggggcctgtggaaacatgaagaggtaaggacttgtctgaagagcaggcggcaaggggagctttgttctaccttttcttttgaaaatggcttccattgctttctggtttgggtattgcacgttctcaggatgcggtttcgtgggagcgggaacacgacaaaggaga

SEQ ID NO: 44294 - DNA, 2300 bp, Homo sapien
tttgttccccaagaagaaaactaatattcactgaacacctgtgcacttgacactgtaccaagtatttcatatatgctatattgtatatcttcctgggtcccactagaccacagaaccaatttctggagggagccagggcaatctgcattttaaataaattatttatttaaataaattttaaataaattatttatttaaataaattttaaataaattatttaaataaattttaaataaattatttaaataaattttaaataaattatttaaataaattttaaataaattatttaaataaattttaaataaattatttatttaaataaattttaaataaattatttaaataaattttaaataaattatttaaataaattttaaataaattatttatttaaataaattttaaataaattatttatttaaataaattttaaataaagtgcacacacaagtttgaaaactaaaggtctagggacaaatcattagggtgttgtggtgtacattttttaaaatgtaatggaaattatcagagtatattgcaagtagtaagtgttaagtgttgtttctgtaaaaacagttgtcggttatatattgtctacatgtgtactaggtcacaatataaaatttatttcttactgtcggtcacagtcaaaaggtctgaaaaacaccggctgagcattacagacttagaataatgcacagtgaggcagaataaaaacaaaaaagcaagaagaaggagatggcataatatctataatttaagctccacaagtatctagtgaattagcaaaatgcaagacagctaaactctgatcattcacagtaataagcggaattaaggtattggtaatttggccaaaaggccaataacgttactttagccaataaccttattctacccccattttttgtttactgtagataagaacaagtagaagggacaaattaatcaaacttcactatctcttatgccagatgggatggtcgttaagaaatgcatggtatatagaaagaagggaagcagtttagttcattcataatcaaattccaatacctgaataaccaaaagtaaccattcattaaaaccttctgtggggtcctactattgatcatggctaatcagtcctgaatactccaaatatttattacgccatccccccgccgcccctttgtttaaaaccaagccacggaatttatgggaaactagggtaacaactctatctctaagtgaacttaagacaaccagattccctagcagtggcaagcgagcggcgcgcctgcttttctccactccgaggcgggaaaagcagagctcccggagtcgcgatgttccttagagtgggaacgacacgtagctcaagccagtgccccacaggaaccgggtggcagttgaccaggtgctcccccggggacttggggcccggaagccttgcctacagaggagaataaaaagcgcgatcccacctgcacacatacaaacacactatcgcccgcgacaagccaagacagaagcacaacacgtgtttctgtcgcgtgggggagacgtgaaaggctgggggcgtggaggactgtagcaaaaccttctctacccccggcccactgaccctacccttctgcccccgtctctccagatcggctggagttcgagtcctcagatcgggaattcacgcgcgggaaaagcgcaaaagagagcgaagcctgctgacgaacgggacaaacgaaaaccccacaaacttaccttactggcaagtcgccgccgctcgctgtccggccctgaactatacgggcaggcctccgagactgctagacgccagaggggcgggtccggacctgctcgagccggaaagaatcggcctccttagtgggcaggttcccgctgaagtgaagctaaccgagactgaggcttaaaaggggtcgacctggttaactagaaagggcgaccagtgaccctgacctggacgcgctcggattggtcgattccagtgcagtctcagatgagactcttctatgattggccagaaaagtcaagcgggaacccggaggttggcaggtggggggcgggaacaaaacaaagttgttaccctagcaacggagagacgccacgctctgcacagtctattttcggagcctagccagagacgggaaaactgaccaaggtgaggaaactcgaacctcaagacggggaaagacagggtcctcagatgctgtggctatcagaaaaactagggagaactctagatatttataactctgcgagataccccaaaaagccacaagttgggcaaggtggagaagac

SEQ ID NO: 44295 - DNA, 2300 bp, Homo sapien
gatggcataatatctataatttaagctccacaagtatctagtgaattagcaaaatgcaagacagctaaactctgatcattcacagtaataagcggaattaaggtattggtaatttggccaaaaggccaataacgttactttagccaataaccttattctacccccattttttgtttactgtagataagaacaagtagaagggacaaattaatcaaacttcactatctcttatgccagatgggatggtcgttaagaaatgcatggtatatagaaagaagggaagcagtttagttcattcataatcaaattccaatacctgaataaccaaaagtaaccattcattaaaaccttctgtggggtcctactattgatcatggctaatcagtcctgaatactccaaatatttattacgccatccccccgccgcccctttgtttaaaaccaagccacggaatttatgggaaactagggtaacaactctatctctaagtgaacttaagacaaccagattccctagcagtggcaagcgagcggcgcgcctgcttttctccactccgaggcgggaaaagcagagctcccggagtcgcgatgttccttagagtgggaacgacacgtagctcaagccagtgccccacaggaaccgggtggcagttgaccaggtgctcccccggggacttggggcccggaagccttgcctacagaggagaataaaaagcgcgatcccacctgcacacatacaaacacactatcgcccgcgacaagccaagacagaagcacaacacgtgtttctgtcgcgtgggggagacgtgaaaggctgggggcgtggaggactgtagcaaaaccttctctacccccggcccactgaccctacccttctgcccccgtctctccagatcggctggagttcgagtcctcagatcgggaattcacgcgcgggaaaagcgcaaaagagagcgaagcctgctgacgaacgggacaaacgaaaaccccacaaacttaccttactggcaagtcgccgccgctcgctgtccggccctgaactatacgggcaggcctccgagactgctagacgccagaggggcgggtccggacctgctcgagccggaaagaatcggcctccttagtgggcaggttcccgctgaagtgaagctaaccgagactgaggcttaaaaggggtcgacctggttaactagaaagggcgaccagtgaccctgacctggacgcgctcggattggtcgattccagtgcagtctcagatgagactcttctatgattggccagaaaagtcaagcgggaacccggaggttggcaggtggggggcgggaacaaaacaaagttgttaccctagcaacggagagacgccacgctctgcacagtctattttcggagcctagccagagacgggaaaactgaccaaggtgaggaaactcgaacctcaagacggggaaagacagggtcctcagatgctgtggctatcagaaaaactagggagaactctagatatttataactctgcgagataccccaaaaagccacaagttgggcaaggtggagaagacccgttccctaaatcccgctatcctagactcttcactaaatcccgctatcctagactctagaaacaggacgctgctttaacaaaactcggttttacaggatgtgagtgaaagatggatgctgatcgactgtcagaaggcaaaagtaaacatctgaaagtttcccaactggtcttctctcaactctcacatgcacttattggttctcccttcccattaataatgactaatttgggaatgtaaaccatattttcttataggaggacctgggtgctccaaactggagcagccactgtacccttctgttttatatgtgcaggcacgatttatcctggcctagcatgccttggttaggaaatgttttgggggatatcacacttcagactgaaaaaaaaatggccccagtacttactacgtgaataatgtcctttgtgcgacaacttgaacgctgtggtctgagggttccagtgttgcttggttagataagctgaggagtgagaagtaatcagaccttcacttggtgggcccgagtgtactgtgcagagactacttgtacctacaagacctgctactcgccaagggctgattgggagagtaagtattacatgtcgtttgactgtaactatcaaaaggtggggaagtgtgaccaaaaaaattaaatctgagtgaagggagagaacctagtttgaccaaagagggaggagtcattactccttaagagcttcttgtgataaggattcagaa

SEQ ID NO: 44296 - DNA, 2300 bp, Homo sapien
ttttgatttaatatttcctctgttttagtcatttattcataaggagtctgtaccatcccaatcctttttgaaaatggaggggtttttttgtttttttgtttttgagacagggtcttgctgtagcccaggctggagtgcagtggcgcgatctcggctcactgcagcctcgacctccctggctcaagtaatcttcccacctcagcctcccaagtagctgggactacaggctgtgccactgcacctggctaatttttgtgttatttgtagagacggggtttcgccggctaatttttgttattacttgtagagacggggcttcaccgtgtagcccagatgggtctcgaactcctgagctcaagtgatccctcgcttaggactctcaaagtgctgagttgacagaaaaattagttttaatatggagaggcaaatccttggtatctgtagaacccatcctgaattatcgaatgctctatagtacatttcagacaaacaatacacttaatatttttttctcttcgtttatctatctcaagtctcatactccacctctatctaaaaagaagttggagggactctttttagatacaggtggagtatgagaactcttttgtttttgagaccacatctcactctgtcgcccaggctagagtgcagtggcgccatcacggctcgctgcagcctcgatctccagggctcaggtgattctcccacctcagcatccagacaggcaggcgccaacacacccggctaatttttgtatttttagtggagaccaggtttcgccatattgcccaggctggtctcgaactcctgacctcaagtgatctgcccgcctcggcctcccaaagtgctgggattacaggcgggagccaccgcgctcggcctggcaaattttcttgctgtgctttaaattttctccctagtcctatttttttcctttcttcaggaaatatggtctctgttctgaatccttatcacaagaagctcttaaggagtaatgactcctccctctttggtcaaactaggttctctcccttcactcagatttaatttttttggtcacacttccccaccttttgatagttacagtcaaacgacatgtaatacttactctcccaatcagcccttggcgagtagcaggtcttgtaggtacaagtagtctctgcacagtacactcgggcccaccaagtgaaggtctgattacttctcactcctcagcttatctaaccaagcaacactggaaccctcagaccacagcgttcaagttgtcgcacaaaggacattattcacgtagtaagtactggggccatttttttttcagtctgaagtgtgatatcccccaaaacatttcctaaccaaggcatgctaggccaggataaatcgtgcctgcacatataaaacagaagggtacagtggctgctccagtttggagcacccaggtcctcctataagaaaatatggtttacattcccaaattagtcattattaatgggaagggagaaccaataagtgcatgtgagagttgagagaagaccagttgggaaactttcagatgtttacttttgccttctgacagtcgatcagcatccatctttcactcacatcctgtaaaaccgagttttgttaaagcagcgtcctgtttctagagtctaggatagcgggatttagtgaagagtctaggatagcgggatttagggaacgggtcttctccaccttgcccaacttgtggctttttggggtatctcgcagagttataaatatctagagttctccctagtttttctgatagccacagcatctgaggaccctgtctttccccgtcttgaggttcgagtttcctcaccttggtcagttttcccgtctctggctaggctccgaaaatagactgtgcagagcgtggcgtctctccgttgctagggtaacaactttgttttgttcccgccccccacctgccaacctccgggttcccgcttgacttttctggccaatcatagaagagtctcatctgagactgcactggaatcgaccaatccgagcgcgtccaggtcagggtcactggtcgccctttctagttaaccaggtcgaccccttttaagcctcagtctcggttagcttcacttcagcgggaacctgcccactaaggaggccgattctttccggctcgagcaggtccggacccgcccctctggcgtctagcagtctcggaggcctgcccgtatagttcagggccggacagcgagcggcggcgacttgccagtaaggtaagtttgtggggttttcgtttgtcccgttcgtcagca

SEQ ID NO: 44297 - DNA, 2300 bp, Homo sapien
ttacagcagggagcagctgctcagctctagctagagttctggctctcgtcattgcatctctttggaaatgccttacagatagatcccagggattggggtcatgacagctatggatgcaggccaggatagaggatcagagaaaaactgtgagagatgtagaagacaggtgaagaacagaacatccagcatgcacatgattgaaagaaaaggaaaacgaccaactcactacctagtgacctgggaccaggggagccaagggccatcactgctcatggctgaggtctttatcctgcctaagaacatgggctctgaatcagatgcaccgaagtcctggtttcttcaatcattgtcagtgtaacctttggcaaggcacttactctctctgaacctcattccatcatcttaaatgggttttataaaagtagttctatcacatggggttgtcacaaggattgaatgagatcattcatgcaaagcatgtaagcactgcctagcacacagtaaggcctcagtaagtggtagctattgtaactaagtattagttcacaggaaaaccgtacaacatgcatgctgttccctgttataaacacatgtatgtccatcttgtagacaaacacatgtcagacacatacccatagtcacacatatgtccctccatatacatacaccttaaaaaaagagaagagagctgggcgtggtggctcacacctgtaatcccagcacttttggaggccgaggtgggcagattacttgaggtcaggagttcgagatcagcctggccaacatggtgaaaacctgtctctactaaaaatacaaaaattaactgggtgggctggtgcacacctgtagtctcagctactcaggaggctgaggcaggagaatcgcttgaacctgagaggcagaggtcgcagtgagccgatactgcaccactgcactccagcctgggtgacagagtgagactctaaaaaaaaaaaagaagaaaaaagaaagagaagaggtaaatgacacagcaacagaaaaggaatagggaggaatagggaccacgagggattggggtcagagagagcctgccttttccatgtgtgaggacacccttgacattggacaacccccatgtatttggcccccagggctggcatttctctttgcttagagtctggagagagtgctagttgctcccaggcttgagtcccacgtggctgctggagagaggacaagctcagctaaatggcctcagctgcaatgactgtaggcgggcctggccagatgaggagggatagagagagacctctctttgccagcccctctttaggacaattaacaaaaatttcctagctgttgaatctaaaaatagttgtgattagcatgctgttttgcatgtgattcacatggtaatttgccataaaactgcccagatcctctcgccacctcttttgtttctgttttggattccggcctttcatccccttcttatagcttgcccctctttgtcccctcccctccactcttcccaccctcagccctgcattctcgccaggcctgtctgtttttctccagctggaaatactgctggctaaccttggcttctatgcacttcctatatagtcagccctctgtatctgagggttctgcatccactgattcaaccaaccgcagatcaaaaatatttgaaaaaaagaaatatgtctatactgaacatgtacagatttttcttgtcattattccctaaacaacacagtataacaactatttacatagcatttacattgtgtgaggtattataagtaatctagagaggctttaaagtacatggaaagatgtacataggttacatgcaaatactatgccatttcgtatcagggacttgagcatctgcaagttttggaatcttcaggagtcctagagccaatcgcccatgaataccgagggacaaccgtgtagagctggaaaagaacttgatttcagtaagcataacaagccctatccctgttcctccaggtctgattgtgctggccacaatcactcctgaatcatcgctggactcaggtcatgaaaccaactcttcagagctcacagacatgtcagagatgatgtcggccatgaagcagcaccagaacaccacctacttcctggcccagcacctcaacaaggacagcctccttgcccgcaaggacctgcccttccggatccagagctgtgcagcccaggccgttcttacggccccttactctcttgggcgcccggatcccaacccatctctccaacccattgccacaggccagagtcctggcccccctggc

SEQ ID NO: 44298 - DNA, 2300 bp, Homo sapien
tcactgctgcaacctctgcctcccaagttcaagtgattctcttgcctcagtgggactacaggtgcccaccaccacgcctggctaatttttgtattttttgtagagacgaggtttcgccacgttgcccaggctggtcttgaactcctgagctcaagtgatccgcccacctcggccaccctgagtgctgggattacaggcgtgagctaccgtgcctggccggcctccaatcactcttatctcattgacctcactttcctccttttctcttatagatacattccacctccaccacacaacactcgtcccgcattggtattcctcaaacaagcgagatacatctgccttagggtatttgccctttctgttctctttgcttatcgagatatcaacatggctcatttttttgttttttttttcctccttcaggtctttgcccaaatgttaccttccaagacaggtcttctctgaccaccctacttaaaattgtactcctctcctctacactctggcacattatcccactttccttgcctgatttttttttccacaacacttattgccatttgacatactatgcattttgcttatttacatgtttattgtttgagaatgtaaactccatgacagcagggtatttttaattgtttactaatgtattcttgtgccaatacacagggcctagcacataaagaatgttcactaaatatttattgaatgaacgaatcccttggggcaaatactttgtagtcccctcaacgccttgcacactgccttgcatgcaatagaacactcagtaaatatttgatgaatggcctatgatggaagactactaatattctgccttgcagtttacttccttctccaagtattcctatatacatgggcctacattaaatttctgagcttgtaaaagtgcaaaaaaggtcagaaggagaagtcctccatggacactgctgaaaatagcagtaagacaaagacaggatgctgctttgagtattttctgcctttgccacttagataaatccctctcccacctccatctcagttttatcatatgtaaaacgactatatgatctctgaggtcccttctatttttacatttggtagttatgagcactatggtcacttttgattccagaattgtatgatttttatcttctcctaacccatgcttaaaatatgcttaatggaaacatggtgcaagaataaaggctcacttaggtccaattaacaagtatcgctataaaaataataaaacatggtgtaaaaggccacattagcaacatgtagctgatgacattgaggcttacatgaggcagacaggactaaaacccaggttttttcaaatcccttcagggctctttatctgaagtcccatagaacactatactttctttcctttccgagggctataaaagttagatctttattgtccagatagtttggaaaatccatcttccttcacttgtttcaacatacttggttccagcactagaaacaaaacaactttctcttgcagtgtctcttggatgattcaggtggcatgccttcagtcacttcccccatgtaaactgtcttgcaggcaaaggcgacactgcaattacaatgggcaagcaaactccttgcatgcacgtctgtgatgtaaaagtgttttaattcagccccatccttataaagagataaaaaatgtgttcagaaacatgcaaactcgtggctgtcatcctgataaacagattttcttaaaggaaactgtaaaccagagccagacttactttcctgcgctgagggaggggaaataaaaaagcaggcatggttgatttcccgctagcgggaacgatctggcctcagacgtcaccagcatccctccacccccagtccaacgtctcctgtccccaacagcctagctacagggggccgggctatgggttagtctcgcccccgttcatgctcttcacccaatacctgagagaatcggaaggaggcagagctacaccgaggaccaaaccccgcccttcgctccctcttagctaatcgttgccagcggggtgtggacttcgccgctgaccccacctccgccgctttgggtaatttagagccgcgcgccgggcgggaatgtaagatggcggagtagcaacgcaaagcgcttggtattgagtctgtggccgacttcggttccggtctctgcagcagccgtgatcgcttagtggagtgcttagggtagttggccaggatgccgaatatcaaaatcttcagcggcagctcccaccaggacttatctcagaaaattgctgaccgcctgg

SEQ ID NO: 44299 - DNA, 2300 bp, Homo sapien
cagactgcatttggctggggccttggccagggtgttagtgccaggcacctggttaagataaatgtcctgaagcaaacaataattaccttctttgctgataagaggccccagtacttttccaatagcatgattgcgttaggatctttctttggaccacagcctgtggagcactgattcatgggtactggccttaacttcatccaaactgttgtatatgtggtggaacccaatgttctcctttggtcctgagttggtgtaaataatattcccggttgcatcacctgtccctgcccctcttgctccttctggtggaaattctgcttttgtccaccaggtggcctcacttaggaaggagcagaagaaaaggacctcaagtctctggtgcctttattttttttccctcagcttgaggctgaatataaataagatatattttaatggaaacgtgtaacttttattatggaacaatcacctcatcttgtttatggtttggagtctgtttttcctgaagtacctctaatgctgtgcatggctgggcccatcacagggcaggtgttttcctgggatcgtttatataaatgtatacctttggtttggagtgttattgtcattcgctgttttaaagaaaagtaacaaagttgtgtttttaaaaaatagagacacgggatcctggataatgttgaatgtattttcttcaaagagtagaatgtggagactaaagagaaaagggctggcatcttgtggtcactccagtgctcactccaataccctgtctcctcctcacctcctctgtcacccacctagctgctctcccatacatgttcacccactcacctcagctcccggacaccctctcctccatacatatgcatctgtagattagcatggacctgtgcatgcattacatgcatgtcacagatctgtacatgtgccggtccacagacaagtactcccacacctgaacattcagaggaaggggcaagtggatgagtgctggggttcagggcaggtcggcaggccagctggctggtgaggggaaagctgagttgattagagagtgaatgtgcaggtgacaaagtatgtgtgcaggggagagactgagagggcagtgactgggaagagggtgaggccgtgatggtgagggcgcgtgtccagggagtatgacatgggagagcatgcaaagccatgggggcatgctggctgccacctgaagaagagcttttcaaactagcgctgttctttactgaatgccctctgcctcttgttagggcatttgtatttcttatttctctagaaatcagctccagtttggtttttatcgatctccagagccttctttggagatgccagttggtacaagaaagtgctgaactgtttacagtcccagcctaaggttcagggaggggatgtggtttaactgggccacaaagcccggtacaggactcatttgcatggcccctgacgccatgtgacgcagccggctcctcctatataaagaagcaggagccaaaatatctccgagtctgggttggactggcggccgtggagtttgtgacatacgaggtgacacccctcgagtcacttcccttcaactccagctggagcgcctgcttggctttgggttcgttctgcagccttcgccccgctcctagcctcagggccggactccagcgcagagcccagcccagcgcagcctgccagcagccacccagccgcccagccgcccagccccgcacgaaacccggccagagcttcctagcagcccgagccatgaacaccgaaatgtatcagacccccatggaggtggcggtctaccagctgcacaatttctccatctccttcttctcttctctgcttggaggggatgtggtttccgttaagctggacaacaggtaaccgctggccccagctccggcgcctcccgagccggggcgccggccggagctgggctaggagcccggtctctgagcgagctgtgtgccgccggtccctgttccccgcggtgcagcatcctgggaaggggcgggggggaggggacgcaggaaggggggggtcaccgccgctctgggatccgtcatcgaagcgtccctgcggccgctgcgccgtgaaaaccagctgctgcagccgcagaggcagccggaggcagaggggcggcgggcaggaccagacagggctgggcagggggctggccgagcgccgtgcgccgcttgggagaaggccggaagcttaccagccgagaaggaattcctagctagcttcagagccgggtaggtttgcctgggaccttgtaggccggctgt

SEQ ID NO: 44300 - DNA, 2300 bp, Homo sapien
gtgtttttcccctgccagcccagcttatttctctgtccccttttcttctcatcatcttccttggaatcttcgggggaggggaaagcaatagttgaggaaaaattaacaagccaatgaaaggtcagctcggagactttctgaaccaagaaaactctatgtggtgcagagggcaaattaatattaatatatcagggaattctgataccagttaagctcctgatttaagaggtttttttttttagtgaatgttcttgatgacccataagtatagcctgcactttgttctgtctactacacatgtcttagtgcaaacaccgtgttcagagaggttgtgtcttaaagttaacagaatgtcctgagatcattattgtctcccacctaaagtgagatgaagaaaaacaccatcccgggctagtgcagcaggtttacttagttctattggtcagtactttgcaatataatggctcttgtacacatattatcaccactggaatccaccaatagagcaccacaccatagccaaaaatgttggctgttcagtggcataactgccctggaagccgggaggaaatcaaggccttcagactgcatttggctggggccttggccagggtgttagtgccaggcacctggttaagataaatgtcctgaagcaaacaataattaccttctttgctgataagaggccccagtacttttccaatagcatgattgcgttaggatctttctttggaccacagcctgtggagcactgattcatgggtactggccttaacttcatccaaactgttgtatatgtggtggaacccaatgttctcctttggtcctgagttggtgtaaataatattcccggttgcatcacctgtccctgcccctcttgctccttctggtggaaattctgcttttgtccaccaggtggcctcacttaggaaggagcagaagaaaaggacctcaagtctctggtgcctttattttttttccctcagcttgaggctgaatataaataagatatattttaatggaaacgtgtaacttttattatggaacaatcacctcatcttgtttatggtttggagtctgtttttcctgaagtacctctaatgctgtgcatggctgggcccatcacagggcaggtgttttcctgggatcgtttatataaatgtatacctttggtttggagtgttattgtcattcgctgttttaaagaaaagtaacaaagttgtgtttttaaaaaatagagacacgggatcctggataatgttgaatgtattttcttcaaagagtagaatgtggagactaaagagaaaagggctggcatcttgtggtcactccagtgctcactccaataccctgtctcctcctcacctcctctgtcacccacctagctgctctcccatacatgttcacccactcacctcagctcccggacaccctctcctccatacatatgcatctgtagattagcatggacctgtgcatgcattacatgcatgtcacagatctgtacatgtgccggtccacagacaagtactcccacacctgaacattcagaggaaggggcaagtggatgagtgctggggttcagggcaggtcggcaggccagctggctggtgaggggaaagctgagttgattagagagtgaatgtgcaggtgacaaagtatgtgtgcaggggagagactgagagggcagtgactgggaagagggtgaggccgtgatggtgagggcgcgtgtccagggagtatgacatgggagagcatgcaaagccatgggggcatgctggctgccacctgaagaagagcttttcaaactagcgctgttctttactgaatgccctctgcctcttgttagggcatttgtatttcttatttctctagaaatcagctccagtttggtttttatcgatctccagagccttctttggagatgccagttggtacaagaaagtgctgaactgtttacagtcccagcctaaggttcagggaggggatgtggtttaactgggccacaaagcccggtacaggactcatttgcatggcccctgacgccatgtgacgcagccggctcctcctatataaagaagcaggagccaaaatatctccgagtctgggttggactggcggccgtggagtttgtgacatacgaggtgacacccctcgagtcacttcccttcaactccagctggagcgcctgcttggctttgggttcgttctgcagccttcgccccgctcctagcctcagggccggactccagcgcagagcccagcccagcgcagcctgccagcagccacccagccgccca

SEQ ID NO: 44301 - DNA, 2300 bp, Homo sapien
aaatttcatattctactacctcctctggcttttacccaagaacatttaaaaaaaaaaaaagcgaagaagaagaaaaagggaaattaatacatctaaagggtttgcttttgagaggagaaatagagactcctcagcagtctgttagaacgaaaggaccatactctcagttttgcaggtatggtcagtgacccccagcacctctttcacctctgaccttgggatcctgtcaagagcgagaagtacggcttgtttttggctttccggctgctacagcatagagaccacaaccccacctccattttccccaagttgcagggcacatataggacccacagggccttgggaataagagttacaatagttggccgctctttgctcttaatcacaggcctgatgcttgtggtacccggaggaagtttcaaatctatggaagtccaatccgcagggactcaggccaagtgaagctccactagaaaaaagggcggctctggccctaattggtgttcctgcctattagctggagctctcttagtgtaggagcgtgttcctgcctattagcttggccacagaactctcttagtgtagcagctccgcctcctacacttcttccctgctactcttggaaccaacgcactgtggattccaccaggaggtacctctggtgcctctccgagcttctgtgacgcaggcagagaacgttcaacgtcttggacactagatggcagtatatgctgctctatttcaaaggccagacttgtgaatgaaggagccgatgcgggggtggggagtactgactgaaatgtaagtcagttttacgtgaaaactgaacgtcatgaaaagtttagttttttcagacactaatcgttatttaatcctacacatttaaagtattccaagtctctgagtcctgagaaaccctggaaacccaccacttgcccacccagaacatccctccatcttacagagctggggcacgcccctcaggcctgtgaacatgcaatcgctacatctattgaaagggtaacgacagacggagatcaactaaggtggcaggtaaggttcagaaaaggagaaggacaacaaatttggagaaataggagaaggtaagtgaagtgaggaaaaagagggggtgctgaagtaagaaatgaggggaaaataagggaaatggcgggggtaggggagagaaaaatgagagaaaagaggaaaggggagaaaggggaaatgaggaaatagagaaaaggagaaaagaaataaggaaagaaaggtaaaagaatggaaatgggggagaaagtagaggaaatgggtaaagaaaagagaaaaaataagggaaatagtggaatgagtggaagcagaagagcagagagaaggaaggggaggactgaggagagacggcgaaggggcagagggaaaccgggacagagactgcctctgaggggttcagggaagagaggacacagcgagctggggaaaggaggtgacgatatcgttaagtaagcagaaagagacagaaactgaggagagtttgagcgtgcttctctgagttttgcttacggcatttattgggtactcctaatgtgtgcctggcactctctgactctctgcagaggcaaccgctctccttgcacgccccccccccagaaaaaggggggctttggagggcggcagtttaaggctacaacacttggggctctcgagggcgtcgtctcttctgtagggggacccattcgaggtgagactagagacatttgccctcacgccgagctcgagccccgcgagaccgggccactgagggggcacggcagcccgggtgggctgcgtgcgtatttctggcggaggatgcgccatgagcgctgaaagagcctgaaccgaagcgtccggctcgccgagagagtgagagccgggccggctcccaggagcgcgggcgagggtgcgagcggcagcgtggatgccagggcacaagggtgcgggcggggtggggcgaggggtggagggacaggatccagccgctcggggcccccgcccgccagccggagaagtggcggaggaccgttctccgccgtcccctctagggtaatttacatgctgtcatatcccagtgctgactcccgggcgtgcagaccgctaactagctcactcgctctcagctcctgccaccgctcagccgtcacagcccaggggagcccgagagcctgagagcctgcaaaccggggagggagggagcaaaggagggagggagcaagggcgcgccctggctctccctctgccctgctgcccgcccttcctgcctccacaggtccgcc

SEQ ID NO: 44302 - DNA, 2300 bp, Homo sapien
gtttacattcccttgcatagtggctgtacctttttacaatagtgtgcaagggttccaatctctccacaaccttaacacttattattttctgttctaattttattttttgtagagacacgttctattcatgttacccaggctgatctctaactgctggtctcaagtgactctcttgcctcagcatcccctcctgagtagctgggattacaagtgtgaaccacaccttgccgtattttcctgtgtgtttgttttgtgtgtgtgtgtgtgtgtgtgtgtgtgtgtgtgtgaccatcctaatggatgtgaagtgatatttcattggggtttgatttgcatttccctaacaattagtgatgtggatcatctttgcatatgcctgttggccacttgtatatcttcgttggagaaatgtctattcaagtcttttgtccacttttaagagttttttttttaattgagctatagaagttctttatacattctggatattagcacattatccgatatatggtttgcaaatattttctatcattttgtaggttgctttttcactctgttgattgtgtcctttcctgtgcagatgtttgaaagttttatggtcccatttacctatttttgcttttgttgcctgtgctttaagtgtgactcactaacttttacttctcttaggggccagactttcatcaggagagcctggttgtgacttttgtcttggtttccacctcagtgctctctagcacattgtttaacaggagtgttgactgattactattggttccctgaagggatataccaagagatacctcaatttttctggacttgttcctatgcacaatgatgggaggcgtgtgtgtgtgtgtgctggggtgagtcttcccattttctcatttctttccccttcttctccctttttgccccaagttagaaacagagtctcttatggggcttcctgctctttccctctcccatccaccttttgagtcgggtggtggtctctgagccaatgacaggtcagcaaacaggctgattccagaccaatgggaggatgctggattccaaatggaccaattagcttattagggacctggaatagctggatagctagcatctgcctcattgtccatgtggtaacgaccctcttgttttactggtcaacaatttgaaggtacaagaaaaatcctacttttttttttcttttgatggttttaatccacctccacaacttctgcccgaggccaataaaacacagccattctttttttgtaaaaagaaagagaggttcggtttccttcaattgtctgcccttttctatctcctccactatttttgttttactctgtagttaactttgcatagagcagcttcatagggaggatctctgcggtggacccggctctctcttcttattacccgttgcaaaggcctctttcttgttctaacctgggggtttgtggggttgggggacagggggattggggagtgggagaagagtttagccatagccttccttctgcatttcacacacatttagctatctctgtcgctctgtcacacacacacacacgcacatacacaccatacacacacacacgcacacccgtccgggtccctctcggtgtgtcttccttcaagatgacagggcgctggagaaaaggctgctggaatcagctggtaggtacagtagtaacccgagccccacccaccggctgcctttgcttgctcaggtttctccggtcactcctgccaggggagaagacatgtaaacgtgcctccagaggaagggctgggggagctgggagtggcgggggcggcggaaggtgagcctgggaaggtggccgagcaccccttcttcttgggcccttcccagtgctcccttggggtgtcagccccagccccgtttgcccccactccgcctcccttttggaagggattgccttttttttcctctgcggcggcggaaatgacagtgtggtgctgccgtggtgtcatggtgctgcccctggactgaggggcgaaaactcttaagtttagctcgggaggcccagctgcggtagcatcgcggccgccgtgctgtcccctgcggggcgcgcgggctggcggatcccggctgctgcgcggcgtcggcgacggtagcggcagcggcggcgaaggcgggcggcggcctacagtggtagcggcggcggcggcgaccggggcccgggagctcgcgccggagcccgagccaacccgctgcggaggcagacgagagcccagcgccctcgagcgagcggaggagatggctggcacctgggaacgctatg

SEQ ID NO: 44303 - DNA, 2300 bp, Homo sapien
ggtagttagttcagtgcatttaaaaggtttgatttagaaacagcttttaggtgtacatctattgtacttaggcataaagtataattgtactcagtacttatgtatcctgtgacaatatctgaacaaataccaatggcagagcaaaattttcaagctctgatgagagtctccaatgatgacaagataataaacaaaagctactcaaaagcaaacaatgcttttcttgggcttggctctgtggctcactcctgtaatcccagcactttgggaggctgtggtgggcagattgcttgagcccaggagttcaagatcagcctgggcaacatggcaaaaccacgtctctacaaaaaatataaacaaaaattagctgggcttggtggcatacccctggagttccaggaggcggagcccaggaggctgaagcaggaggatcgcttgagcccaggaggtggacgttgcagttagccaagattgtaccactgcactccaccctgaatgacagagggacaccttgttaaaaaaaaaagcaagaaagatgccctttttctttcctatacataggattaacattttcagtcagtaagatatgttttatatttttccttagttaaagacaacttagaatatttatgtgtgtgtattttaattaatggaagactctaggcaattaagaattaggtacctgtgtgttcagcacagaaatgcctgtggaaaaatagatagagttaccaagaggttggtttcttgtcagttgggtggctttttttgtttgttttgtttgttttttttttttttggcagtctcactctgtcacccaggcaagagtgcagtggcatgatctcggcttactgcaacctccacctcccaggttcaagcgatacttctggttcagcctcccgagtagctgggaccacaggcaagcgccaccacgcccagctaatttttgcatttttagtagagacagggtttcaccatattggccaggaaggtctggacctcctaacctcgtgatccacccaccttggcctcccaaagtgctgggattacaggcgtgagccactgtgcccggccgggtgacctcttttactcactgatgctcactaaattgaaggttaccagatcttaaaatttctggaactttgctaatttctatctagatattgatttgcatcctgttatgttttagaaagtatgaaaagacacatgggaggtgagcttcatagctggcttgtgctagttcagcaggtgtttagtaatgaaaccaaactgaagccacaaggcaatatgactttattattgatcagcaactattgctgagtaggttgaaaagtttgaaatcattccccattcagcttgatgaactgaaggggtttctgaaggtgagggaagaagatgaaagtgaaaactatcatcttttatctcaagtaactcagtttactaggaatagaatggaacggaaatttccatgtgtgataataagaagtaattcaagttcacactctgaggaaaaacttattatcctgcaccaagggctacatttttctaaagctctctcttttttatgcaggctttcagaatggaatcatttcaggaagtagagagttactttaaaatatggcattgttttccttacactggatgtcacatagaagcagccctacagtttaccttgaagtgaaatagagaacaatattggagaatagagattgggaattttgcagggtctcagccttatcttagtctaggaaaagagatgtcagtggagaatatgtgagagaatgatccatgcaaatattgtgagctggaatggtaatgttaatcagtctatcaggattcagaggtggccatttggttttatctatttgtgcatgaaaataaacataggcatttgtctaaaacaaggtttgaaggggaagaaagtcttcctgattagttcccaaattgcttttctattgcttaagcatctctggggaatccagcacgtaaacgcgcccattggttagtgtataattgtgttatatccattttcctttggaaatgcctaatgactcttgctttgtattccttgcaggtgaaagcccagcctccgtggttcttaatgcctcaggaggactattttcactaaagatggaaacactggagtctgaattgacctgtccaatctgcctagagttgtttgaagacccccttctgctcccttgtgctcacagcctctgcttcagctgtgcccatcgcattttggtatcaagctgcagctctggtgaatccattgaacccattactgctttccagtgtcctac

SEQ ID NO: 44304 - DNA, 2300 bp, Homo sapien
gaggtggtcatgggttcctcaacatggtgagtggatcccattttccttttcttttctgtcctctgtcattaggttcctaggagattcaattctatagcacaaccataataccaataagtcaaggttaaaaggtatgtgatgaaaaccactcctagaaaaatttgccagctttttaataaaataatggaaaatatactgggctaggagatggaaactgccacattgctctaattgctaactttttaaagctctagtgatatcagcattatgcatctaagtgtaaactatttaaggaataaacatatatcctatttgttatatatcatatatggtgtcttacacaactcagataattcataaatgtttatttctctctcctttccactgtctcacaggtatgcaattggcattgcctacaaatcagctccaaagaatgaatggattggcaagaatgcctcctcatgggtcttctctcgctgcaatagtaacttcgtggtgagacacaacaacaaggaaatgctggtggatgtgcccccacacctgaagcgtctgggtgtcctcctggattatgacaacaatatgctgtctttctatgacccagctaactctctccatcttcatacttttgatgtgaccttcattcttccagtttgtccaacatttacaatctggaacaaatccctaatgatcctgtctggcttgcctgccccagattttattgattaccctgagcggcaggaatgcaactgcaggcctcaagaatccccttatgtttctgggatgaaaacctgtcattaagtttcaggagagtatataattcactggctctctagttcagcagttcttcccctcctacacctaagttagcgttcaatatacgagacacaaaataaagtttgtttgaagcatccaaaataactagatattgcagatttaatttttgtgcattaaagcttgtatttgaattaatttattgagtttttcagaacaaattatctgagtagtctgcgttcaagccattggagaaaaatttagaaaatgcctctgttgtcattggagaattaaaaattcccaatgatttaagaatataaattatattggaagcaattagggtaattctagttaaataatgtggaaaggtgccctgaataaggagctagcaagccagagcggggggtggtcagcctttctagtactggccagtttggccatgtagaattttgaacagtgtcaaattatcacatattatattttacttttgatgaaaacctatcatcaagggtttgttaggaaaccatgaatgtgtatatgtaatatataaagtgaacatatatgtactttatatatattcacttgtgtatgtatgtttatgcatattcactttatatattacatatacacaaaaaacttttttttccaaacaccacctcgaactagaacaaaaaactttttaatttgctaatttgagtgagaaatatactggaagggaaaataagttacaccatccatttttgtcccctaaaggaaacatcaaaatcaatcaacatttatttcctccctctatccatcattgccttcctccctcctgtcacgcacacatacacatgcaaccatgacacagataatgggaagagctttattggattagcagagatttacagacaagattgcacaagagatgctgttgctggatagaaaattgatcaggtagaagtgatgctacctacttgaggatggccatctgaattgttaaaaattctgtcatagactattaaaaaaaaagttttactactcccaagtacacacagttatgagaattaggcttttaaaaagttgcacagtgaaggctctttaggaacctactttacttaatcagtaaaaattgagtattattgatgcaccaactattcccatataaatgtacttgctttttcagataaaacacttctgaagtgctcaagaatgtctgaaaacagtttgttttcttaaataggataaataatcattccttttgcaatcttgtttacagtattcattctcttagccaatccctccacgcaaatggagacaaacttcatcccagtcctaaccagtatagttgaagggaatggagccttgtagtctatgatttttttttttaaatttccatcgaagggattggggatgtcagagagccagagctttcccctttccaggagctaagttggcttcggaagtcttctgggatttgtgaaaatattactgttgtaaaattacaaagtggtagccataacaactccctcagattggagacttgaaat

SEQ ID NO: 44305 - DNA, 2300 bp, Homo sapien
agagttgatggtggactaataattgtctacttgaacactgcaaataattccaaataaagtcccacttacttcaggcgtgtgactttacaggatgaacttggtgggctttggctgacagcacaactaggtatgcctacaagaaaccaaaagaaaacagtagtttaagacattctttcaaaataaaacttttagctttaacttttctgcaaatgtatatatagatatacgtgtataatatatatatatatatatatatatatacacacatattatttattcctaggtatgcagccatttattaaaggcttcccatgttctgggaatttatttagtcttatttaaacttccaactaccctgtgaactaccattttataaatgaggaaagtgaggctgggtgcagtgcctcacgcctataatcccagcactttgggaggctgaagcagggctatcgcttaaggtcaggagctccaaacccgcctagacaacatggcgccatcccatctctacaacaaatacaaaaattagccaggcgtggtggtgcgcgcctgtaatcccagctacttgggaggctgaaacaggagaatcacttgaacctgggaggcgtaggctgcagtgagccgagattgtgccactgcactccagtctgggtgacagagcgagtctcagtctcagtaaataaataaacaaataaataaagtgatgcacaagaagataaagaaaattgcttaatgtcacacagttagttaatcgtaaagatgggatcagaacccaagtctgctgctctccttctagtcacttacccaacgaagtcccaaccttagttagactcatactccctgacatcacccacaggctgtcagggccggggcgcggggcgggggacggagggcggagggcggggacgggaatcacgcaagaaagcaacacaaatctccactttccaactttatcaaggaactaacccgcaaaacctgtggctagtgatccgcttgggaggggccgagctttatcctgaaggccacgaggcacccttcctcagtcttactctgggcagtgatcccattttacactccccactctgctggcaccacgtccaacaggagcagcaaacctagcctcaaagccacaccaacccaaggacagctgctgttccattttttctctcatagaatcaaaagacacaatggcggatatcaacgtaatttatttggatcttctccccttttcaaaccataatctagggtctacagatgaccatcagtgggttcacgaaccctctgtgcttacatgcaaaccatgggcatttttttaaaggaggtggtcaattggtcaatagttttccttattttcaaacggtgccatgtgcatcctactgcccacctcaagaaaaacaaaaagaggctaagaatcctaactttaagctctgccagcaagagcttctcggccatctttactctcagttgcgcatgcacctggctcccgccttccttcccgctctcccctctccaccacccatgcaaccaccatgcacgcactcccaacacacgcacccccccatgcacgcacccccacgtacggacccccacgcacgcacgcactccacgcgcacgcatatatattaataaatctatatcccctcacacacacctccacgtgcacacgcacacacatcccccacgggcttctcggtgagtcttcacgctcgaaagcatctccatgtcaccactcgcacactgccacgtccgcacctgtgtaaatcacatcttcgcatgtcccccacacatcacacgcacacaagcgttcccgcacacgcgcgcctccccacgtacgcacctctctataccccttcatacacactcatgccttctcaacacacgtaccagcccacttgcacgcacttgcaagcgcttgcaccctccacacgcaccgctcggagcttttccccctctctcctcccaatggctggcttctggagccgacccttccacgcgcccccagcttcgcggcagctaggtccctccccagcgcgctgagctcacagcgcaggagccggtcgcagccacacaggccggtccgacgggaccactgcttccctcctcacatcccaggagacaccaggtggggcgtggcacctcccacacacggctggagggactcccaggatttcccgtccttccgaattcgtggggggtcagaggactgcggggaggcgtttctcatcctcgctggggaaaggactcacctggttcccaaagccagtttgctcttcctctacttcctgccagagggtaagggattc

SEQ ID NO: 44306 - DNA, 2300 bp, Homo sapien
ttagcaccttgctgatgtaataaattatttcaattcattcaataattaatatattgggtgcttaccactgtgctagatgctgaaaacacaaagataattaagacacagactaaaccctccaggaatccccagttgatggagaaaaatgacgagaaaatcacagattacaatacagtgtgaaaagtaccgtcagacatatgcacaagttgttatggggacacaaaaaggttgcacaattcagcctagcttgaggtggggtctggagaatcaggaaatacaagaggaagaaatgtttgagcactgtcatgaaaagggaatagaaactgtataggagttaggtgaatgaaaagaatgggagtggagagagcaggaggggatgaggagaaatccgtgcatgcacagaggagcctgtgcaagggccacagaggaagagagaagatgcttcgtttgaaaaactaaaaattacttgctatggcctatctaaaagactatataactattaagagggattatcacccaggttgaaggaagggtaggattatagaagtactttccaagcacttaaaaattatttacaatgatcagctgttactgggagaaacattttttttcaattttgaaaaacataacacgtttattataaacaattttacaatagagaaaaatgtcaagaatattttttaaagtactgtattcctattacccaaagataaccactgttaaagtgttagtatataactttccagatttgtgatgtatgcatacatatagttagttatatgctctttgtaacaagcgaaattagagaaaaatgtattttaaagttaaaaactttttttctaacctccagtccaaccccacttcccagagataattaatgttgagtctgctatatatcctctctcattctgttctccaagattatagaaacatacaaacatatgcaaacacacacatacacacaaatacgggatcatagaaaacattactcctacaactttacatgcccttttgtcattggccatcatcatagatccataggtagaaacagattcagttacagtacaatgtcatgtaatacgtagcaacgctggactcaacctgagatttgtctgatttatcttgtgggtctcagaaagtcattcaaggttttcttgtttttgtgtttgtttgtttgagacagagtctcactctgtcacccaggctacagtgcagtggtgcgatctcggctcactgcaacctccgcctcgtgggttcaagcgattctcctgcctcagcctcccgagtagctgggactacatgcgcgtgccaccacatctggctaattttttgtaattttagtagagacggggtttcaccctgttagccaggatggtctcgatcttctgacctcgtgatccgcccatctcggtctcccaaagtactgggattacaggcatgagccaccgcgcccggccgaaggttttaagagacatattcatatccctctgatggaagatctctgatatttcatgttttggtaaaaaggtgtatttatgctactcctaactctctttctcccacagttgcttcaagattcaaggcgtttcagtaggggaggagtgggagaaggggtgatgggaggagtgtggggaaagaggagctaagggaggaaaggcaggccaggatttgttagggtgtctgggatgtttagtcctgagcaaacaggggataagctccgctcctggctccaccctcttcctccaagggcaactgaggggttggggctgtttcctgctctagaatattccagttgggggcgaaactcccctggcatggcacaaaccattatgatggggagggataagtcttcaacttgttcacaaatactttttttggtcctaagtccttccggaccactcctgtttctttcagccttcaaggtctcccgaccatgtggcaggttcccttttgtcccagtggaatggcagaggccttcctcactcactccctttcacccctacagtctctggaaattggaacagtcccagagtaaaatcctcatgggttggccctgaggcttcttttcccgcagagccctaggagggaaagaggccaccctctcttcaggcgtgttaagcagcggggttggcctgtacttcctctggccctggctgaagaggtgaggcctggtgggagatgtcctagggtaggacaagccggtcagagggtcattaggagggtcttgtcagaggtgggagggcggagaagacagatgaggggaggggctaaggaggaggaaagaaacctattggctgctc

SEQ ID NO: 44307 - DNA, 2300 bp, Homo sapien
tttaatagcacaaacaggttggagaatgttcaatgaaacgtttttttttcccttcctaacatggagctgctgtctgcttatacaggggaaagggagggtttctgggaggaatagaggtgaaaaggaaaaagtaattttggagcatgagatattctggggaatgagactctcccttagggcaaactagggacccaggagccagggggccgtgaaggtgggaggcagaagagaaggtggatgtcagagacatgcaatagttatttgggggaaaatgttgatttgtgcacaagtcatatcttgggaaatgaaaggaacgttctttctctgtcacctgctgttcctcctcaccctccactgccttatacggcccagtacgcagaattcaagccagtgctagattatgtgctacatgcctgacagtgagactcatattataacattgcttctgcaggagttcttgcgtgcagtcaacgagtttaccattacatcttgggacacgctcattttaaagttgggaactgcctgtataagacatggtccctaccctggagggattcacagtgactagatttaaggtagaccagttaataaatgcgaaactactggagaataatcaatggtcagctgtaggatattggctttaagtaaaatggaaatttatgctagggtggtatgtcggttcattgaaattctcacataggacagtatgactgatctatgctaagaatatacttggctagtaagaggaggaagaagaaaactctagtgatggaaatcacctggagccaacgtttggcatcagacatgagcatggacaggataggctgcaaggaggaatcaggcatgatggaagcaaaatggctttctaagaagcagtgggagattggaatggctaaagtaagatggggtcaaacatttcctgtaaattaaagacaggaacataaaacatatcacttgaaatttgtacacatttcatgtgactgaacactttgaggcaataaatcttgacatactttttcaggggcatgagttaatgtggctaaagttcagatgaggtgaggatcagatattggaagaatgggaatccatattaaggactttggatttgatgaaagagtccatttatggtgttactggaaatatttcactagggctggaacattggcctgcggctggcacacaggatgaaggtggaataagtcagggagaccacttaggaagctgctatgataggccaaagtgggaagctgagtacctggaccaagatggaagcagcagattggagaaagaacacatctgaaagtcgctgtggagatggaaatgataggacttagaaatcacatgggaagagccagagaaagtccttaggtttctccgggtaacttaagcataataggaacactattagaagttcatgttcccatgaaagttccttacctgtggagcctcccatgccctcctggtgaacctccatttctaaggaaaccctatagcatttactgagtatcttaattctccaaaaaatcagacttctccaaagaaagtctttaagcatgtattcactaacttgattttgcaaaattacgttagcaaatacgtgctataaggtttctaacccgacagacaaaagcatgtaaatcattttactgctagttttggtggagggtagtgacaactgccagtgtttcaaaaaagagtaacatatccagagtttgttcacacagaaatgaatgctttttagcttcataacccctgtgcccttcccgtgagccccatctccccaggaaacgatatagtaccaatttactaacttaatttgtaaaaggaggttagtgaatcaattctgtaagactcatggaaatatttgaaattaattagccttgtcagcttttatttgcataggctctcttccaaccatatcccccagcccaagtacaacgttttagtaagattgattttaaacaatgagacttagagaatctgtgtacaaggagcttgaataatttaaatgcgtgggtttattattaacacagtagcaaatatatcaaggaaacacgccccatgaaaagtgtttcaaagaaacacaaatctgtactgaaaaaagtctatacgcaataagtaagcccaaagaggcatgtttgcttggcgatgcccagcagataagccaggcaaacctcggtgtgatcgaagaagccaatttgagactcagcctagtccaggcaagctactggcacctgctgctctcaactaacctccacacaatggtgttcgcattttggaaggtctttctgatcctaagc

SEQ ID NO: 44308 - DNA, 2300 bp, Homo sapien
ttcacgcctataatcccagcactttgggaggctgaggtgggcagatcacccgaggtcaggagttctagaccagcctggcaacatggtgaaactccgtctctactaaaaatacaaaagttagccaggcgtggtggcaggcgcctgtaatcccagctacttgggaggctgaggcaggggaatcgcttgaacccgggaggcagaggttgcagtgaggtgatacggcaccactgcactccagcctgggcaacaagagcgaaactctgtttcaaaaaataaataaataaaaataaataaaaattaaaaaagctatagtagtcattatttgtcaaagggaatccctatttgcagtgactgctatacttcttagccccacagaatagaaaatggtattttaaactctattacaaaaaaatttcaaacacaaaaatagagggaatagaatagaaacccacaggcctactgcttagatttaacaacaaacatcttgccctatttgctttaactagttttttccttgctgagctttccaaaaacaaatcctaaatatcatgacttttcacccttctctttcagtatgtaaaaaataaaggtatttcttatataactatgagaccattattacacttactaaaattaacactaactcctttagaatgtctaatatccggtctgtattcagattgcccccaactgtctcccaaatgtctttttgcagttggtttgtttaaatcaggaaccagacgagatccataaattgcatttcttcatgttttttacgtctcttgatgctgaatagttcctttccctttttaagccactgacttgactgaagaatggttaaatttccaatggagtattaaatcttaatataaagtattacatttaaatttaaatccttaaatatcaccagaccataatgaagtaaaccaggtaaagataaggccattttcaggttgagtaataaaggaaagttccagaaaagagaaaacagtctcttgatttctaattctctcccaaaagacacaaaatggagatctgtaagtatgggacagtctcactagtgcttacgacactgtctgcgaaacacaaggccatctataaatatttgtgggcttactaaaggcaccatgaatcctagaaactgaggatgaaagcacgagagtcctgtgagcaggagggcagaaagaaacacttctaaacttctgtctacctctgcttagaatgtccactcattcccccatggaaatcccactcatgcttcaaagtctaactaaccttcccttctttgcaaaaacttttccaattaacgacagtcatattcagcatcagatcctcctattaacgtgttctgaaagcaccatgtaaacttctctgccgagtatttaccacaatttgtaatcggacatgtttttgtgcttattttattgtctgcatcttccactccaccgtatccccagctcctagcaaactgcctggcacggaaggggcgttcaatttcacatgcgttactgaatacagttactagtaaaggtaaataaatccatataaaaagccttccttttcactgattgggagtttctgagaaatgcggtagacgttctagaactatccaaaaatcagggagcggagctccgggccaacgggaaaatatctgaggtctgtggggctagctcccgcaggcctatcgcgagtcccgaggtgacccagggggactgcttggggcggcgggggcggggttctgcttctctcagaaacggggcctccgctagggccgggccccgaaagccacgtagggcttcgccgacgtcgccgactgcggagagacctagcgttgctttacctggtcagttctagtagccagggatttatcggccagaatactctccttcaactcttccagcttcccgctgtaggccaggttgcagaccattaggttagacacacacccctccatttcgctgtcccagcaactacttgtcgcgcgagcaacgcccgcctcacgtcgccggctccggctacgccagtcaaaacagccgttagagcttcaccaatcaccggccttcctcgttcccttttcttttcccgtcgcgcggcgcctctgggagttgcagtttgagagcagttccgggcagggaggcgcctttgctgccctcacagacttggcccctagcagtgcagaactacaagtcccagggatcctagcgaccgtccgtccgtagtcaagttgccggtggaattggcccaggatgacagctggagaatggagtcaggtacggggagcggctttgagtggaaccgtg

SEQ ID NO: 44309 - DNA, 2300 bp, Homo sapien
aaggatgtggagaaacaggaactctcatacattgctagtggaagtgcaaaatgttgctgccattttggaaaacagttttgcagtttcttaagaagttaagcataaattttccctgtgatccagtaactccacccttaagtatctatcaaagagaaatgaaaaaaatatgtccgcacgaagacttacatactaatcttcttagcagcactagtcatagtagccaaaaattggaaactgatgtgcctatctaatagtgagtagacagataaaaatgtgttatatccataaaatggaatactattcagcaataaaaaagtaaggaagtactgatacatactacaatatggatgaatctcaaaaatattatgctaagtgaaagaaatcagacacaaagactgcatattgtatgatttcatttatataaaatgtccagaataggcaaatttatagaaacaaaaaagtagattagtggttgtctggggctgggaatgggacagaggattgattaactataaataggcatgagggaccttactggagggatcaaaaagttctaaaactgatttatggtgatggttgccccacttcagtaaagttaccaaaaatcatttaattatgcacttgaaatcagtgaattttatgatatgtaaaatgtgcctcattttgagtgagtgttatacaggaactctactaaccttgcaacttttctataaatctacaactattctgaaatttttgaaaaattaaataaaaataaaaataaaaaagtatatgtttatgaattgatatcagtatttggcagtacctatctatgtaaaatgacattttcaaagattaaataggtaaaaatttcctaacagatcagcattaacagatgaacacttaaaatcaattttgacaatagggaacactaattctgagccccaattaagcaaaatattatcccctaaaaagaattctattcttctcattggtagtcttcctgtattacaaaaaaagtactcaattactattatattttgaatttcatcaataaaaatttgttgaaatttgttttctcttttgtcataaaagtaccaacaaaatattcttgattttgccttttggcctacaaagcctaaaatatttactatctggctctttacagaaagtttcccaactcctgttctacactataacaggataaacataaacatcatgagtctctttcttgaatgtattcttatcgttacctagttgtggcataatgtcctctggatatgccctataaaggatcagtcttgcattgcttctgctatggcactatttgggatttctataaaaagaaacactattagcttaatagttgtagcaaagccttgacaacatagttaatatcgtgatattaaaatgccaacaccacagcccggtatccttaagatgaccctcatcaagctgtgatgtcaccaggctatggactcaccgaggtctcttagatatcaggtggctcccacggcatcacaccctgcctttggcatcaccctggcacatcacctcagtacggtgccatatgctatcactgctgtggtagaaccctgtcctgatgccacaccgccgagatgtcagagtaattaacccccacttctttccactccctaggcggtggcagggagggggagggtagccacagtcaccggttcgagctcagtaggtagtactcagctccaacccttgtcccttccgcctgccactgcaggtcaggaaccccgggggacaggacctttaggctctcataactcttgccctgcccccgaacctgtttcatatggccgactcaacgacccgccagcgactacccaccccggctctttcacacggttccactcaaagccgctccccgtacctgactccattctccagctgtcatcctgggccaattccaccggcaacttgactacggacggacggtcgctaggatccctgggacttgtagttctgcactgctaggggccaagtctgtgagggcagcaaaggcgcctccctgcccggaactgctctcaaactgcaactcccagaggcgccgcgcgacgggaaaagaaaagggaacgaggaaggccggtgattggtgaagctctaacggctgttttgactggcgtagccggagccggcgacgtgaggcgggcgttgctcgcgcgacaagtagttgctgggacagcgaaatggaggggtgtgtgtctaacctaatggtctgcaacctggcctacagcgggaagctggaagagttgaaggagagtattctggccgataaatccctggctact

SEQ ID NO: 44310 - DNA, 2300 bp, Homo sapien
attagtcttttgtgcattcgacctagaagttttctgcttatataaattaagtaggaatgcagtaggcttcctatcaatttcacttctaggaacaccatgattaattagcaaatgccagagctctacacgagtcagactattctgattgcagtagtctgaaagcaatagtcagactattgctttgcctctgctgtccattacggtagctatgcccaccttgcctttgatggttgagtgctgccacttggcccctgccacctcaggatccaattattcccattatatttaaattttgtagttgagtgatacagttcccactgttagatctgacatacagagaagagcaattacagtactcttcgaagatgcatgttctgccctcacaaatctattttgcaaggcattggtcaagggtatatcttctggaccctcccagctgggatgaataggtctgaagtgactaatccactccaccatcccaatctccctaagcctttggatcccttcctctacataaaaccaagggagatcaggcatttccatctcgttcacagtgggccatcttttaatccatatttcagctaaccaagcaaataagctattagaaccttttttaactccccgagctgcaacattaaatgcagagtctctaacatagtgggcccaaatcaataaattcagcctgatccaactctgtgttctttccaccattatcccacacccttaatatccgttcccatgcctgttctccaggtttctgtttatataaattagaaaactcaagcagttatttttgagtatagtgcacctcctcatgggtcacactctcaacctcacctccaggagcccaccaggactttagtctagttgaagtctggaagcaaacaggggtgttgggggtggctcctgaggagaatcaacattatcttgcctggcaactgcctcagaggaggccatcactgttgcttcaggcagcacagggtttatctcctcagtcaaaggtggaaaggctgatgacagcatgggccggggaggggatattgccactactggagatggggaagctgtttcttctggcaaaaaaagttcatcagagtttacaaactcagtgtccccagcttcatcagggtcctcccacacgttcccattccaagttgcagggtcccattcttttccaatcaatgccctcactttaacagtagacacctggcgaggctgtgcatgcaccttttgttggaggccagtcactcgcatgataagagcttgtgtctgtttttccacaatttcagctctttctctacaggagataagactctcacttagggcaatcttagcagattttaggttcaatatctgcttctgaagcctggagctagaatccctgagttcatcattttctttcatgactttgtccactgaacttaggagcaaccaactagcttcattatgttccttggttttccacgtatggtcaattgtattatgtatagtcactgaactccttgcctctcacgagcgatgattcaggtgtgtcaaatgcatttattttgcataactctctaaacagttcacaccaaggactatcagtgttccctatactattagaagtacagtccttagcatttttgggtctaatcatattaaatagccaactccagaaaccccaaaaccaatgaaagaacttcatccttaatattctgttcctctagaacaactcctggtaccaaaatctgtatcagtcaggattctctagagggacagaactaatggaaaatatatatatatatatatatatatatatatatatatatatatatatatatatatatgagtttattaagtattaactcacatgatcacaaggtcccacaataggccatttgcaggctgaggagcaaggacagccagtctgagttctaaaactgaagaacttggagtccaatgtttgagggcaggaagcatccagcatgggagaaagacgtaggctgggaggctagggctgtctctctttttcacatttttctgcttgccaccctggcagctggttagattgtgcccacccagattaaggaccggtctgcctttcccagcccactgactcaatgttaatctcctttggcaacacccttgcagacacacctgggatcagtactttgcatctgtcaatccagtcaagttgacactcagtattaaccatcacacagagggagaccctgtctcaaaaaaaaaaaaaaaatgatgcagcttgtaaagctccactccatgcacatacacacacacacacacacacacacacacac

SEQ ID NO: 44311 - DNA, 2300 bp, Homo sapien
ggtgtggactccgtctcgtggtgaaactctctgcaaccccctaacataaatactagagatggggatggttagagggtcaaaggagggggacggaaaagggtcgtgagaagagactcaccgctgctgccagttcctcggtcaggcacaacgtaaccaggagcagccacaacctgaaatgggagggagggtgagtaatgggctctctaggcttcggggtcgtgcgtctgcctgtcgccccccgaacccttttggatgcctgctcccaatttctctgcagtgacagaagtaccagtatagtcccggcctggcaaagtaacccgaagtaagaaagaggaggggagctcggggcagcaacagctcacccagggtgcatgcttgcggctcctccggagctgggtcccgggagactgctaagcggctccgcggcccgtgctcatctgggctctgctgatgcttggaggctgtttccttactcagaacagagtaggtggacgaagtggcccagtttggaagaaactaaacactgcttctagataagaagtgctccaaagggaaacaggctcagcggtgcccgttacaacttgcagcactcaggagatagttccatgcagcaggagaggaaagaatggaggggaaaggggcggggctgtctgctgtcaatcatcccccctaccttgggcagccggtagtctttctcactttcaggcacctttccacacaacagccctaagtatctccacagcttcacacacagccccttagagacctatacgctaagacctaagcaactgtgcatcatatactttcaactttactgttaggttacacataaagagacataggcatactattcccacataagacagatgggcccgaaagtgcccttgcacacatgcccaaatgcatacaacactgattcaaattgatagtacactaggctattgggaaggggagacagtttctggagttgtaaatccactctgagctaagcagaacctaaggatgagtgggccctcgtgaaatagatccaaaaccttgaaagactctaaagtggttaattctaggaagatagaaatgttgtgaagaattcttcatcaaattcttgaagattctccaaggagtccgcagaaagtattttctagttcttttgttactttaaaaaaaatctatatatcagaattatcaaaggaacattcaagtctttatatgggagatatcgattcagctgccatcaactctatttaaatatttccaattaagtgtttatattaattctaagaaacactgcactaaatttatttaattccctgccctaaatctttctgaaacacaactacaatgagagtcaataccttttacattagctcaatataggaggcattaattataggattcaatgcagctaaacagagatatagctgtattataataacataataccatagaataattaccaatacctgctgaatgctcccagatcttatacgtatataacacacataaagtattcacgcacatatacttattttcttacttgtttataagcatatactttatttattcccaatattttcacatcttctgcttgtatgtagaaactctctgttctgtgagcagctggaaggtaaagaagaccagcagcccagggagcaccgaccaaaatttgtttctaatgagtaacaataaaaagcacggcccctctgagatccatccgctaaaaaaatagtcccagtttagatctatttgtaattggctttggtacgcacaccaatgagattggaactgagcctagaaaagtagtatcaacggaaggtgcaaatgaacgaatagaaaagcttcccggttggactcatggtgctcagtcaactagtctggaagtttccctcccccaaataactgagcgtcactccctcgcaggttgccggtgcagtctaaaactgtggcggagtgatactcaaattcccttgtgctggtgaggaggggggccttgcacggggaagagagggaggaaagtagatctgtaggaattgagtgaagaaaaagtttgcaagtctggacagaagggaaaagttctcctgagagaccggctttggggaggggaggggggaaggaagagtagctccttcttcttcttcttttttttttcttccactcttaaaaagcttctttctcttcacccaagcctcactgtccctctccggctctagctctctccatataaaccctcaagattatgtcaattggttagagccagccgggaatttcgtgcgggtgctgaaggagctgcgggagccggagaa

SEQ ID NO: 44312 - DNA, 2300 bp, Homo sapien
ggggaggaaaagttttaaatacccaccacagcctagtgagcctttaattagcgtcccccacttctgactttgctcttgcccccggaggagctagctgcagggaagcaagcagccctatttttaagcacttaaacctctccgttggacttcagaaggcttgagttaccggtgttgcaaataacgtttcttcctaaacatgagaaagcaaatttgaattccctagtcaacgccaaaaggaagataaagggaccccccccccaaaaaaaaggtaatttcagcgtgaaagagcggtgatgggcgcgggggaggggaggaaggacttaccgcagcctctgcaggctgcccccaaagactcagggccagtaagaacaagccggcagccaggctgactccacgcagtttcattcttctccggctcccgcagctccttcagcacccgcacgaaattcccggctggctctaaccaattgacataatcttgagggtttatatggagagagctagagccggagagggacagtgaggcttgggtgaagagaaagaagctttttaagagtggaagaaaaaaaaaagaagaagaagaaggagctactcttccttcccccctcccctccccaaagccggtctctcaggagaacttttcccttctgtccagacttgcaaactttttcttcactcaattcctacagatctactttcctccctctcttccccgtgcaaggcccccctcctcaccagcacaagggaatttgagtatcactccgccacagttttagactgcaccggcaacctgcgagggagtgacgctcagttatttgggggagggaaacttccagactagttgactgagcaccatgagtccaaccgggaagcttttctattcgttcatttgcaccttccgttgatactacttttctaggctcagttccaatctcattggtgtgcgtaccaaagccaattacaaatagatctaaactgggactatttttttagcggatggatctcagaggggccgtgctttttattgttactcattagaaacaaattttggtcggtgctccctgggctgctggtcttctttaccttccagctgctcacagaacagagagtttctacatacaagcagaagatgtgaaaatattgggaataaataaagtatatgcttataaacaagtaagaaaataagtatatgtgcgtgaatactttatgtgtgttatatacgtataagatctgggagcattcagcaggtattggtaattattctatggtattatgttattataatacagctatatctctgtttagctgcattgaatcctataattaatgcctcctatattgagctaatgtaaaaggtattgactctcattgtagttgtgtttcagaaagatttagggcagggaattaaataaatttagtgcagtgtttcttagaattaatataaacacttaattggaaatatttaaatagagttgatggcagctgaatcgatatctcccatataaagacttgaatgttcctttgataattctgatatatagattttttttaaagtaacaaaagaactagaaaatactttctgcggactccttggagaatcttcaagaatttgatgaagaattcttcacaacatttctatcttcctagaattaaccactttagagtctttcaaggttttggatctatttcacgagggcccactcatccttaggttctgcttagctcagagtggatttacaactccagaaactgtctccccttcccaatagcctagtgtactatcaatttgaatcagtgttgtatgcatttgggcatgtgtgcaagggcactttcgggcccatctgtcttatgtgggaatagtatgcctatgtctctttatgtgtaacctaacagtaaagttgaaagtatatgatgcacagttgcttaggtcttagcgtataggtctctaaggggctgtgtgtgaagctgtggagatacttagggctgttgtgtggaaaggtgcctgaaagtgagaaagactaccggctgcccaaggtaggggggatgattgacagcagacagccccgcccctttcccctccattctttcctctcctgctgcatggaactatctcctgagtgctgcaagttgtaacgggcaccgctgagcctgtttccctttggagcacttcttatctagaagcagtgtttagtttcttccaaactgggccacttcgtccacctactctgttctgagtaaggaaacagcctccaagcatcagcagagcccagatgagcacgggccgcggagccgcttagcag

SEQ ID NO: 44313 - DNA, 2300 bp, Homo sapien
gtctactttgatggaagaaaattatggcatgcatagtaaaaatatttgatatgcatggtttttcagcaaatttgctattataattatgttgtgctcagagtaatatgaaagttagttttcatacaccgggtacacaccttcagaaggatagaaagaggacatgtgatttgaggcatgctaagtgctatagggaagctagacagctaacttaaaagtggacccagatgagctgtaacatagcagctgcttacaaagaattgacggtcactcaaccatgtgaaggcctaagccatgatctcatattaaacagtttttaaaactatccataatgatcactcaaataaatttaaataatttgtcacacacttattcttcagaggttatatgaaattaaagatgatgggcttcaggctggagaacattttctctcacaaagccattcatttttttaacatctggccctcatccccaataggacagtgggtgggactacccagatacccttctaagagatatactgaggtttgaattctacattcctaaaactgaatggagctttttgctgctatttcacatgtacctcctcccccactttcctttaaactggaacactgattctcctttgaaaaaggagtattttcctttgaataggtgatgggcaaattctcaatttgttcagatgccttggtaggtttaaaaaaaagtaaacaaacaaaaaaacccataatttagaaaaaacaacaacaacaaaaagacgcaaaagacctgaagcctgagactttacctcactcttcttggtatgttgccttagcatttcatttgtaacaaggatgtcaaaagggaaaaggaggtcagtggcttgaatgacctgaggtgggggtaggttcctgttgcttaaggaaagagcaaaggggacgaacttcactgaggcgctaaaaacactttgatggaagctggattttcgaagagccaaaatattaaactacagacaaaattcaaagagtgggctgggtacaagtagtgaaaaggttagtcgccaggcagggaaacacccgacggtggagggaggggaggaaaagttttaaatacccaccacagcctagtgagcctttaattagcgtcccccacttctgactttgctcttgcccccggaggagctagctgcagggaagcaagcagccctatttttaagcacttaaacctctccgttggacttcagaaggcttgagttaccggtgttgcaaataacgtttcttcctaaacatgagaaagcaaatttgaattccctagtcaacgccaaaaggaagataaagggaccccccccccaaaaaaaaggtaatttcagcgtgaaagagcggtgatgggcgcgggggaggggaggaaggacttaccgcagcctctgcaggctgcccccaaagactcagggccagtaagaacaagccggcagccaggctgactccacgcagtttcattcttctccggctcccgcagctccttcagcacccgcacgaaattcccggctggctctaaccaattgacataatcttgagggtttatatggagagagctagagccggagagggacagtgaggcttgggtgaagagaaagaagctttttaagagtggaagaaaaaaaaaagaagaagaagaaggagctactcttccttcccccctcccctccccaaagccggtctctcaggagaacttttcccttctgtccagacttgcaaactttttcttcactcaattcctacagatctactttcctccctctcttccccgtgcaaggcccccctcctcaccagcacaagggaatttgagtatcactccgccacagttttagactgcaccggcaacctgcgagggagtgacgctcagttatttgggggagggaaacttccagactagttgactgagcaccatgagtccaaccgggaagcttttctattcgttcatttgcaccttccgttgatactacttttctaggctcagttccaatctcattggtgtgcgtaccaaagccaattacaaatagatctaaactgggactatttttttagcggatggatctcagaggggccgtgctttttattgttactcattagaaacaaattttggtcggtgctccctgggctgctggtcttctttaccttccagctgctcacagaacagagagtttctacatacaagcagaagatgtgaaaatattgggaataaataaagtatatgcttataaacaagtaagaaaataagtatatgtgcgtgaatactttatgtgtgttatatacgtataagatctg

SEQ ID NO: 44314 - DNA, 2300 bp, Homo sapien
tccagctctaaccatgttgctccaacatagatgtagctgtggttcagtttattaaaaatgctcctagctagctctagtgcttagaatgaaaatgcatgttccagtattaacattgatttcctttcccctactactgcatagggacttcctggtgaccgagggcctcctggacctccagggatacgtggtcctccagtaagtacctaaagtgctttagcatcatttaatgtaaattggtattggtacacagtatcccatgaaccattgtgaaactatttttatgtgtacagggtcccccaggtggtgagaaaggtgagaagggtgagcaaggagagccaggcaaaagagtaagtgatgtaactgctaatattctttgcaaaaaaattctaaatgtgtgtgtgtgtgattttattctttcttcctacatcttccattgtttcaaaatatcactactgacattataatgttgatgtctaaaaagtctacttaatatagtccaagccaggaataaagcttgttatattctttaactttatgcttcctaactaacaaatgtatgttgttgccctatcatttctttgtatcctatagggtaaaccaggcaaagatggagaaaatggccaaccaggaattcctgtaagtagctaaggttctttccccctgcaaaactggagacatttatgtgttggtataacataaggtggcagagaagcagtatgacaaaaattgtggggtctggaaatagtttaaatgaattgaaattatccagtctttgtcttttgaatataattttcaatttttaaaaaattttgtgagtacatagtaggtgtatatatttatttatgaggtacatgagatgttttgatacatgtatgtaatgtgaaataaggacatcacagagaatggggtattcatcccctcaagcatttatcctttgcattacaaacaatccagttacaccaaatataaatttgaggttcctctattttttaaagtcagatttattgagatataatttacataaagtaaaaggaactatttttagtttacagttctgtgtttgacaaacacatacagttgtgtcaccaccaccataatcaagaacacttccatcaccttcaaaagttccctcatgctcttttttagttatcccctccctattcccctatcccaacccccttataacgactgatcttttgtcaatctctttaattttgcctattcccaaatgtcagatacattggatcatattgtatgtagcctttcgaatcaggatcctttcacataacataatacattgaattgtgtatcagttcatttttttattgctgagtagtatttgatagtttgaatataccatggtttgtttgtccatttacacattgaaggatattttggttatttctgtgttttggccattatgaataaaacttttatattcatataaaaatatttatatgaatataaatattcccatacagtttttttgtgtgtgtgtgaacatgttttttcagtaaaagttttgacaggtaattcttctacttactaccaaaaaggggcatgggaaataaaatatgtaagtccaagaacattatttcaagcagcttcagtatcaagagtatccgcagtaggcaagagtttttcaaagacagagagaatatttgatgaaatttgtaagttattctaagggaaaaggataattcttaacaagacaggttagaattactaaattcagataaattggtttcaggatattttactaaacaggcaatcctcaacttacaatctctagttcaaaaatattttatattataaaatatcaagaggtaaattcagggcctcagttcctggcttcttttggaacaattggtctttgtcttgattcaggcagctgtgatattcaacaattgcctcttagtgttttcaacaaattggggttgcggggtggggaggctgttctcttgttctctgtttgcactgggagaacccaagttgggtcaaataaaggcagccttgcaaatagccttcttttgaaccagcagacagatcaaataatgataattctctggatatggggctttgaaggagctccaaccctgttctttcctctccaattgctgctaggctgctggttttcaccttgattgtgaggagaggtggtgtgaatagagcaagttaaaatgccacaaagctctgagaggtggtgggaatagagcaagttaaaatgccataaatctctgagaggtggtaggaatagagcaagttaaaatgccacaaagctctgagttctcaccaagatt

SEQ ID NO: 44315 - DNA, 2300 bp, Homo sapien
gcagtcacagtcagggatctctcagcatccacactcgttctgcctctagctcccttccgaaaccacggctgcttccagcacctgtgaatatattgcacttataaaccattggcagcagagggaatgttattgaatatttgtaatatctgggggacaacccaaaccaatttctttttctcttaaattatagcatcaaaaaggagccatttattcaaatacgtgtgttctgtttctaacagagcaaattcttaagagggcagaaatatggtttatttttatgatatacatattgcctagtttactgttggattttataaatagtaccctttgccatatcaaccctagagcaagggtgaactgacattccattctttcagagagaaatgctgtatttctctcctcctctccctccattcctctttgcaaacctggtcactcctttgataattcacgacccatctccaccattaagagtctaaaatcctagtcaagtaataactggggtggtgggggagagagggagagggagagggaaagggagaaggagagggagagagagagagagacttgaggaggttgcacttacactccggcagtttttccagaaatgagggaggcagtagttcttacttttgtgatgtcaacttgtagactgaaatgcatcaaagctcctcttcttcttcttgttgacgcgagggatgtgaaatgtgctctagaatatgcattcagcgtggtcctttgttctaggtatgagcttttctttttctaaagtttttcggtctcgctcaaggaaaggaaagcaatattttgagattcttttaaaggcaccttccaaagcatttcccacagaaaaataccttcacagcccaacactggttatttcagtaagaatcgagtccaattttttccaatatggctgtatacattgcaggcccccaaatttgtgctttcatagtcatcgttaatcaaataggcagaaacactgtatttagggaacctgtgtttcgtgggctagaagtgcattctgattaataaagatcatgttcattttgaatgcatcgctgttattcgtgtgcctcagagtcgcgggcttctgtcaggggtgcagcgggctcgggagtgcctgcagagcggtgggaagcagttctgagcgccctggtcgtcaacccgttttcagggggtgccgacactttctcccaagaagctcgatccgccgccttgtgcggctggaaagaatgaaccagactgtgacaggaacagagaatttatgtgattgacagggagtaccagggcacccgactccatcccgggtcaccacggctctgggatttgcacgagtttaccaccaccattaacagctatttgcgtaaggttgtttaccgcctgagagcgccacaagccgacagcgaagccactttgggaccccagccacgccccctctcccctctcccctctcacccctccctcccgccaaactaatgatttcggggctgccttcttgccggaccctcccattggctcctatcccaaccaatcagagccttgcaacagtttcacctggctcccgcttcccaaataaacaaacaaactgtcccgcgactgtgcccgctctgcaccctggcgccgcaggcaggcactgcttgcgctacgccccctcccaccacctcccaccaatggggccccgactgtggcgccctctcccgaccctgatagccggccgctttctcctccgcccctccaggccttctcccgccccctcatgccttcctggactccctgttagaatcagcttggccagagagcccgcctcctcctctcggtcctcccttggcccacaggcctggagattgaccgggaggatttggcacagccggaggtggctccgcctcccgagcccgccgtctcctcccttgctcacctctactggtggccgctcgcgcccctccattgcgccggtagcaggatccgcagcggccgccgcgtgaggctgtggtcacgtgttgttttgcccgctgtcgtgcgctcagagtggagtgggcgggggcgcgggccaaggcaggagggggctggggcgggcagacgagggtagacagcctcttcccccaaccctccctttcctgaattccccctcctcctcgctcaccttaaaaccatcgtgcatcaccatggcgagttgctccttcactcgcgaccaagcgacaagaagactaagaggtgcagcagcggcggcagcggcagctctagcagcagtggtgaccaccccgcttctttcctcgggaaccccgaccgcactcattggg

SEQ ID NO: 44316 - DNA, 2300 bp, Homo sapien
tcatgatcatgtatgtaagaaaagaagcagatgaatttttgttatcactgacaagtcaattcaaacaattgctttcttaaaacaggactcacaggaaattccttttaaaagcacacatcattaaaggcatatttcttcattagttggaattggttttaaaggtattgtggctatttatccatttacattagtttatagccataaaatgccagttacaatgcttgtgttttttatcccttgagttgaattggcaaactaaaacaagaactatcttttaagtcttattatttattatctgttgttttaaaaatctgtatttcagaccctttgtgcagattccaaactttacagttgtaataactgaatatgcaaggcaactttagccttctgggataaactgtcctaaaataaaaacaaaaacgaaaaaaaataagagacaggaatctataaccaagagagggtagagcattaaagccaccactgagtgagttcaagccaaataaaaattctctacattttgcctaaaccatctagatatctgttttactttgcctatgagaatctgacctaaactaaatgactattctatatcattaagttgtccaggaaaatgaaaatttaaatgtatgtcagacaagctctagcatctggtacaattcagtaatgatggtctgctctacagagcttcagtgttgagacaactttaggactgagaaggtttggttgacctgtaggaagaaaataatgttctagtcagacattctcccagtttacaagtactcatgcttgccagattaggaaagatacaaagtaaaattcttctgtgaagcatctcactatagctctaattccacttcgctgcagccaaataatataccctgggtacaaagtgatcagcactgttcatctttcactgtaatagtttagaaattattttcacacttctttttttaacacattgattaatgctagatatttccccttaaaatagaaaatgtctcataaagtattatttcagagtgataaataaaatttaactaatttagatgctctcataatttgttgacaaaagaagaaacctatttctccttttaaaagagcatataagctgaaatatatgagatcttttaaaagaagtttaaaagtgaccatggtgacacttgtatcaacagctccctttcaaactgtgctacaaatcacatcatgcccaatttacatatctttcaaaatagaagaaaatcaagttaaatgtgatttttaaagtcaacagactggggaaaaaaaacttgcaacaaataccacaaagttttaatgtatttattacataaacaagttacacataagaagaaaatactaagaatacaatagacaacacaaaggacataggaaataatataatgtcagtgaatatatataaatgtttaatctcactagttaaaaaaaaaaagcacattgaaagaatagtggaggccaggtgcagtagctcaggcctgtaatcccagcactttgggaggctgaggcaggtggatcacaaggtcaggagttcgagactagcctggccaacatggtgaaaacccttctctactaaaaatacaaaaaatagctgggcatggtggcgggcacttgtaatcccagctacttgggaggctgaggcaggagaattgcttgaacccgggagaccgaggttgcagggagctgagatcacgtcactgcactccagcctcggtgacaggatgagactccatctcaaaaaaaaaaaaaaaaagaatagtggaataccgtttcacccatcttatctctaattttttaaaaataagaatgtccaatgctgacaatcagtctggtgacagggtaaactaatataatatttttgaaaaataatgtattaaatattcatatcttttagcctactaattccagtgctcagtttttacccaatgggaattttaaaaggctgtaggtagaagatattcattgacatgttatttataatactgaaaaaaatgaaaacaacctaaatgccccaaagcagatgattaattacattaatattcatcgattgtgttggataatatgttgtattttaaatgatatttatgctgatgcataataatatggggaaatattgtataatgttcagtgaaaagaacaggatgcaaaattatataaattgtaagcctactgctctatgtaaaaactatatgtacaggaaaaaggacatgaggatttaaaaatctccagtattttcccatttcatttaatattcattttgatattttcaatgtcatgttattactcaa

SEQ ID NO: 44317 - DNA, 2300 bp, Homo sapien
gccttaattgtccctttattgatgatagaacaggatgagattccttaggacttctcaccctttctcctcatcccaaggagaatttaaagcagagattctgaacctggggcacatggaattcccaaaagtgtttataaggtgacccataaatttgtaaggaaaatatttacatttcattttcactaatctctaattgaaatataacatttcctttaattaggaacgtaggcaataaactgcagtggaattaaccatatgtgtaatttgtttccagtaataatcatagatatttgtgtattatagtttttatagatattttggaatataatttatattcatcagaattttgaaattatagcatttattagacttgtccttgtatcttatttaatgcattaacaaatacatgtattaatcataagtgtgtttttatagaattttaaactttatttcaatgtaattggggtacaacagcatgagtagttccactgaacctctctccaattaaaatggtgaaaatatatataaaagtaacaaaaattatttaaagcatctggaaatggtcataagggcaaacagataatgaagaaaaatgtattcaagaaaatctgtggaaaatttcaaaaaaagtcgtgctatttgaaccaagactgctctctccctctgccctctaaatttagcaaagggagattccactccagactactgcagccaaggatgcagaggtctctttccctgtagctcccagcctgagtgcttactttccaagaagagtagcatgtcactttttctcatcctgcctcagctgcctgttgctgatgctgagtcctgggcagtgtgcaaagagatggtggctgccttcttctatccagctcacacttgtagaacagaggctctattttgaacatggcattctgagaatactggacccttgatggcccttgcactgattcatgaggtgatgattccacaagaaaagaggcaagccaagagaacgtcagttactactacctcctccactgaacactgagcactcaacttctagagtggggtgtcactcaaaaagaagcttaccactgttcccaccttaagctcaggagcccatgctcagagatttttctggggaggggggagaagcagatcacaaaatatatagctcctaatttctttccaaacgaagcaacttcctttacgacatagagaagtttaaacctaaaaacaaggaggttgtagagaagggaattgggaggagatttgtggatctgatgttgatacagcctacactgtaggtcacctagttttaaggaaacatctggggaataagatagctgggagcaaccatcatggggtgagaacaaatatcaaacactgacctcagaaatcattctgattagagtatttgtagagaaatctctgcccctgggacatttttataaataacagagcaatcaacaggcaattaatggagcataacaactgggtatggtcaggaaaagaaccggagagccttacctaacactgatcacagtgtgactttgaggatacacaaatctctgcctccctaaggagaaatatcaaagatttaatacagtggaggcagaaaacagactccactaaactctttaagggagggtagtaacaagagttgctacaatatcttacataaaatgtttagtttccaataaaaaattatgaggcatgcaaagaagtagcaaaatatgacccatgtgccagaaaaaaggaggcaagacaaactgcctataagagtaactacaggttgaatgaacaggaaaatgtttcaaagtagtcattataaatatatttacagaactaagggaaagcttaatttaaaaagtaaaggaagatgtgatgacatattacatccaaataaagaatatcaataaagaaataaaaattttcaagaagaatgaagttgaaattctggagttgaaagtagaataacaaagataaaaataaattttaataatgggctcaacaatagatttgagctgtcaaaataaagaatttgaaaacttcaaaatttacaatagatcaacagagataatgcaagccaaataatagagaagagtggaggaaaataaacaaaacttcagagaaacatgagatacaatgaagcacaccaacatacacataaaaggaatgccagaagaggagtagagagagaaagaaacagaaaatatttgaagaaataatggctgaaaacttctcaaatttattaaaatgtaataacctacacatttgatgatctcaaagtaggataaatgccaaaagacccacaa

SEQ ID NO: 44318 - DNA, 2300 bp, Homo sapien
ctttagaaattttatttatgtgctaattcccagctacttctacctataaatttagaatcttatgtctattcaggattttggaacattccttgaatgatggtcccttgaacatcctagtcctcatcagaaccttctcataaaatccatactggggttgctcatggcaccatgcagcactacatagagaatgctaactggggccctcacttgcaccagtatttccatcaggtcacctgaaattctacaattagggattgtttcctttgggtagtcacggtgtgtttctggagactctattagagtgcaagcagtctttggagggatagcacaagggtgcattagtggaatatatcaaggataaacgtgagctttcttggagccaaatagtcttgcgtttaaattttctggctctattacttactagaattagagtgtctgagttcaaattctgtctctactgaccagtggctgtgtgatttttggtaagttactgtaacctctctggatgtctgggaattcaaatagtatctatctcgtggggtcactgtgaagatctaaggagacagggcttccaaaaatgcctgtcacatcattggcactcagtaagtatgattattgcctaatttatctcagtcttggcatcctcatttacaaaatggaaagaatgggtaatatccaccttcatggttgttgtgaacataaagatgtacatataagtataatgtacatataaaatgcctgtcatacttaaataaaaaactgatagatagtaacaagtgttggtaagaatgtaggcaaaaaagaaccctcatatgttgctggtgggaatgccaaatggtgcatatactttggaaaacagtttgccaattcaaaaaatgttaaacatagagttattatatgacccagcaattccctgggtatatgccaaagagaaataaaaacaatatgtccatataaaaacttttacacaaaagtaataaaagcagtattcataatagcccaaggtggaaacaacctaaatttccatcaactgatcatgtggtatacccaaaaaagtggaatattatttggccacaaaagaaatgaagtactggtacaggctagaacgtgcatgaaccttgaaaacggtttgtttttcaaacaaagtgtgtttggttttttgttcttgcgatagtttactgagaatgatgatttccaatttcatccatgtccttctttcattcaaacaaagaagccactcgcaaaagatcacatgttgtatgattccatttatatgaaatgttcagaataggaaaatccatagagaaagtaaattagtggtggcctggggctaggaggaggagagaaatggggagtgacttttaaacaagaatggaatttctttgtgggaataatgaaaatgttgcacaagcttgtgaatatactttaaaaaaaccctaaattatatacttttgtggtagataaattatatctcaataaaactattattaaaaaacatttctcatttaatataagtcatttttagcccttaacacctcagttctcacgttgggaatccagaacagggccctgagtgaatgatgcccaggacagagagggacttcttaaggaaaaggaatacatctaaagtatggggaaacaatgtctctgtacaaaggtgtagagggaagtagggagtctctcttgggaggaaaggcagtgaaggcacttaaggggaataggagaaggagacaaaattcacctgctttgaattttgcagggagccagcctggatcaccttttatattctgggctggaatcacagctgatgaatgttttggcatttagaactgtcctggagaaagggcgattggtggttattagacagaatggaacaaggaagaacacagaggcaaaatctgagagtttgtgtctgactttgaaaggtaaaagaaggcagtagtctgtggaggacgtatttatccagaggactctatttgtttgttaatctctgggtcattgcatttaggtcagcactaactctgctacaggtgggatcaatttaaaggattagaagtgtcactctaaatcctaatccaagtcttggtctgcggatgctgaagagtgattttcaaaacatttactaacgctttcaattatttaccccattaatggaatttgtcaacagactggagtccttgacaggattgtgaatgcatagaggatgcaaagaaatggacacactgaggtagctatgccagtggtctgcatgcgcaggcagtaaactgaagacatttgagcggtgaattacttggtgagta

SEQ ID NO: 44319 - DNA, 2300 bp, Homo sapien
tcatatgttatctaatctggacccgcctcatactctcaaataagtggctgcctaatttcctctgccatgggtaggaaaataatgctcctcaagcaggaactatatgacaggcactgactcatttaattcctaaagcaatgctgtgaaatatgtactaatatcatttccattttacagatcgggagtatgagtcatggaatggtaattttgccaaggtcacaaaactagtcagtagcatgattaggatttgagcccagactggtgccaacaacaatgtgctcaatcaaaatgctatgctgtgttccaagaaaagctctttcacacccttcctagtcattcttcccaagttttatacatttgcagttatctagtgaagagcaactccgtgtcttattcactttgtttccatttgcatccctccccctccatccaacatagttttcatatctttaaattcactgctctgacaaccagagcccatcattggtttctatattatcagtttacccagtctcctacctttgtagcacaatgtagcaatttccactttgtagcacaaaattctgtgcaaaaattcagtgcaaaactgagctcccctccacctctaactcagctgtccctttccagtacttcaaccctcccatatttttcaacactatttcccacaccaatagccattctcatagccattaaagagctcacaacagttggggttcaggggacatgaaatgagggaagacttcatagggaagatcgcacctgttctggtccctgaagggcaggtagaaatggagggaacattccaaaataagaatatataagtaaatgcatgaatagccaagtgtctaaaagcagactttgggatttgaaagtttgggactgaaatcccaggtccactagctgtatcatcttaaccaatttacttaacttctttaaacttaagtttaaatttttaaaaatctagataataatgtctgcctttctgggggttgtgaggattgaatgaaatcatataaaacacaatctctcaatcaagaaaaacaatcaccaatgaagtagtaaacatcagtcattcttggcaaacagtagtagttaactttgccagtgttggtgaatttgggagaatagcctgggaaaataaattcagatcagaccaaggtaggtatttaaagattatgagaatttggaagaaaatagacaatagagttatcaaagtttgtgtgggaggagagaatgagagggggaatgagagggggaaagagagagaagtgggggtgagagagggaggagagaatgagatggggaaagtgagagaagtgtgggggagaaagggagggagagagccaagaagagcgagggagaaaaacgaagagggttagccggacgtggtggctggcgcctgcagtcccagctactctcctcgggaggctgaggcaagggaattacttgaacccgggcggcggaggttggcagcgagccaacatcatgccactgcactccagcctgggccacagagtgagactctgtctctaaaaaaaagaagaagaggaggaggaggaggaggaggggaggggaggggaagagggagaagggttgctatagggaatggtcagaactaagcaagttacttagtatttctttgtaactcaatgttatgtttattgtctagcactctcattacactttgagcctcacaaggattcgaaacatgcctattttattcaccactctatatacagagccttgcacaatctttggcacatagtgaatacttgataaatatttattgaatgaattatgatgaggaggagagcggaaccaaaaaaataaagattccgagaattcaagataggtgactgggagaatataaaagtttggaagtgcggaggaaataatgagtttaaattttggacgtacaagtttgagaagcctatagtgcagtcacgttcatgtttagcaaaattattatgtgtaattggagctcagataaggggtgggggcttgggataggttgttgagattcattagcatacgagtagcaatttagatcaccctgaagaagggaggctttaaaaggggggatgcaccggaagtgacgccagtcagaggttaacggaaaacggaagctggctggctgagaagaagcttccgttagtcctaccttgaagagaaaagagccagataaagagaaagattaaaagtatgagaaaatacagaagccactggtctcagggagacagagaaggataccaaagaagaagtaactattatgaggggccacacaccagccactcaaggta

SEQ ID NO: 44320 - DNA, 2300 bp, Homo sapien
actttgccagtgttggtgaatttgggagaatagcctgggaaaataaattcagatcagaccaaggtaggtatttaaagattatgagaatttggaagaaaatagacaatagagttatcaaagtttgtgtgggaggagagaatgagagggggaatgagagggggaaagagagagaagtgggggtgagagagggaggagagaatgagatggggaaagtgagagaagtgtgggggagaaagggagggagagagccaagaagagcgagggagaaaaacgaagagggttagccggacgtggtggctggcgcctgcagtcccagctactctcctcgggaggctgaggcaagggaattacttgaacccgggcggcggaggttggcagcgagccaacatcatgccactgcactccagcctgggccacagagtgagactctgtctctaaaaaaaagaagaagaggaggaggaggaggaggaggggaggggaggggaagagggagaagggttgctatagggaatggtcagaactaagcaagttacttagtatttctttgtaactcaatgttatgtttattgtctagcactctcattacactttgagcctcacaaggattcgaaacatgcctattttattcaccactctatatacagagccttgcacaatctttggcacatagtgaatacttgataaatatttattgaatgaattatgatgaggaggagagcggaaccaaaaaaataaagattccgagaattcaagataggtgactgggagaatataaaagtttggaagtgcggaggaaataatgagtttaaattttggacgtacaagtttgagaagcctatagtgcagtcacgttcatgtttagcaaaattattatgtgtaattggagctcagataaggggtgggggcttgggataggttgttgagattcattagcatacgagtagcaatttagatcaccctgaagaagggaggctttaaaaggggggatgcaccggaagtgacgccagtcagaggttaacggaaaacggaagctggctggctgagaagaagcttccgttagtcctaccttgaagagaaaagagccagataaagagaaagattaaaagtatgagaaaatacagaagccactggtctcagggagacagagaaggataccaaagaagaagtaactattatgaggggccacacaccagccactcaaggtaaaactacgacatctaattaatttgccatttaaatcagaagtcattggcggctttgggatgagaggtttttaaggggtgttggggagcaaagccacattgccatgacagttatattgcttgagtttgaatctcaactagtttgtgaccgtaggcagattttacagtcttagctgtaaaatgaagatgataaaataatagcaattacctcagcattgttataataagtgaatatatgtaaaactgattagaaaagcaccttacatatagtcagcactcgacattttagttattgttagaataccttgcagaataaatagcccttaaaagatggtgaatagcactgtaaacttaatttttgttggtgtccgtgagacattttaaaatgccagaatggagaaaccagatgaacttttcctgttcaatgtggctgggttaaaatgaaatagtaattttaggcatactgccaaaacgtagtaattcagtgaggatgatccttccagaacgttccagaatgctaaattgttcactagtcacgcacgcctttccccaagctctgcccacttatcctataggctacggaatagtaggtctcctcgcatttctaattggtcttcagagggctttggctccgcctcctggggcaaaaaagtccctgtaattgaacactttcatttttgcttgtccccaggcttgtcgttagaaaagtaggggactttcctgttgagtatcatgtttacaaaagcaaagtggcttttaaattttaaactaagtatcaaacaagtagataaggtggatgggagggatcttcaggaactgaagggaagtggaacttaaggttggaacatcggtgtgcttttaacgacggaccgagctacttccgggagagaatgggagggtggaaaattttgtgcgtttggcgggtttcgctctcttcataagtattgatcattccgcagccctgcggaccggacacgtgaggaggtagtgacgccgacactgccagaacacactgctacaaggtcccagatggccacgtctctggtgagtgcctgggccgtggcaggacggctgggcgccggactccagtggctgaga

SEQ ID NO: 44321 - DNA, 2300 bp, Homo sapien
ggctgttgaaattagaaaacaagtttaaatgattatttgtatgttacagtaaaggggtttcttcctcctttcctctcaaaaaaaaaaaaaaaaaccctagctatttctaggtatatgttaacacagcagtcctcaacctttttggcaccagagactggttttgtggaagacaatttttttcatggacactggggaggggtggatagtttcaggatgaaactgtttcacttcagatcatcaggcattagattctcataaagagcatgcaattgtagatccatggcatgcgcagttcacaatacggtttgagctcttctgagactctaatgccactgctgatctgacaggaggtgtagctcaggcgataatgctcacttgccctctgctcacctctttctgtgcggctggttcctaacaggccaaggtccagcagcctgggaggttggggactcctgttttaacagataagagaagtctttttagctcaacagtcatatcactaggttagcagtgctttgaaaattctctggctgtgtcctctggcattcatcctgccaagttgctttaacaattctttcctgaggccctctgaggtgagaatattgaggcaaggtgattagaagggagccagtgtcagggtcatgtggaatgtctctgaggcctgtttagaggctgtgaagcaaggctctgtttgagaccctggatacagtttggtgccaacctcacctgaacacacagaaggctacagcccctgggtggatggtgggctgaagaacggttggggaagaggcatcggaaaaccttccttttttaacccatggcacctatagattgaatggtccctggactgaacggtcttgaacaggcagcattattttcaaggtgtgcctaaggtcatacacttttcttgctttctgctctcatttggcaactatggacaaccagacctagccagcactacctcattttttctaccccaccatctacaaaccaacccttttcctttgtgaagctcagtctgtttccaatttaacatatctggcctgatctttgtcttggtgccttgttttcccctaaaaaaagacagcctttgagaaaaaaatggctgccctaaaagccattagggcctagacctgttaccaagtctagagaggcacacagctgtttgctggcctaactgggagtagggtgagcatattctctagaactggcacttttcagatcccgagatatccacagagtgtagtcaaagggccttttaaaatgtgcatgctactcttattggaagaacttggtttcacttctgggaagatggcttacttacccatgggaaacaggctcccattatgaatagtacattcatgtgctaagatgtgttgacttttcaaaaagtgtcataggacatcagagcaggggtgcttccaagaaggtgtaatatcacttatatcaccagaaaccattttggataaccagggagttctactctgccttggccttctagcaggtgcctgagcactcagtcaccaaattcagcctgagcatcttctgaataagatgctctcctccgacaaggtgggaggggggtgaaaaggggggcggggggaaaaggaaaggaatgaggactagaaagataggcctgggtccctgtatatgggagtaacttccataaaatgtggacaaggggtctctgctgcggaaaggcgtctgccctctcccttgagcgccccaaggcagagctgccttagggggccaaatgctgtatctgggccaaagcctggcctgcagggcaggtggccagaacttggaaggaattctcttccgcagcccagggtccaggcttggccccagcaagctgccctgccagcgtctgctgcctggggcctcgcgcattccgagcccccgccccctccgcccgtctcccagcctcgcccccactcttgtccccttctcctccccccaccagctgtcccctttccctggagcagcgagacagccagagcctgggaagaggcggccgcgggccggagggggcgtggtggggaaggggaggaggggcgggagtgagggaataaggaggccccgccgtcggcgcccccagccactgcgcgctcgccggagagctgggtgctaccgctgtttccgctgctgagccctgcccgccggccggcccgctcgctagctcgcttcccctcgcccagggggaaaggtcagcagcgtcctggagccgccgtgtcactccccgaaagccatgaactgcagcgagagccagcggctgcgaacccttctgagccgcctgttgc

SEQ ID NO: 44322 - DNA, 2300 bp, Homo sapien
ataataccctatcttcctaactaataaacaacgttgcaaatgttctctttaaaatgtcagacagctgcttgggaaatattttgctcctgggcagtaatttctggaaggtttctgatgacaagaaattaagcaaggtttgttttgactccgaaaaaggaaagctggaaatagcgtggttatacttggtttcctttttggaggtatagttcttctttcctcttcaacttgggtgcagttaaatgtggaagaaggtgagatgtggtaggtgatgaagacagccagaactgtacacactaatgaatagcttaagtaataagagatcttgaaaatccaagtagtttcttggtctgataaacatatctatatgtatatcatacacacatttgtataccaaaaaacggatagtttcaggctatagtgatttctttcctttatatcttgtagagctggaggaacttcagtaagctgaagactctgttcagaggaaattacctaattgaaaatgtctgggctaagagaccgacaataaaggaaactggcaaaagtactctttaattacaagttctttttcatcttcatccagcacactgatttatgtgctacactgggtttgtattatatctatattttaattccacaactagacactaactttattgagaacagcgatattcatttcttcaatttcatttgtgttaacccaactgtaggtgatagtgctctgtacatcatagttacccagtgaattacgtacctgacatatgattgcttatttctggtattaaaacaagatttcataaaataaacatgacaattaaactcgttgtttgaagtactgaactttgtaggtcaatcttgaaaaaggaagctacatgactgtcttagcaatatttataggtatattatatgtaagtgggtgggtttcttggaaattgaattggtaatatggctttagagtagtaacacaaaaactatagctctgtgctctcagctaaccacttttagtgtcacctgggctgcttattaaaaattcaaatttcttatccctacccagatcagaatcaaaatacctgggggttgtagctccaggtacctacatttcaacaagcaccccagataattgtgatgcacactgaagaactactctagcttgtaatctcaggtggtaaggcattttatatatacatatatatatacacacacacaagcacaaatggtaattctatgggaaaatggaaatcagcaagtgaagtgaaatgtcaattaccatcaggaacaggaagctagttcaccattacgcatcagggaactggaagaattcttgagatttatttttttgggtgatatattcttggcagtttatcaggcctcatttgcaattatggtctgtcccttttgaagccctcagatagttcgctggcattttaattttaatagcaatttcttgcatctgttggaacagcattcgtatgaccggcttataagcaatgatcagggctagtaagatgtcacaaagctgcggtgacttttccttatcagttgggggtttttttgccatgataccatcgtggaaatgaaagacaacgtgaaaatcctgcgtccttgtgatatttcatcagtgggagtgagcggggatcttaacgcagtaagaggcaagataaacggatgagaggcattagttcaggcttacaggagcaagatgcttttagtcaaagtgttcaagatagctctcttaaagaggagcagtgaaacccaaaaatgagtgtcttttgagggcagctggaagatgacccgaggggaacttttatcctggggtggagtcctgcgaagcaagccgcaggtgagggcgtgggccaattctgcgcctcactgctgttaggcgcaaggacatcccgaaacacactcaacgacaccagcagcgagactgacagaagcggatcgccagcgggagcaacaacttgaggcgagccgttagccgcctcgccttcctcgcagcgcccctcccgcgccccgggaagcccgttcggctccgccttttcgactgacgtcccgggcgagcgggggcgggcgcgtgggtgggccgagccgtctgcagccagcgattcggctggctctgccacaccaccgcgcgcccccgctccgcccgcccctccgggcgcgtcttttccgggctcgcgctgagtcccgcctccgccggctgtccgggtgcgcgcgcgccgctgcggctttttctctggcctccgccgcgcgctcctcctcgtcccagcgctagcgggcacgcggttcctttttgcgagctt

SEQ ID NO: 44323 - DNA, 2300 bp, Homo sapien
tcctaattcttgcttccttgaagatagcaacttgaggttttgggatgctgtattccattgctaggtgctccccagctttgtccttaatgttccttggttatgttgctgaggatttaacaaaacacttaaggagaatgaactagtgagcctctgaatcaagccttgtttgttgttgtttattaattggcacttgtattactggaaagtggtctggatgcagaccccaagagagggttcttggacctctagcaagaattcggggcaagaaagaatttggagtaaagtcaaagcaagtctattaagaaagtaaaggaataaagaatggctactccataggcagagtagcagcttgggctgctcaactgataattcttatggttatttcttgattatatgctaaacaaggggtggattattcatgagttttctgggaaaggggtgggcaattctcagaactgagggttcctccccctttcagaccatatagggtaacttctggacgctggtgggagtgacttttagcatgctaatgcgttataatttgcatataatgagcagtggggacgaccagaggtaactgtcatcacctttttggttttagtggggtttggccggcttctttactgcatcctgttttatcagcaaggtctttgtgacctataatcttgtgccgacctcctatctcatcccgtgacttggaatgcctaactttttgggaatgcagctcagtaggtctcagcgtcattttatccaggccctgttcaagatggagtcgctctggttctaacgcctctgacacttggagaacatcaggcctatggtagatgttgtacaaaacttggagtcagacaaggctacctggctgtacttgttcggaaaaccagacttggaaaaaacgggagggcgatggcctgataatacagtagattgcattttatgttttgagcctggcttgcagccaacatccaaaagtgtttcctaggcaaggtgcctaactgtgtttttctggatattcttctaactcatcgtgagtcttcaataaatattaaataaacatgaggaaggtcctgagaaggtccttttactgacccttgtctcaagaaaagcaaatagccgatcggtaaaaagcagcaggtaggaagaggggattttatttccgtcagttgcccttatccaggttttgggcttagtgctgctcctccacactcatatagtcctggctggcttttccacgcataggttaggaagcaactgctctggggagggggaaggggggaagagggggagggaaagaggtcacgggaagcctcccttcctcccactggcctaccattgaaggcctgtcaggagaaaggagagaagtgggagagggagagggtgtggcaggggtggtctgtgtggcaagaggtagagagaaaatagtggatcagagcaggagggggaggagcagggaaatgaagctcctgtcctaggcactgaagtgtggagtggggctgtggctagaaaggggagagaagatgcctttctggccttgcatgagtcgtggcagaaaggaggaatcgcgaagaggagccggccatacccagcacacaccccgaagccaagctgctcattactagaaaggcttattcccccacaagaagttagtgcgggccagctaagtgcctactatgtgtgcagtatagaaagaagtgccctggagaaccaggtcgcgggaggcggagccagtcaacagggcttcaccgagggggcgaattctgtacacggttgtgaaggagggtggctgtgcacgcgtgcaggctccgagtgcagaagacgaggcaggccagggaggaggcggaaggaggcggagcctgagccggaggagggaggaggagggaggaggaggagggagagccgaagccgcggagggtgggaggtgtgaatggtggacgggtgaggggagtgccagaggcagaaaagggaaggaggcgaggaggagtagtcgtggcccgagggcgtgtggtggggcgagagctgaactggacgggaggagggaggcagtggcggtggcagcggggagggggaggagagagggaggggaagaaggaggaagcgagcgcggctgctgcagggggaggaagacggggaggaggagccgtgcgccgcggcggcggccgccaggggaaccgagcgcccggcgcggagagcgcgggagcggagcagtagcccgatccggggccgcgggccgagctgccggtgagtgaagccccgaggggcgcggcggccggtccccggggctgggcgggaggcgcgggagg

SEQ ID NO: 44324 - DNA, 2300 bp, Homo sapien
catatagggtaacttctggacgctggtgggagtgacttttagcatgctaatgcgttataatttgcatataatgagcagtggggacgaccagaggtaactgtcatcacctttttggttttagtggggtttggccggcttctttactgcatcctgttttatcagcaaggtctttgtgacctataatcttgtgccgacctcctatctcatcccgtgacttggaatgcctaactttttgggaatgcagctcagtaggtctcagcgtcattttatccaggccctgttcaagatggagtcgctctggttctaacgcctctgacacttggagaacatcaggcctatggtagatgttgtacaaaacttggagtcagacaaggctacctggctgtacttgttcggaaaaccagacttggaaaaaacgggagggcgatggcctgataatacagtagattgcattttatgttttgagcctggcttgcagccaacatccaaaagtgtttcctaggcaaggtgcctaactgtgtttttctggatattcttctaactcatcgtgagtcttcaataaatattaaataaacatgaggaaggtcctgagaaggtccttttactgacccttgtctcaagaaaagcaaatagccgatcggtaaaaagcagcaggtaggaagaggggattttatttccgtcagttgcccttatccaggttttgggcttagtgctgctcctccacactcatatagtcctggctggcttttccacgcataggttaggaagcaactgctctggggagggggaaggggggaagagggggagggaaagaggtcacgggaagcctcccttcctcccactggcctaccattgaaggcctgtcaggagaaaggagagaagtgggagagggagagggtgtggcaggggtggtctgtgtggcaagaggtagagagaaaatagtggatcagagcaggagggggaggagcagggaaatgaagctcctgtcctaggcactgaagtgtggagtggggctgtggctagaaaggggagagaagatgcctttctggccttgcatgagtcgtggcagaaaggaggaatcgcgaagaggagccggccatacccagcacacaccccgaagccaagctgctcattactagaaaggcttattcccccacaagaagttagtgcgggccagctaagtgcctactatgtgtgcagtatagaaagaagtgccctggagaaccaggtcgcgggaggcggagccagtcaacagggcttcaccgagggggcgaattctgtacacggttgtgaaggagggtggctgtgcacgcgtgcaggctccgagtgcagaagacgaggcaggccagggaggaggcggaaggaggcggagcctgagccggaggagggaggaggagggaggaggaggagggagagccgaagccgcggagggtgggaggtgtgaatggtggacgggtgaggggagtgccagaggcagaaaagggaaggaggcgaggaggagtagtcgtggcccgagggcgtgtggtggggcgagagctgaactggacgggaggagggaggcagtggcggtggcagcggggagggggaggagagagggaggggaagaaggaggaagcgagcgcggctgctgcagggggaggaagacggggaggaggagccgtgcgccgcggcggcggccgccaggggaaccgagcgcccggcgcggagagcgcgggagcggagcagtagcccgatccggggccgcgggccgagctgccggtgagtgaagccccgaggggcgcggcggccggtccccggggctgggcgggaggcgcgggaggttgcggcgccggggaggagggaggggggccggctttagtccaggggccggctttagtccagcccccggctggcccggcctcccgccttccctctggcttcctccctccgctgcctgcgcgaggggggcaggtcccgggcgggccgcgggctgggggtggtgctgcccggagggcgggcgtctagggccggagggtggagctgggggttcgggggtgtacccgggggcgggaggctggacaaggacggctctaaattggctggaggggcccgtcggcggcgaagttgctagctgggggcagagacggccacgcggttgcaggagtaagagatccctctgtggcgagtgcgtgagacgaggagtccggcgtccctgccatccccgtcgccctccccgcctgctcggccccgctagctcctctccttgcctccgcgtgtcccctagctctgaccccttttggctcccggttcgctgccgcagc

SEQ ID NO: 44325 - DNA, 2300 bp, Homo sapien
tcctagctctgttactttctaggtgtgtgatgttgggcaaattacttctgaggtttaatagcctcatctgttaatgagtaacctcagagcattgttgtgaagataaaacgagatagtatcttattctgaaggattatggggtaggacgaggtatggtattggagacctaaaaagtgttcaatacatactataatagctatttatctgattatgtgcatgtatctgacttaattcataaactcttttagagcgggaggcatacttcctgagtacgccctggatttcaacagaagtatagtgttgtgcacatagtatggtgcagaggctcaatattactgaatgaataaattgttttgtttttattccctgagtggaatgaacagcccccagctatctgcaagatcccacgcatgtagaaaaaaggtgacaaaaatcaatctgcagtttttaaatatgcagatacctgactttatctagatgttttagcatggtgtagatacaatgcaaataacttacgctttctatttctatcacgttcatttctacgaattttaacatttgattattgtcattatttttattattaagctgcacttaggcacccagaaagggactgactcatatgtctcctcatccatccaagcatttaattgagaaattttaaaaatgaatattaagagctaattatatacttgaacaaaatctttcaatttgtgactaagtacattaccttccctatttatctctaagatctgagcactacagataatattcctaattgctttgtacccaagccaagaaataaaaaccaaaaccagaaaagtccaccactgcaagtcccaaagcacaattagtatctttgaaccagtgaagtattagttaggactttatttttggcttttaaatgtttaaacggggcaaggagggtaagttgggggaacaagtacaagatacatagattcagtcggacttgaatatttctccataaggaaaggaaagagtaccctggtgtgtgcttaggctggaattaaaaagacagcagcgtggccatttcctggattgctttgtacacactttacaggggcggtctcaggtatggagctctgggcacctgctcgctcacactccaacagttcagaaacccgtgtatttgaggccgggtggctcaggttccacgtaactgggcttaagtgtcattaatactgcttgcggcggggggttactgagctgtgctttgggacctggatgcttacttcggactttctcctttcttcccccctacccccactagtttccctttccctccttccttcccgggcgtgcccaccttctccctttgctcccactttccgctgtctgactcttgtttccttcaccttcctttctaatcggcttcctgtcttccaacctctgccggccggagagattgagattggggctggggctggggctgcggctcagaagaggcacgagtcgggcgggacaggcgcgaggcgcccagccgcgaaagcgaggagcgcgcaccgaggcgggggcgcgcgcggggcagccgcgtggctaggcagacggggccgggagcggcgcgcgcgcgccccgccagcctctggcgcgcccccggcggcctgagccgcagcgtgctcgcccccgccgccagctcgcctcacttatgggtcggaaacgctgcgtgggggagactgttccaagatggcggcgggttgctgcggggtgaagaagcagaaactgtccagttcgcccccctctggctcgggtggcggtggtggcgcctcctcctcctcccactgcagcggagagagccagtgccgagctggggagctgggactaggaggcgccggtacgcggctcaacgggctgggaggtctaaccggaggaggtagcggcagcggctgtaccctctctcccccccagggctgcggcggcggcggcggggggatcgccctgtcgccacctccgagctgcggagtggggaccctactttctaccccggccgccgccacctcttcctcaccctcctcatcgtccgccgcctcgtcctcatcgccgggctcccggaagatggtggtgtcagcagagatgtgctgcttttgcttcgatgtgctctactgtcacctgtatggataccagcagccccggaccccccgattcaccaacgagccctagtgagtaccgtgccctccgccgccctctcccttgcgctcgggatggggctcagagttgaggcaaagtgcgagtccgcctcccggccggcggatgcccctgccctctcgctgcccgggtccccg

SEQ ID NO: 44326 - DNA, 2300 bp, Homo sapien
ctagtttcaaaaaaattaaaaggtagcctgtggtagttaaggacaaagtacaaaacaaaacaccctaacgtacaaaacaccctaacataccagttgttgtggtgctttttaaaaaaaccaatctgctttctcttctgtaacatagacaaaatattaatgcatttttttactccactagtaattgacaaagaattgttatttgtttcatacttaaggttaattctaacagtgatgaagtttgagaggatgaaattacatatcaccgaccaattaaactatcccttttgtctttaggctgcatctaaccattccagattttcatctatctatctcataaaatctttttggaaggagatttttcatctttccttggtaacatatttcagtgtctctcaatctttccataaaaactaagttcttatttctgtttaacctcggttccacctgctggagtgtaatgtcactatcttttgtccatccttagccttgttatcatatattgttagtgagaggcaatgtagtataatggcatggtttttggaatcagacatgccagcattccaatcctagctctgttactttctaggtgtgtgatgttgggcaaattacttctgaggtttaatagcctcatctgttaatgagtaacctcagagcattgttgtgaagataaaacgagatagtatcttattctgaaggattatggggtaggacgaggtatggtattggagacctaaaaagtgttcaatacatactataatagctatttatctgattatgtgcatgtatctgacttaattcataaactcttttagagcgggaggcatacttcctgagtacgccctggatttcaacagaagtatagtgttgtgcacatagtatggtgcagaggctcaatattactgaatgaataaattgttttgtttttattccctgagtggaatgaacagcccccagctatctgcaagatcccacgcatgtagaaaaaaggtgacaaaaatcaatctgcagtttttaaatatgcagatacctgactttatctagatgttttagcatggtgtagatacaatgcaaataacttacgctttctatttctatcacgttcatttctacgaattttaacatttgattattgtcattatttttattattaagctgcacttaggcacccagaaagggactgactcatatgtctcctcatccatccaagcatttaattgagaaattttaaaaatgaatattaagagctaattatatacttgaacaaaatctttcaatttgtgactaagtacattaccttccctatttatctctaagatctgagcactacagataatattcctaattgctttgtacccaagccaagaaataaaaaccaaaaccagaaaagtccaccactgcaagtcccaaagcacaattagtatctttgaaccagtgaagtattagttaggactttatttttggcttttaaatgtttaaacggggcaaggagggtaagttgggggaacaagtacaagatacatagattcagtcggacttgaatatttctccataaggaaaggaaagagtaccctggtgtgtgcttaggctggaattaaaaagacagcagcgtggccatttcctggattgctttgtacacactttacaggggcggtctcaggtatggagctctgggcacctgctcgctcacactccaacagttcagaaacccgtgtatttgaggccgggtggctcaggttccacgtaactgggcttaagtgtcattaatactgcttgcggcggggggttactgagctgtgctttgggacctggatgcttacttcggactttctcctttcttcccccctacccccactagtttccctttccctccttccttcccgggcgtgcccaccttctccctttgctcccactttccgctgtctgactcttgtttccttcaccttcctttctaatcggcttcctgtcttccaacctctgccggccggagagattgagattggggctggggctggggctgcggctcagaagaggcacgagtcgggcgggacaggcgcgaggcgcccagccgcgaaagcgaggagcgcgcaccgaggcgggggcgcgcgcggggcagccgcgtggctaggcagacggggccgggagcggcgcgcgcgcgccccgccagcctctggcgcgcccccggcggcctgagccgcagcgtgctcgcccccgccgccagctcgcctcacttatgggtcggaaacgctgcgtgggggagactgttccaagatggcggcgggttgctgcggggtgaagaagca

SEQ ID NO: 44327 - DNA, 2300 bp, Homo sapien
ccaattttcggtttttgggggagagctgggtttcctccacagctaggcgctgggtggcgaagggcttttggactgtcactacttttcattcgacagagacttcaggatagcccccttcaaaggcagtctgtttggggtcatcaggaacagacagagtgctcttccctaccgcactcatcccacctagtgccatctatccttacccactctgaatccctcctctcggcaggcactgcctcattccccagagccaggcctagacaatggcggctgctcagcttggagggagggggagtgaagaggcagcaggcccaacctgccagcttgaaagcttcatttgacaggggaggaggcacatctggtttgggttttcaattcaattcaacaatgatttattgtgggtctgccagctgcagaggttctgggctaggctaggcagcaagagatgcaaagataagtaaaatattgtctgtgcccttaaaggagttttctaggttgtaggggtgtgcagacgcaaatgagcattttttttttatgcgataagccctgtgcttagcagtttaccttgcctacattattatgtctttgcatcttcccagcaggttttgtgatggaggtgggtaaactattatcacttcattttatacacatgaggaaacagagcctcagagtggaagagactggcccaaggtcacatttttaagaatggaccaaaccagttctggaactattacattcttctgctccccagaggtgatgaagatgatgatgatgacaaaaaacacttactgagctctggaggccaagtcttgtgctatgcaggctgcagatattattttactggcaacttccaacatcccattgaggctgatgttgttatccctttttctagaagagaaaacggaggtagccttgggaagtgatggagttggaatttgaaaccaggtcattccagtccaccagcctgtaccataaaagaggtagacacagggtgccatgttcaggggcaagagcaatgaattgtgcctgcaaaagcttcatgccagagatggcatttacatttggccttgaagggtgagatggggttatgattggtagagttgggagagagggcatcccagtcagaagggatattctgagcaaagaacccaaagagatgacttgtggagcattttgattgagaggctgtaggttcatccggcatgcaggccggggactctgggtgtagaggaacaatgtgaaggaaaccagagatacgcctgatggtctaacacatttttgtcaagttgaggttcttatttttttaattaagagcaggtactctgccccaaaggcttttcaaatgatactatcttgcaacccatgagcaaacacactcgagtctctcactgtgtaaattctactgtgctgagagctgcggtgaatacaaaagaaaacaactcaattcctcaagtgtgtgccgatggcccccgtgtggttgaggaggcaagatacacacaatcaggaaaagcagcagctagcataggcagttagtgatcagggccaaatgagtttttccagccgtcagatttcaaggaacatgaacgagaggaaggccggcaagcttaaggccgggtggggcaatcagtgtagctagcattaagggctctggccaggcctcccttccccaaactgccacggtctccaaccatgtcttgacctcccagagtttgttagggaagatgggaccttatgggatcagagacagcgcatgggagctgggaaacggagccgaatacctgatattcctgatcctccaattttctacacttattctcatttcctggcagctcctccagctgctgaattgtatgtgtatgtgtgagccgtattttaaattaagcagtgagttctttcagctcatcataaacatgctaaaaagcttcagccgcggcctgagcccacccccgccctttacacacacaggcagcagctggggccactcgaccccacactctaatgtgcattgcctatgactcaccaacaaaaacgactgtatgtttcagtctccctgggtagctgattcctagttgtggtgggaaatctcagtccgatttggaaggcaaagggcctcagccccgccctactgactgtgaattctacaacatatggagcgcctaccttgtgcaaggcattgtgggtaagtccattcatctctctgggctttccatttcctcagcttcaaaatgcatgtactaatcctgccggctttacctccctcctagggctctgtgtctcagccacactggtctttcaatttc

SEQ ID NO: 44328 - DNA, 2300 bp, Homo sapien
aggaaatttcagatagaaagctggatttctggcttttctgaaacacacacacacacacacacacacacacacacacacacacagagagagagagagagagagagagagaaagacttcgatccaaattccaatatagcaacaatcagccagagctcaacaacctgctccctgtaggtgaggcacgtgctcaccagtttgcctcagtacccataaggccacctttactttttcagcgacctgctcagtccctgtaggcatttaaagcctcaatttaaccccatgggttaggcagagaaggtggataagagctgaactgtgtgggttggaatcccagcattgctcctaactggctttgggaccctgggcaagtgatttaacttctgaatctcagttttctcatctatgaaatggggatgataataataatactgcttacctcacaggcttattgggccacttaaatgagttaatgtatacttagaacaatgcctggtacattacatgcacgaaataagtattaacttccttcattgtccacaatttcctatgtgcctctctgatatcccaaagcttctgaaaactgaaattctgtggcaagctcatttggtggcaaaactgggcctgaattgacatgaggctattcatttatcccatttagaaatattagtgagtttgatcactgggtattatcttggatctcattaaggtgtgatatatatgttatatctaccacattgcttttctaaaatccaaatattttgaactgtaaaacatgtctagctccaacagtttcagataagggattgtggacctgtattattattagtttgtatacccacttgacagatgggaaaactgagctactaagcattgagctacttgccaaaattcccacaactgaaagtggaaactatttagactcctagacatgaagctcatagtgcctagtactgtgggatgtcttgggctcgccataggcatgtggatgcaggtagtggctaccaatcagggacctttgaagaactgaaaaatgtcaccacttactgagagtgccaaaccctgccctttatagcattctttcaactctctgagttactctttacaacatttgggttagaattagaatgaagattattgtcttcagtttacagaagaggaaactgaggtccagagaagagaagtgacttgcccaaattcatacagcaaaagacaggcagagctggaattggaaaccaaattctgggctttttcttcttaaaccccagggccagtccaagaatgacatatgctgacctttccacatactgaaccacactctctgcagacaatcctaaggtttttgacatacctgatgaaaggagagtgtcccaagatctcagcaaatataaaaatgagacagcatgtctgggtggacctcgtcctttccaggaccacaggcagcaatgtacagacatgatccagttagaagctagggagggaagatttctcaaatcccaagaaaatcacagagaccctactgtttgctcttctctgttgatttttaagaagctgacatttacttatgccaaaggccaaaagaaatgaaaaatctactgaaaagggaatttcatcagacatggagcaataacctaaagaaacctttgcatagtatcagttcctttgtttgaaatgcagaaaacagggcactgctatttcatattgttagcgcatcagagacctgggcatgaaaacagcatccttaggacctctttccaaacccctgcctcaccacagaggagctctctgacactgccaccaacttcagcaagttggaaacaagaaggcaggccgtgacccaagtgacctcatgtcactcctaagctcatggcttgagttcctcctaccaacaaatctgcactttgatcacacacccacagcgacccagatctttaaattcagcaattctttctcaggtttcagcaaggcattggcagcctgagctattttgggacactttctctgctgtggatgccacttttggaatacgccaggaacatgctaaggacctggagctctctaccctggacccgttttcgggtttgcttgctctctctctctctctttctctgggctaatcgtttagaggacagtcgctcctgccaacctaatcccatgagcctgactaccttgccgggccacaggctcaaagaagcagtgtggctgccagcaccctcacggtaaggggcacggaggcaccaggcagtctggcaggatgagagacatcctgggggtggtctgagtttggatgtgggctgagaaga

SEQ ID NO: 44329 - DNA, 2300 bp, Homo sapien
ggtgaggccaaaccatatccaaaccatagcagtctgtttctgcaaactcttcttgttgttgacttccaatcttcaatgattagagtcactcttctctccctggtatgaatgggggtgtattagtccattcttgcactgccataaagatatacatgaaactaggtaatttatattcaaaaaaagaggtttaattggcatatggttccacaggctgtacagaaagcatgatggcttctggggaggtctcaggaaacttacaatcatggtagaaggcaaaagagaagcaggcatctcttccatgaccacagcaggaggaacagacagaggagggggggggggctacacacttttaaacaaccagatatcatgagaagtcattcactatcacaagaacagcaaggaggaaatctgtccccaagatccaatcatttcccaccaggcccctcctccaacattggggattacaattcgacatgagatttgggtggggacacaaacccaaaccatattaggggagcacctttctcaaagggaaattcatccccctgcttttaggcagataaggggaaggcagagaactgtttctacatctgttggttctcaatttcctgcaggtcaaaataatccttctgccaaagtgtcacattttggggtgtcatattctgatcttcttcaagggtcaaagcaagaaaggaatgaaagggtggtaacatgtggtaacagacaggacttgtcagtgcttcctgggaatcacagtgggggcagataagtggagactatagggaagaaaaacctgtaaacattttctacatctaggagaccaaattgacaggactgggtgaaattctgatgtggctaagcagagaaagagggccaagctctctggtttgagttatttgcagtttcctcaatggaggtggagcaatactgggatctatagcccaaagttccagaagaaagtgtgctgggtgtaaagagggactacgcgtagctcagcatgagtgttggcaaccagaggccaaaattccatccagggtgtgggtcaagaattgttgtgagttccaggggtgcagcatggaggcatggcttcttatgcatctcacatgacaggataatctctttttcctcaatattttcaatcctttctataggaccctgccccccacccaatattcagatatggccaaagagctcccacctttaagacaaaatggctttcctttgacctcatatccttctccagctccttccttcaccatatctctccagactctgcagtagaacttttctaaacagttgtctttagctgctgtctccaattcctcatctccccacacacttcttacagtccactcccatgtggtttctgttccaatcactacaccaacacttttcttctgtgttgctaacaccaatgtatacttttctgtctctatattatttgacatctcagcaggacatgacacgtttgactactctcttgaagcactctcatattttggcttctgtgatagcacaaatttagctagtattgggtgcttgagggaatttggtttggatcaacatatgtgacaaaactcttactctgatccctatacaaatgcctgtaaaaaaataatgtgagcagcagaccaaaattgaggccacattgaaaccttctgtacccaatggccttctgtacccaatctcttaagtatcttgacctaaagggaggtcagaaaacaatagccattttcagtgccacgacatccatgaatgtccatggtcataaatgaatacttactatgcgccagacactattctaatcactttatatgcaatgactaaattaaaactcactgcaagattgcaggcaaagggaaataatatcactgttattccattttatagttggaaagactgacaaatacggctggtaagtacagagctgggcttaaaaatctaaatagtctgactgcaaagttcacactcttaaccaccatgctatagtataagaatgtcaaggttattgtgaaaccaccgcacccatccatgacttgttaccctgtccaaggtcagcactgaccagagagtcaattacttatgcaacaagactacagatgatttttcaaaattaacttttttattaatttaaaaatccagaaatacagtgactacataaataagtaccataattaggtacatgtcctgtgagaacagtgaaagggtaatactgttatgttactcttacttgtttacatgagttaactagaaaatggctacaactgctaaatgatgcttatggtctttgttgttccaag

SEQ ID NO: 44330 - DNA, 2300 bp, Homo sapien
atctttgcaatagataaagcaggttgttccatcttcttcccatggtcttgacccaggagcacagctgtggtccatctttctcaacaaacctctgccattatatgttaggctagagtttcttgtttgcactatagatatttgtttgggggctgtcctgcgcattgtgggatgttaagcagtatccctggcctctacccattagacaacaagagcaccaaccccaatcctaataaccaaaaatgtctccagacatggccaagttgcctggggagcaaaaatcacccctggtagagaagtggtgcactaggctaattggaaagggaggccttgtactaggcattgagaattctgaacttacacaaagaattttcaagaccagcttcttacctgagaccttttgtaaggactgcacctcttccctcatgcccagctagagcaggaacaatcacttgcaagcctgatccatttaccatttgaacataattttgggctgtcagaattttgagcatgtggaaacataattatcaggtaacatcaggcagtattaagaggctatgaggttctagaataaagacagaccaagtttccagccctgcctctgccacttatgagccactggacaagttacctgacctctgtgatattcattcatcttcctctttttataaatgggataatgatattaccatttcatatggttctgataaggattaaatttacaaatccatttaaatcatttaaaacaatacttagtcttggtaaacattcaagaaatgttaacagctgttattgtcatcattgttgtccttatcattgtggttatcatcatcatcgttattattattaatctattagctctagaacagaattcagtatatagcattaatgaggattcactttagacctcagctgggaggtgtggtttctgatgtgcttcagtgatctcaattcaagattataccacctgcctctgaggagtgtgatacctgaggagcttctgtggtgttgccaaatgcaacactccaaaaaaaattattctagaaagtacacaagaaaaggaaaaggttgggataaggcaattccaatttggataaaagaagcccgcctctttaaatggttagggcatgtattaaatagatcatttggggattgattaactgcctgggatggcctgattttgtcggattcttgacgcgacacatttcgacacgttggagatggacagctaaccattgggagctgaggctttgatgtctgcaacgcagtcaaaatgttaaaatgatcccaatgccaacagctcaagcacaaggcattttctatttctatatcctcttcactactttcttcccccacaacagcctgacaaatacaagtagcccttgctgcaaatgatttatggatggaaaatgtaaatgaaaaatttatttccagactatgtctttgttctagaaatggttgtgagctgtcagagcgaggggtcttgtaattgtaaatcaggcagggacccagtcgccccacccaggcatactacctaatcagctaaattccaaactctagctcgtcctcagaagaattttggctaaaaaggaaatgagaagaatcacttggcccactgggccaaggcagatttatatggaatccaggatccacctgctagggatgcctccttgcccagggctgggtagcagctcaggggacccattgctcattgtgtctttcatgttattggacaggtgattatgaaatcagagtaggttcttggaaaagacatgcagctagagctggggaatggtagaaatgccatggagccaggccagaagaagcctcccacaattaatgggaagctttgaaaattggaggagtggtgatctcagccttagaaaaatatgccaataaactatcaaccaacccagcagaggtgctggtgatgagaaaaggaaagaaaatgttgaatgcattcagcttcttgggaatgcattattcactgcctgggtgagtccctgcatgactgtttcccaaactggcttgatcccagcgacctttgaaagacatttattttttctcattgccttctctttttcagaatgggaatgtgctttgcagccgagtcagatgtccaaatgttcattgcctttctcctgtgcatattcctcatctgtgctgccctcgctgcccaggtaaagcaatttgtctctttctttcctagctgtggttctccatttccctcttcacccaactcaactcatctccataattccccagaagggaaacttccagacagataacaataggaaccttta

SEQ ID NO: 44331 - DNA, 2300 bp, Homo sapien
cactaggttttcggatggtttgttatgcagtaattaggattctacaccaagcaagggagtgagtggttgtagccaaatagatgaacttttaaatcccagtgagtctatttattttaaatgctagaatttatgtttgtctcagactatcccttgaaactcattttccagaatactctgtaagcatgttggaagtaatgatgggagttgggtaatgcacgcacaagagaaattgaacaaccagtccttgcccttgaagaactcacaatctagtaagacaaaacatcactgcattaaacggcatgagaacagttataaggcaacaaatcagcaagttcaaaccgatatacaacagcacaaattgaatgcatgtggcagtgtatggctacccaggcagcaggacggagctagacattttgggccctgaaggcaacattacagaaagggccccctttcctttgttaacagtgaaataaacatcaccagcaatgcaggggctagctggatactattaacacttctgaaaaagcaaaaggaggtaacgttcagggacaattattcttgttttaatttttctttgttttctgttcctgataagtggtttgtttgtttgtttgtttgtttttttgacaagccacagtttctctgaacatcaatttcctcatctacagactggagataacaaccagagagtagtgggttgaaagtcagggaatctggattggaatctcaaatttgtcatttactagctgtgtgaccttagatacatcatcctcttcccccaattcagtttcctcttctgtgaaatgatgaagttaagctgaatggttcagaagttccccaccaactctaacacttgagacctcaggtagttcggttggttttgagggtttaaaaagtaatgttgatgtatgtgaaaacactccgtaagccataaagtactatacagatgttaggaatatagatatttatctagttcatctagaaaaaagctctgcggttcttctccaaatttaggggcttaaaattttgtctgtcgaggcagcactttcctggaccctagaagtttctgacaattctttgcaactatcacttgttgaataaacacaaatttggagtaggcaggcccaccaaggcatcagcagtgctactgtgatttccaggttgagctcttggcccaacttagaagcttagggactcatttaaaaaaaaaatggtgggtatagtgtgtggcaccaagttttcttcaagacacttaacagttagaacaggccctttccatgaggcttgggagcccagtttgtaagagaaagtggatttctaatccctgaccctacacacacccatctccaccccgcctttaaggacaccaaaccaaagctttgtcactctgttagccacagtgtggatatgggaaacgccgtgaaatgataagcagcatgctagggcgtgatttgcgaggagggttcattctgtgtccagggcaccagctcagtaccagaccaggtgcacacctcggaaaggccttggtgccggaggagagcgggtgtgggcttccaggcaggggagtcagagggtagtcggtatcttcagggcgtgcgcgagtggtggggagctcctaggtgcatccagtgcagagggggaggagggaccggaggagctgtgcggtccctttaagaccccaacgctcgcctagccaaaggagtgggggctgcagtgggggcgctgtgtgatgggaaagtagccggctgagtctcacactttctcccgatttttaaactttcgggccgggggagcagaaataaagccattgtgccggggtggagaaagtgtgcgtgcttgcagcggctgcgtgcttgcggacttcccgccagcgccgagcggccggcttctcgggccaagtggggagcgagcgggagggcgggcaggtggccccgggccgccgcgcccgcgccttggctctgcccccgggagccgagcaagccgctgctccctcgtggtgtgagggcggtgatgtttttcctcccacccacttttgagttccccctcccccctcgcgcgcactctagctctcgccacaacctgccagccccagacctcggacgagagcgccccggggagctcggagcgcgtgcacgcgtggcagacggagaaggccagtgcccaggttagtgagcagtgcccggcgcccgcttccctcacctccttttccagcctttgcacaggtgggttgccttctcttggccggagccgtccctggaagtttccccagggtgccccaaattcccctgccaccccaacct

SEQ ID NO: 44332 - DNA, 2300 bp, Homo sapien
gatatcaatatgcatgtggagcatcaacttgcacagcacaaaggatagtcttcatagggaaggaatgtggaaaggactgcagccctcgagccacacctgcagcacagtgtcaccttcaaacacacatgatagtcacagatagatacacagagactgggagggagggtgtagccagtttttgttgatcttcagctgcatcaaagataatgtagttttgccagctcagcagttcgctagagacatgccagctactcggcttggtgctgtggaaggtgaagtccctgcacctcggggaaactgccacccaggattatagaacttccaaattgggagggagcttagagattatctactccattatccacctctaccactccttggtaatggcatccctgactggcactttctcagcttcagcattacagggccatagtgagagtgagctcagtttcttttaggacagcttggaggtgggagggagaagggaacttacacacaggtaactaccattacaaaaagtagtataagtgttagagccaatgctgtaagaacacagagccaggaggaatacattttagctgtgggagatcagggatgacttcatggaggagatgtcctttgagctgggcaagatttcagcaagcagacacagtggagtaggaggggttatttccaaagaagacaatatcatgaaaaacacttgaaggaatgaaaatccagaacaaatttcacaaaactatttaggcaggctaggttgagaggacacattctgcaacgagactgcttagcttaaaatactgactctgcaacttactggccacttgactttgggcaaattattgaacatctcttggcctctgttttcctacctgtaaaatgaaaataatacaacatacctgtgctatatcatattgggttgggagaaagagtaaatgagataatgctatgaactagctaacacagtgtctggcatatagcaagtgctccaggacagtttggcaagctttcttcatatataacaggaaatttgtttggagcactggcaatagaactgagagtagtggaggtaatctttgatactaggttgtggagagagcttagagtgccaaactaagaatttggggcttttattctgaaggcaggggatatgcgtagtaggaggatgaatgggaacagcggcaagggatagagagagttaagaagccactcgatcttacttaaggcagtgacaagttacctgaaaggaacaggacgagaatcaggttcagaggagagatatttgtgtgagtgtatgtctgaactatactgtcacatataaacctgactttgggttaacagcctgaaatgtacacatgtgtctattaaataattggagaataaaaattaatggttggagagaatattcgtcatttgttctattgtgaaagacaatcctttgttagctcgagtgaagctatgtgaaatattatatcctatgaaaacacttcctaaagttggcctttttgtaagaaaatttgggatatgtgcaattcacacatacttgatcaatttaagcacattctgttttactggcaggcaccaaaatctgtaataagacaaggagtcctccagtgaaagagatgattagagattgcaatagcagtgcacactgagctccaattaaggaatttcctaatggttgtctaggaatacaagtgccctccatttgggctttggtgataactagagtattctttagttgttaatcagagtgaacacaattcaaaatgttctcgactcgtgggtcagagggaatgatctcatttggcacattattgagtttctgagaagaggaaagatactaacagctcacaaatattttgttattgactaactgcaaagatgcatctgttaaagcaatccatctgagttggctagttctctcgaatattaaagaatatcaatatatactaaaagcaagtcaatttgtcaagcatttacaaagcaactttgaagccaaatgataccttttctgccttcccttctcttctagaagatactcacaaacacatacaaatctggactaaattccctctaacagaccctttgtaaagaaagctcactttctttggctgcagtgacacagatgtttgggtgggagggggtgcggagggtggcggaagcatgctggttcaatgcttgagaaacagtgctgcacccaacagactgaatgtcatgaattctttgtcagctccccctcagaccctccaggctttccctttgtctgctaagggatggaaacagaacagatacattgaagc

SEQ ID NO: 44333 - DNA, 2300 bp, Homo sapien
agtctgtttcttttaaagcaagtatgtattttaacaaaaccagtaataccacatttaattcttagcagtagtaaactgtatcatattagaaaaagcatggactttggactcatttcgatacaaatcccagctctaccactttctacaatgttaatgtaatactcatatatgcattaatatatatattttgaatttaggaaaataaaatgcaaactgacccttaaaaatggtctggattacatcgtttacttagtctttgcctccctctttcttgttttggcatagagtggatcattgttgttgtttttctcaattccctgtatcatcacaatttaaaatgaatcagtccaaaagaggcatcccattcttcaactgcctgagatgttttgtctggcgaatctgtagctctttttttttttttttttttttttttggagacggagttttgctcttgttgcccagactggagtgcagtggcgcaatctcggctcactgcaacctccacctcctgggttcaagtgattctcctgtctcagcctcccaagtagctgggattacaggcgcatgccaccatgcccagttaatttttgtatttttagtagagacggggtttcatcatattggtcagactggtcttgaactcctgacctcaggtgatccgcccgcctgggcttcccaaagtgctgggattacaggtgtgagccaccgcgtgtggtcatctgtagctcttttgtacgacttttactaaaaggacctgggcagatatattagttcactcttgttcttgaaacctattttgttggcattatggagaaattattgctggatgttacacagtgtggagaaaattgaataaaagttcactgggaagggtcatgatctattttggccatttaagtatgtgaggatatatttatctttatgaaaataaatttgaaagtagaaagaaaaagttactcataatactactagtttaacccaacggttacaattttatgtcctcttctgatcgttttctgtaggcatattttacatcattataatttgaatgtccttattgttttgtattatttgactttttatggcagcttactgtcgccttgctgggattcaccataatttacataatctagccaaatcatggggagtatggattttggagtagcaagagattatttttggagttagattttataaagctttggccatctgcaaaaatttgaaccgtatcctaaagacaagagaaagctttgaaggtttaagggaaaggatggacagagagaatcgcatttaagctccatttgaagtagagttatttttattttttgtataattccttgctttttggaatgtgtgtgcttcatatgcagaaaagtagtttcccgatctagactgccatctctttgaattccactgccacatctgtctctcttagttttctgtgtattttagagattccgtcagtttaacctgcctggctgacaggtggtgtcccaaatcgaaaccgttttttcccccgaataaagtgtgcccgtgtagctgtacagatttcgtcccctgaaaattcatctgaaatctcaattctcctgaggggagcaattaaggaagatacatgaactctcccctcctctccatcctgtcaggtgcccctcttttttgatggccccacctctgtctagacaaccctgacagtgtagaagtttccatctcctttccctttccctctccatgttccctccccttcagttttttccccctcccaggcgcttcctgcctggaaacaaaagattggtccccagtagcccactcagggcgattttagttttatgctcaccatctgattggcctaggtaaggtgcagagctcgggtgacgtaatagcagagaagggctagggagcggttgccgagcaggggctctaccgcgggcgggcagctgtgccagctaaccgtctgggatctcgcactgggggctgcagcttttccccgcctcgagccagtgtgcgggggcgggagaagagccagggggagcgggctgggcccggggctgcggctgcggccgcggggctgcggctccccagccccgccagctggagcgctcggaggtagaggaaaggtcttgacggggtggctggatccgtggcaggtaaatcccgcgactaactgcacccgggctaccgcgggggagggggtggctgttggatgatgctttaaggctgctgggcagatgttctgcctttccggacccccctcctgtcctgtttgtgccccagcctcgagtctcctacgtggctccccggag

SEQ ID NO: 44334 - DNA, 2300 bp, Homo sapien
agaatggcatgaacctgggaggtggagcttgcagtgagccgagattgcgccactgcactccagcctgggccacagggtgagactccatctgaaaaaaaaaaaaaaaaaaaaaaaaagaataatgaaattcagagcaaataagctcctaaaacccagactggatcttacagctagctacctctgtcacctccctttttccttcttccaagacgtaaaatgtggcagggagtaaggttatggtgtctcctcgggaactggccctccaacatttgcccacctttatcttctgcctgcttgggagaatatggaacattgtttaccctaacagcacactccaactctgttgaaactgccagatctatgggatggtttctcggttaattatcataaaaacaggagagtgcattttgtgactgaggtacacacatgtaagaaataaacaccaaggacatctcgatgttaaagcagctaacaagtcattgttatgggccattaaaaatcaacagccaaacctgtgtcaattccaaactctgaggaggctgatcacctgaccactacaatcatcaggatagaattttaaaataagattgtaaattgttcactaaaacactgttagtggggaggagaaaatagagtttcaatgtgggaaaagcaaagggacttacatatttttataatatttgaaaagccattaattactgccttcactttccttttttgaaaattgcatcagggtttttgggaggtaacttccttccctccagaagagaaacccctaaaaacgatcctcacacaaaacctgagaaaacatgagagcaatgcttttgtttctaagatgttagaatccacatatttattaggtttttagacctcttctccctcaactccttttttttccctccttttctttaggagctgtgaaattagttgtaactgaaaatgtctgacggtctggataatgaagagaaacccccggctcctccactgaggatgaatagtaacaaccgggattcttcagcactcaaccacagctccaaaccacttcccatggcccctgaagagaagaataagaaagccaggcttcgctctatcttcccaggaggaggggataaaagtaaagtatcagtggccgggcattgaaaatgggctagtttattctttcattttcactttctttcttaggtagttgtttcttgaggattgactgttcagggcctgccggccctttacatctacgtcttcagaggttgcattttgtcagagaataatgtttgattgatttactgtgggctgacagaaaatacatttacactatgtttgcttttcacataaaattaaattcatagtgttaagccaagggtaatcatagcaacagtactgtcttgaatatatcaacagtgactttctttctgataatgtagagtagaatttacaataatccctccctaactataagttgttctttttggaaatttgggtataggtaggtttacttctgtatacctttttgataactgaaaattttgaattcagtatatgagaatcagtccacgttgccacaatattgtctctctgactatattgtaagtgggaaggcatttctgagtcatttgtttccattatcattcttcaacctgttttcccctagacagccccatgtgtactgagtagcacaccaatatattataatttatccttctggtgtttgtaataccatttggtgcttaaatgtcatatgctaatgctttgtgacgtgcagggatatgaaatctctagtaagtaactttcaggttacattaattagcataaagctgaaacatggcttctacagatatgaagcaagtacaagggcactgacaccatagaaacttgtcagaagggcaagaagggtgatgtctttagaagagaaacaggacattctcaatctacttcttcaaggtaaaataaatagctttgtaggtcacttatatagtgttaatcaatctacaattcataccacaaagaaagctgaaactattagtatggccagtactgccacttgtacacctgcataacttaaaagatgctttgttcttcatgacccaaggatggaaaagatggaaatgaagttaaatctctggattgaagataaactgaagaataatgaaccacattccatgcaagagatttgtgactatgcaagaggaattttcagagacatgtctttagacactgaaatgaatccagaaaaaaatttgttgggagtaagggatggtttgaggaatttagggtgtaccataatgtggagaccaggtcttatt

SEQ ID NO: 44335 - DNA, 2300 bp, Homo sapien
gcaggaaagatggaagaaaagacagtcaaatggggtgggggttctttacctttcaaatgaatagaaacttcttataagcctttttcctactccctcagattatgtaatttatttgtaagcctgaatcgcagcccaaacagggcagcaatgttgaagtgaccataaagtggtcacttccaccgtgaagcgaaagagccagtagtgaatcccctcattttgtgcattcactttgaagaaaaaggtttctcaaagatgcacactccctcttcatagtgttgtgtttgtttttaagttagagagtagtccctcttgcattcaaacctccttcaaaactccttacccaatgtgatgtttttcacttgcattgtcattagatgtccagaaaaaaaaaagatgtcaaaatgtttttctaaaaaaagaaagcaaaaaaagcaaggcaaaaaaaaaaaaaaaaacaaacaaaaacaaaaacaaaacaaaaacaagcaaacaaaaaataccagagcaagtactgtgtgaacatgtggaagtccatgccctaatagagttgcaattttttattcttcttctatagtggtggcttggtttgtgtacctatttttctgcatttgtattggaaaaggtttcttttaagacattttccaaaagtggagaggaatatgtgtgttcaggaagggctttcaaaaaactgtatatctaaataaagctcaaacggtgaaatcctgtcacattttcacaatgatgcttaaaagataattgagtaaaccaggttgttaatctccttaatacctgaaagaggacacactgaaactgaaactgtgacatcctgctaggtgagttcaggttctgaacctaggaaatcctcataggagaaaccacatttaaacaaagatgggactttctctgagagccaaaaccagataaatgtagaatactgaaatccttgttggacattaagtaaacaaagataatgatacctaaattaatcctctcttgtgcttatgaaacatatgcactgtaaaataggcataccaggaggaaatagatacattaatcatcatttacttatgatacaaattatttattttgacaatttataacgtttaaaaaagttttttaaagatctagagaaaggtgatatagtaaacattcaactctgtaagaaatgggaggtcagtgaaggctacatcccaatcaatatttggctctaagtacctcttcccatttttcctatgtatcacctatttctgtttcggaatatggtgtgttcatgcttagttctttgggcttttgaatatcaaaagcatattcataaatgtcttgaaattctctccagtggaaaataattttaacttacaatcatatcccaagaaatgtcagtccgacagaattccttatatgacttggggaaaataacaaaatttgactactatttcaccatatatctatttattaaaaaattcaacagttggcacttcctgaatcttctgagagtagaaaaatatctgcggagtgtctgtgtagaaaaggatatgcctctcttttgagtgtattgacaattttgtaaattacagaaagttgtttctctaagcctttgaaaaactaacaatttgtgttatagaaggcttcttaatttgcagtataaaagaatctaaacagaacttatgtacattcagccagaaggggaaagagatcagttacataggcctctctccttctttgccaaggtacatccatccatctaaccatccatatatccacatcttaaaatgaaagcactttctttagagtttcagcaaactatatagtgtacgtgtttatgttcaggagatgaccccactggtgtatttcctattttccctattgttttctttgactgtaaaagttgggagaggcttgacctcctccccttgaaaatgtccacagtgggataaaacaacaaatgtgaaaagaaaatgaaacggtaatattaatttgaagcatactatgttatactttgcaaaaacgaatctgggcctgtaatttttaatgccacactgctctaatgagagagagaggccttaattttgatttcatttaaaaataagtactttaaaaaatttttcactcatagtgccgggaaattcaatgaaatcctgggatgcaaataaaaatcagtacattagtgactgtgtcctgccagtggagagagcccaatacctggttaggaagccctattcattagttagcatcccttacatgttgagaaggccttttttttgttgttattttggagaccttggagcagtgacccttcagat

SEQ ID NO: 44336 - DNA, 2300 bp, Homo sapien
aacacaggcaccctgacccaaaaggtgttccgtcaagctgtaatctatccatgtgagctgtacattctgcctctgaaagagtctattgggatcacatgggctttaaaaatcaaacctgattttcctttcaattggtgctacttctgtctgtacacaggccctctttataacagggattccttttgcaggatcttgcctgccttgccatttgaccgagtagtaaggaagacctttgaaggcagaacaggaaatactcatttatccagaatgtccagggactaggaggttctggcaaactaaatattctaattgccccaggcttttccacatttacagtccccaggctctggcaattcaccaaaccttctagggaaagcaagaggcgcagtagtgtttgttgtaagtttgagcacacaagaaaattgggatccatttgtaacagcctccagaaaggagtctgggcaaacattcaggttggctctgatgctgcataactaaaaatttttactgataccatccatgctttcaaatacaatgaagtacactttaatatttaaaacacatgagcagacaaatctgatgaaaaaagggacatcagtattttgcagtgtccccacagctctcaattttaaaagcaattgccaataaataaggctatgaaaaaaatgtggttattctcagcttcttattccttggattcagagaaagggtaagtttgttgtacatacattgcaaataacattgtaataacattgcaaacatttaaattaaaaattgttatggttttcaaatggggaaacttctttaccagtgaggcatttcaatgtgatactgaaaggatataaaatgaactagtagagaggtctgatcaatatttcactttttataaaacagcgactgcctcacagatataccacacagatactccttaaagtgctaacgtattctccttattttttagcagacattctgtagcttagtcaggttttttttgtttcaaccctcctgtgattatagaatatagactttagttatttctaaaatacattttgaaatagttgacaccatgtaaatttcacaatctcattcttatttactgttgaatgccaggagaggatcattaaaatcattacaaatctttgtgaatcaagaaaaagcactgaaaaccctattatcaccccaaagctattgaaaatcaaatttgcctttcaaattatcttcctaaaaaccagttgttaagagcacttgagtgtggggcactctgatagacattgcttgaagagccactatatgaattctctgtttagccatgtaaggtttttgtttttcctcctttttttttttttaaagaaaagaaagcaagagtgtattgccatgggataacaatctatagcccaccaaattagtgtaattgaatttcagagtctgccttttatcacaggcaaaggattatacattagacttttaagaagaaagaccatacaatctttctgtctttccttgtctttggaggccatctgctgagctgtttcttgcagtagtcttcctggccaataataaaaaatgcaaagctctttaaatgacaagacggaagaaattgtgtaaaaagacttgctggaatggaaagaggctgcttttcccctcatgcacaaagtgtgcgactctccagggcaccaaattattctgactacagtaaagtgatttttcccttatcttcaagttgttctctgccttgaactactccctgctggtgtaaatggaagacttctctttaaattataatgaatcacatttaattcacaatctttacttttattattgatttttccccaataagattaaggcccatattgccccatttgacagataaagaaactgagacccaaaatggttaggtgccttacccaaggccccatactaattagttgcggagtgtggacacttctttctttgaaaatggtgacatttcctttaaagccaaactagaagtgcctagctctgggaagaagtcactgggatgacggctgtttgtctaatctcaggtaacccttaaaagacctgagaaattcttccttcaaagacaaaaattttcctcattctaggcatagttcaacactatgggtcctcctctgaagctcttcaaaaaccagaaataccaggaactgaagcaggaatgcatcaaagacagcagacttttctgtgatccaacatttctgcctgagaatgattctcttttctacaaccgactgcttcctggaaaggtggtgtggaaacgtccccaggtaactttctattttaca

SEQ ID NO: 44337 - DNA, 2300 bp, Homo sapien
aaaattgattcttgaagagtgaaaaaaaaatttcttttttacatgaaacagagatatacatacagcaaataaacagatagacagcaaataaacagatagacagcatatctgtggtattaaaatttcacggagagacattgggaaaaatatctaaaaaggctctttaggaccgtgataatgataaaaaaagattgagaaacattactatggagaatatgattttgtatatgaggctcaagataaagaaagatcttaaggagatagattaaaataaacaaggcaatggtttttgagaatgaatacaaagcccagcatccaggtaaaattaaaagtcaattgtacaaacctagaatcaggcacatagtagtagttcatgcaagaaacaacagaggattttgattaagctacgggctgcacactgagtagatttatgctcaaaagacaactagagtggcaaaaagtctgtaaaccatgtcctatgaggcatggtttgaaagaactgaggatatttagcccagaggatgaatgacttggcgtgacatgctagatattttaaagggctgtcatgtgaaagaggaattagaaattgtttgtgtgaagctattttttcctcaacctaaggaagacccttttaacaattaggaaatgatcaaatatggaataagctgttttgcatagggatgagtttctcagactgtcagaaggatatttctgcactgagcaagaggataaacatggcttctaaggttccttccaattcccaggttctgtgattccctgctagatttacaagtatgaaggtggaaaagatggctaaagaatatgagcccagacaaaacatcctccgttgattttaaaaccaaaattccataccagggatatttgcttgaggactatctcactgtctagctgaatggttgccaatatttagaggcctaattgccctggacccctgtttccttgtgccctacctctagctgaatttccatcttggcatagaaggtacagagggagttgtagggaaatgccaagaaggagatctcagagaccagagttatagaaatgctcagaactgttttatgaaaacattggtatgggcccagtgagtggagagagaacatgcttcctgtccttgttgagctctatgttgctcacttgttatccccaaccccccttatctcttacatcttcaactagccagcaggagggttggtgcaggaggaggggtagaaggaagtaatttcaggttcaagggttaacagtacactggtcaggaaagctgaggaatgagatgatgagcatctttacagtttgtgaaaatgaaacaaacaaaacaacttgagaatcatgttcctggaattgtgtccaaatgaatgtctcaggttgaagggaccaggactttgactgtgatgcagtatagtatttatagggatcttgcttggcctttcagagcaaaaacaattattttctctcctctcacctaacacagctgtgcagaatcttcatagcctggttgctagaaattagggttcttatagctgctgtggaataaactccattcactttcctcttaacaatcccttctctctgtctttgaccaaatgttacctgttgtttcacgaagtgaccttttcttcattgcaccccattagctgctctttcactcccagtcacttcctgaagtcctcatcactatcacagatctgcctaccagggccatgtctgaccagggccatgtctgcagcctagcccatattaactttgccaacacttcaccatttttctctgcatgtcctctctctagtaatgtgcatgtctgtgatattaaccctgggacagaaaagtaagaaatctatcagaatcctcgctgaaagtcttatttctccttgaaaccgaaagagctttcaaacgtggcttcctgagtttttcagtttgctggtgggtgggtctggagtgggcatcccgtctgcacatctggtagaggcactttccacattttcctcatgactcaggatcagtttctgactgctgggcggggcaaagcctcctgaagttgctgcgaggcacctccccctgtgagcagagcttggtacagcccaaatagttttcaggttaagaaagccagaatctttgttcagccacactgactgaacagacttttagtggggttacctggctaacagcagcagcggcaacggcagcagcagcagcagcagcagcagcagcagcagcagggctcctgggataactcaggtgagtagagagggaattcgcaaacttaccctggagttttatttcct

SEQ ID NO: 44338 - DNA, 2300 bp, Homo sapien
gcttaaatataaaagttcaacagcactatataaaaggaagggttaattatactaggaatcagatataaaataattactgagcatgctcttagctctgagcttcctggaagccaagcaaaaatagaaccatgatagttcaaggctgctacatattgatgcatgtagcttcaattgtgaagatggtagcatccccctaccccatttaacctctcacctttctcttttgttttatagttcggcctgatctaattagttcaatttggatgcttccttgagttttttttgtaacatattttatataaagaagtcagttagtgacaaataagcagtttgaggagaaatctgttaatatttattttgtagccatcagatttacttcacatagaaaggtctttgggttgggtttgaacttccaaactctcaaaggtaaatgccacattaacctttcattaaccaaattcttacaccaagctgatagatttgggatgtcctttttacttctatcttccataatattctaaaattattttcccttgttttgttcctatcctacttcctcttagtctactttgttgacttcattaaaaaacaaaaaaccagttgttggatacttgagctaaactgccttaaagaatctgcagattttattttattttttttctctcaagagggtaaaaggaagagagctacaatttctaagaagcctggcttggctgtctgagtctggcccccaggcagattaggccaaggttttggccaagtgaaattgccaattttctaaaagaaagggctagcacattgctcattagagcattctgattttgtctgcgcaatctttttgctaccccgcaatttcctgttggttataaatgaaacctttctagctgttaatgcagcctgtgaatttttttaaaagcatgtaattaatcataggaggttggggggattcactaagcctgagttacatgggagaagctggacaaggcactaggacctagaaggcatctatccaccctggcaggaatttcttgcttggagctcagacaacaaaggcatagagagattggttttctttctctcagcatctccacccaaccagcagaaaaccggtgagtggggcttttaagtgattttcaagaagaatgtaacagatgtcaaacgggaaaagcacaaggcaaagcctgctctctctgtctctctgtctcctcttctccttttttgccttattctatccgattttttccctaagcttctacctgggattttcctttggaaaagtgagtttgatgttcctttgttttcactgtgatgttaatttagaataatactacctctgatcctaaagcaaagcaaagccttactggcatgcctggggaaatgtttgctgcttgccttgaggaggtggggtctcttaccactgcaggttgtctgacagagacaatgctgagctcagcataggtcatggtgacattggaaaaaaggcggaattgagcctggcagacccattaggcaccagtctttcttatctcctgtcctcctggtcccttgcaaatatattgatgtggcagtgtgtagcagctgagccctgcttgctttgtgagtccttttatccccatctgtgagatgcatgttaatagtttggctcgtaggatgtcactacatttgctagcatttgtggcttcagttgtattgggtttcatgttttgattgtttggggttcttggtgggggagggggttcaacagaagggagaaaagcaaagcctgacaaatgaccatcttttctcagctaatgcacctgggcaatatacaagtttggggtgaattgcctgctgtgagggtaaatgtcacttcaattaaggtagaaacccagaacaatgaaaggtgtgcttccttctaaaggtcccgtatgctgttcggagagtcatttgtgaatctttcaacaattaaattattccattaagaggtgttgctgcatcagtggggagggggtggagcacctgggggggaaaaaaaaggattttgtgaacaaatggaaccgggggaagacagagctagtaacttgttaaataacttatttttctaatcctttttccccccagcttatttcttatgaatgtcggatagctgcaccagcttggtggggaaagggtttgatgaatagcacaaagacactggctgttccctggaggctgtccctttaaaggagaatcttagtttattctggggggaggggatgcacacattagagtaggaaagagggcttggaataaaatgaaaacactcccccttcatagtcatt

SEQ ID NO: 44339 - DNA, 2300 bp, Homo sapien
acatctgagaccttctctttgccaatggcctgtttcctctgaagaagtgagaaagaaggtcttggtaagtagctgagagttctttgagaagaaatatctttggagatgatctagtccagtttttgcaaaagttttttatccctgcagaacattagtccatgttctggggcgaccaaaaggttctgagctttaaaaataagtggaagccctgtataccaaattgttttctttttgagacacattttatagtttatattaaaggccctgacaagttttatgataagcaaaattatcttcgtttagcgcaacacttttcagacatttttgaccacagaattttttttcctgtttttaaggaacacctattaatgcccacatatctcaaacaaggaaatattgatcctgcctatccctctgctctctattatatataaagcaaacaaagtcatttatcctaggctgtctcataaaaacattttgtagcttccacagtagcattgcaaagcctatattatgaggaattttcctctgaaatacattccaaatggttcgtgtttaagttttattatcccatccattgttgtatcttcaccagaaataaaatgatttttagttctgatgcaaaattaattgctacatatttactgaatgcttatgatgtgcaagaaagaagttttaagacattagctttgttggaatttccatattttcctgcccttattccttgatttttctttgcctctagcctgaataatgttgatttttcatgaggttgccacaaggtaaggcaacaacacatggaagaaaacagggcagacacatgcattcccctgaggtacttgtatagtaaccaagaaatcagcagcaaggtgttggggggacttaactaggtaggttgcacatttgaggctatccactcaactaacagacagttccaggctttgctgagtcaacacctttcacagaagaaagaccatcatatattttatcccacttggtggcagcttacaataaaacacatgcagagaaaatgcttaaatataaaagttcaacagcactatataaaaggaagggttaattatactaggaatcagatataaaataattactgagcatgctcttagctctgagcttcctggaagccaagcaaaaatagaaccatgatagttcaaggctgctacatattgatgcatgtagcttcaattgtgaagatggtagcatccccctaccccatttaacctctcacctttctcttttgttttatagttcggcctgatctaattagttcaatttggatgcttccttgagttttttttgtaacatattttatataaagaagtcagttagtgacaaataagcagtttgaggagaaatctgttaatatttattttgtagccatcagatttacttcacatagaaaggtctttgggttgggtttgaacttccaaactctcaaaggtaaatgccacattaacctttcattaaccaaattcttacaccaagctgatagatttgggatgtcctttttacttctatcttccataatattctaaaattattttcccttgttttgttcctatcctacttcctcttagtctactttgttgacttcattaaaaaacaaaaaaccagttgttggatacttgagctaaactgccttaaagaatctgcagattttattttattttttttctctcaagagggtaaaaggaagagagctacaatttctaagaagcctggcttggctgtctgagtctggcccccaggcagattaggccaaggttttggccaagtgaaattgccaattttctaaaagaaagggctagcacattgctcattagagcattctgattttgtctgcgcaatctttttgctaccccgcaatttcctgttggttataaatgaaacctttctagctgttaatgcagcctgtgaatttttttaaaagcatgtaattaatcataggaggttggggggattcactaagcctgagttacatgggagaagctggacaaggcactaggacctagaaggcatctatccaccctggcaggaatttcttgcttggagctcagacaacaaaggcatagagagattggttttctttctctcagcatctccacccaaccagcagaaaaccggtgagtggggcttttaagtgattttcaagaagaatgtaacagatgtcaaacgggaaaagcacaaggcaaagcctgctctctctgtctctctgtctcctcttctccttttttgccttattctatccgattttttccctaagcttctacctgggattttcc

SEQ ID NO: 44340 - DNA, 2300 bp, Homo sapien
cactaggcttctactcctgtggaaggtggagtggagtcttggcctggcaacagctctgggcaaagaaacattttcacaaatttcccttcccactccctttcacaatctgactcccttttatttcttggagcctcttctggagtatttccattgtaaattttgtatatgatgacctggctttggaattcccaactattgtgggtcattaattatgtcttcctggaaactcgaatttaatattgtgttaaataaggcttattttttctaattatgtaagaaaaggtcaattatccatggtgaaacctctggttagattcacgtagcctcattgtctattgatatctaccaatttgaagcaacagcattaagatttgttgagcatctgtagcgtatgctttagagatattttctcatctaaccccccttttataattttccctcttttataggtgaaaactgagtctcagagaaattaattgaccttcttaaggtaatccagaaaatatagatcaaagctaaggtgaaaacccaggtcaatatgatttcaaagaccctgatctttctgctataccatgatctttgaactttttcatccaaaaatcccgaatggcagagaagagtgaacacgtatccctggggaagtatgggtggcccaaagaggccctaccacaagtgtaaaatttctctaaaatctcatgcttgatcataaaaatgcataaatttgcattctattctgtgtgtttattatcatataaactatgtttaaaattatcacttaaactatctacgttctccttgtccaaatattcaagtaaattcaatcatctaggaaaatacactatgtttatcctgtactttcttgagcatactactgtagtttgagaaacaccagcatattccacagtttgagaaagaaggtactagaatatgctggtaaggcaaggatttcaaggacagcctcaattgattttaaccactggaatgagggaaatggaaagacatagtatgcaagaattgttaaggagaatttgggaataaagtgaaaatcactgcagtaatttcttaaagattggcatgacactataattaatactattgtgattattgataccataataaaaattgtttatgatcatgtgttgttggatgagcaatgcactaatgatggtataatattggagaagtaacattgggacattcagctgttcttaacctggaggccatggagcacagaaattttatccctatttctgaggaaggggaaggtctgtagctttccttagactctcaaaggaatccaagatccacaaagattaagaaacactgctacagagaaaacagcagagattttgggatcacatggccttgttctccagtgctggctctaggcttactaaactacatgatatactttctctctaagtctcaggttccccatttgtaaaatgaggatcataatacccaaatcacagggctgttgtgaggattaaattaagttctttatgttaaatgtttgatatagagtaggcactcaagaaacgttaatctccttcctcctgccacaatatgtaaaagatgataagggcctttgactacaaatggatgaataacttatagtggaatatataccctggctagatatgactacttagaaaatgttctactttaatcttagaaccccaaccagaaactcaggctgatgttacatttccacaaaatatttaaatcaaatgtattaagttggtgcctaaaaaatctttttcaaacctagaaatatacacatgcaaacattctgtttgtaaagatggaattatttaagcactatcacatcctggaatgtttggtttcaattctaagcatatattactgtaagacccaggatgaaaaacctcttgaatttagctagagatttgatcctcttaaatgacatatgaagcagcttttataaagatagggagcctcagctagtcttacagattcatgaggaagcctctaaggggttaaagtagaaagcttatacaaactttgcttctcagcctctcttatctcctccctctccacaccgctgagacagagcagagctgaatcactacctttcccgcatactctaaactgttgcctgcgaaagaggaactggggacttagactaattcaggctgctttcattcaaatgttccagagggcacacacacatccaaacagacttctctttgcttttcagagcttataaggagcaggcatctgaagctgcactctgaagctgtaagtggtaactgacattttaagtaacattttaagta

SEQ ID NO: 44341 - DNA, 2300 bp, Homo sapien
tctaaaagccacttttgatgcacctgtagtcccagctacttgggaggtggaggcggaggcgggagtgctctcggaccaaactgagggtggggctgctatttctcgtgacctaataacaagatgcagataaactgtggaggaagagagtttttatttctgtaactgtttacagggaaaaggcctggatattatcacgaaaccaactcaaaatcacgatgttttccagagcttatataccttctaagctatatgtctacatgtaagtgtgcattcatctaaagacataagtgattaacttcttttaatctataaataaggtctgaatcttgaagatcttcctctggagcctcagtaaatttacttaatctaaatgggtccggcaaggtgcggtggctcacgcctgtaatcccagcactttgggaggccaaggtgggtggatcatgaggtcaggagttcgagaccatcctggctaacatggtgaaaccccgtcgctactaaaaatacaacaaattagccgggcgtggtggtgggtgcctgtattcccagctacttgagaggctgaggcaggagaatggcgtgaacccggaaggcagagcttgcagtgagccgagattgtgtcactgcactccagcctgggtgacagagcgagactccgtctcaaaaaaaaaaaaaaaaaatctaaatgagtccaggtgctggcgtgattacccttatcttgtctcctgctaaatcacagaggtttggggagttccttcggactcccaacaaacttgtttgtggaggcctggggagtttcttcagacccacaataaaacttgtttaatcctaaatgggtaatgttaagacttcctttgttattttgtcatgctttagggcccaggaaaggcctaggcaaaactcttggtgggctttagttacattccagcctttgtataagggcactggctttttttagcttttaatattaacttcaccactcagtactgaaacagttgttatggaggcctccgttagtgagacgtggcctgccacaggaggactgcttgagcccaggagttagaatcaagcctgggcaacagagcaagaccccataccttataagatgccttttatttttagtttttttattttttcgagacggggtctcactgtcgtccaggctgcagtgcagtggtgtgatcatggctcactgcagcctcagccttctgactagctaggaacacaggtgggtgctcccacccccggctaattaaattttttttgtttgtttgagacagggtctcattctgtgtcacccaggctggagtgcaatggcaggatcttgggctcactgaaacctctgtctcctgggctcaagcaattgtcgtgcctcaccctcctgagtagctgggattacaggagcctgccaccacgcccggctaatttttgtatttttaggagagacaggatttcaccatgttgcccaggctggtctggaacttctgacctcaataatatacctgccttggcctcccaaagtgctgggattacatacttgagcgatggcacctggcctaaaaaataatatttttagagacaagggttttgctatgttgcccaggctagtcttaactcctgggctcaagtgattcttcccagtagcttgggattacagccactgtgcctggtaaggcacttttatttttcatatccccttagccaactcgaagtaaaaccatctctcaaatgtatcttgacaaaacctggcagcaaacaaaaaaatctcaaacttgtctgtcattaaaagattgtggtacccacgcaacgacaccaactcaatgcttagggtatgatgttttttttttttacccatcagttttgaaaaagttaattacatttggcaattccccattcccttatagtgaggggtctcaagagctggctcctacacataaagggcttagaacagtggctggtacctaggccaccaatagtcttttgccccacccaaccggtgacacagcccggggccccgccgccccctggcggccattacggatttccgcctccctcacagaaggcagtcactgcaacgtgcgtggcctcagttgcgtcatatccggcccttgcgatcagggcttgaggaacccgcgccatgaagtgcgtgtttgttaccgtagggaccaccagctttgacgacctcattgcgtgtgtgtcggcgcccgacagtctgcaagtgagtgagggaggcgagcaggcggcggcttggctcgccacccgccatctccggccatactgccagccgcgttagccttgcctga

SEQ ID NO: 44342 - DNA, 2300 bp, Homo sapien
aacagcagtgaaattgtacaaactactcttaagttttctaaactaataaaaaattaaacaaggaaactggtgtcaaccaggttttaatagaatacacttgaagtataaggggtgggatacgtgtattgaatgaaagttaagtctgtgttgcagtatcttcatggtgatacctttaacttttaaggcatgttgttccactggctaacttaaaaccagttacccaagtgatgtctgttcctgcctggaatgctatgcccagtcggaaaggaagaggttaccagaaaatgcctgggggttatgtcccggaaataggtttgtatgctaaaggttgttattttgtttttcccttcctgtacctgcttttacttacctgcattgtactattttttaaatgtatgtcatatgtcttgttgtagggtagggtttctcaactttagcattactgataatggaatggatactacttcactgtcgggggtttgtcctgtgcattgtagggtgcttcatagcatccctggcttctatccactagaaacaaaaatgtttccagacattgccaaatattccctagaggagggagaggcacagttgtccctggttgagaaccatggttcttaagggactttgtgtaaacttaagcactcatatttgagagctaaaaagaaaaaaatgatcttgtggagatgagtagaatgatggttaccagaggctcagaagggtattgggggtgggggataaagagggattagttaatgggtacaaaaataggtagtaggattaagatctagtatttggtagcataatagggtgactgtagttaacaattgcatatttcaaaaaaactagaggactggatttggaatgttcccaacataaagaatttgtaaatgtttgaggtgatagatatcccagttaccttgatttgatcattatacattgtatgcttgtatcaaaatagtgcatgtaccccataaatacgtactgttctacacctataaaaattaatttaaaaaacttaagctgacatggatcttaacctgagggggaaaaatatttcttagagacctgagggggaaaaatatttcttagagaactaggaaaatacctcatagaagcagccagggatattaacaggcataatttattagagaatagtaatgtgtgtgattggatgactcggagtttttggggtttttgtttgtttgtttgtttgagacagaatctcgctctttggcccaggccggactgcagtggcgctatctcggctcactgtaagctccacctcccgggttcacgccattctcctgcctcagcctcccaagtagctgggactacaggctcctgccaccgtgcctggctaattttttttgtatttttagtagagatggggtttcaccgtgttagccaagatggtctcgatctcctgacctcgtgatctgcccgcctcggcctcccaaagtgctgggattacaggcgtgttttgtttttttttttttttttttttgagacagtctcactctgtcgcccaggctggagtgcagttgtgcgatcttggctcattgcaacctccacctttcgggctcaagcaattctcctgcctcagccttctgagtagctgggattacaggcgcacgttaccacgcctggctaattcttgcattttcagtagagacggtttcaccatgttaactaggctgtccttgaactcctgacctcaagtgatccacccacctcggccttccaaagtgctgggattacaggcgtgagccaccgtgcctggccatggatgactcagtgttttgatgacctatactaacctgcccatgctggggatagtgccgagatatacccattgatacagaaattacctgctggttttgtccttccaaataaaagatctagtatatccttcaaaaatacaaaaattccctccctatgtttatttggtttgttcctaggggaagcattggaaagtttaaggcagtgtggtggtgacagtacactgggccttttgctttgattatgaagcttatttgctacctctttgtttgcctgaaagttatatcagagatggacataaagcaacagaagaagatgttcaagaaaattcgagggaaagaagtttacatgactatggcttacggcaagggagaccccctcctcccacccaggctgcagcacagtatgcattatgggcacgatcctccaatgcactactcacagacagctggcaatgttatgtctaatgaacattttcatcctcagcatccatctccgagacaaggtcggggatatgggat

SEQ ID NO: 44343 - DNA, 2300 bp, Homo sapien
atagctacaaggtgacaagagctgagattcaagcccccatctgttcaactctaaagcctgtggctcttatccattgtgctagtgtgatttaggatttacttatctagtcaagttcctcttcatttttttttttctcaaatgggtaagtgattccactttatagaaggaagaaccgaagaccaaaaaatataaatgactttctcagaatgacgtggtagtggtggtggtgatgttaggaaaaatctctgttttcatatttttaaaatgaagattatattcatttgttgctgcttttttttttttaaccacatggctattttcctacagctattctgtcgttgtaggctttgcctatcacatctgtccttgccctgtagcatacagattgttttaatctaggcttcaactcatggctgtgcagatcctctcctgattttgtttgtagaatgagaactccattaggttaagggttgtgtctatatgtgcttgccatcatattcccagtctcaggataatatctggcacacagtaggtgattaataaatatttgtgggatgaatgaatgaatgtgttaactttctagttctggtgcccagatcagttcttttgacatactgctatacatagcttaatgtaaagactggttacatcccacagccacaggccctgtctgggcactgtcctgtgaacagagctgcttacctgctttgctctgaatagtacctacaaacttcagttagtccatgcaggactgatacctaagtcactgtgtacttgaaaaggttaataggactgtacaggcctatgtaagtttaacttataacttggtacagatgacaaaaatgattagttgggccaaagtgaactcctaatgtgcaatgaatcaaatgcattttactaggaggtgtatgtatatacaaatacatgctcccaaactaaataatatagccaaggttggaaccaattaccagtctttcatcactaggaatccatgaagctaatagacaagaatgactacctatgctctggtctggatttatcatcctgttgttgggtcattaaccaagtatttcagtatcttatagcaggccaagccagcatatatcagactggctacttcctcacaatggaactgataactaactgtggagagttcataggttctacaaatgctcaaagttcagcttggtgaagcttacactcccgttactgcaattctagtgcattggtgatctctcttctaaaatgccaattgcacattgtgggcaaaacctgtagattcacctcctgtactgtacttaggaatgctatgtttttttgttgttgctgttgttttgtgattttcttttgtttattttattttattttattttattttattttattttattttatttttgagacagaatctcaccctgtcaccaggctggagtgtagtggcacaatctctgctcactgtaacctccacctcccgggttcaagtgattctcctgcctcagcttcccgagtagctgggactacaggcacgcgccaccacacccagctaacttcttgtatttttagtagagatggggtttcaccatgttggcctggatggtttcaatcccttgatctcatgatccacctgcctcggcctcccaaagtgttgggattacaagcgtgagccactgggcctggcccgctatgttttcagtttgttacaaatttgttaccaaatgtcggtgtcctagaagaagttgcacagaccattctgattggcagaaataaaaatatactcccaggtggagtgttacatacatgagtatcccctggtttcttgggggtgtcaattcagggtttgcttgctgttttatactataaatacatctggttgcaaagggactataagcagtctgtttcctgtcgcagtgtggttaaggtaagtaaactgccaattgctcattaagggcaaaagcagtagagtctcctcccctactgaggaatgctatgttctaagtttgttacaaacttgttacaaaatgctggtgtcctggaagcagttgtacagaccattttgattggccgagatagaaatatacttctgggtagggtgttacatacaagagtgttccctggtttcttgagggtgtcaattcaggggttgcttcccgttttatcctataaatacttctggctgcaaagagcctacaagcagtctgtttcctgttgcagtgtggtaaggtaggtaagaagatctctcttctaaactgccaattgcacattatgggcaaaagccgtaaagtcacctgctgctgtactgt

SEQ ID NO: 44344 - DNA, 2300 bp, Homo sapien
aagggttaacatgcacaatctctaaaaagagcattatcaattagtctatgtctctcctactcttataataaactcgggtaaagttcagaggttctatctttcaggctggtttccccgcttcaggcttttcctgagggagtaataaccttgctaaacacttaaccatcaccaggtacatgactgcgatccaaagagcccaggttgtaatagggaaaaagcccttctagtctcattctaagagaccatggagaaagatcagcatctgtgaattcagctcagtacctgcatatgtgggacatgatcatgaccatttgtccgagtcgatgtgtgtctagggagggagggaggtgtccactttgaagcagagatctgactgatgcccctccatttgcatttcttggttcctttaaggaagacaggcaaacaaatctggccatttcttaagtttgaaggatacaagacaaagaaggtaaatggggaccctggttcctgaaccttcatgatccggctcctggctctctatttctgaaggtggcttttgacgaagggcaggtatccttggtccgagggccacactaatcgattttaaggaggcctgggagcaggttccccacggatcttaaaatctacccaagaatggagcaaatcattgtccagggataggacaaagctgtggttcaggaaaatattcccagtgaaaggatgtttttggtcatcgcaggcagcaccttgtcctatcaaccctggagcttctccccattgcatttcctcttccaaaacaatctgttgctggcctccctctgctccctaccaccctgagcccacagccagccagtcaatgcttctccgcctacagcagcccagcatcttcattcaacccgcacttcgctgccccttgcccctcagcagcactcaggcagtgaaatggaccgcaccggccgcctgtagacttaccctgagccaagtggttttttcggataaaatctgtgtcgtctggatgtccaccggccaggatgcgtggtgcggcgccttgccggactcctcttttgcggcgcgaaacagcagccgactgggacagcccggggcctctaggctgatgggtgggtgggcggatgagcacagggaaaggggcggggtgtaaagacgagcgcaagtactggctcctaccttggcttcccctttggatgctcagttattgccaaacttgcctgtaacagatcggccctcctcacctttcaccttcgccagtgccctgaaactctttgctctaccaatgtccctaccctgttctcccagctctctaacccaacctgagccccttcaagcgcacccactcccttcacgcagccagtcacacacaataagagctagggaagaaactgacacggggaaactgacaggggtagctgacactgtagtgtgaaggagagggagaaggagggaggaaggaagggatggagagagaggggagagagagagaaaaaaagagagagagccgcattcacactcttacacgcacactcaagctccagctgttaggtagcggctggcgggagcgctggctacccctccaaaacccttttctacactagaggtttctgtccccttctgctgccgtttctggaatatgctatacagagaaggggagagaaaagcaaagaggggtggggaggggaaaatcaaggaggcacgctccctttatcctccccacccctgtctccaaaaatgtccaaccctgagctcttccttttcccttctttctgcgcccggcttccctctgctcctgttctttattcctccctttggggtggctgcgagctgcggacaacccgtcgtggttgtgatgtggggtgtgtgtgtgtgtgtgtgtgtgtgagagagagagagagagagagagagagagagagagaaagagagagagagagagagagagagattgagacaaccgtggtaggcaaaagcacccctcacctcccccagcccccgggccgaagccactctcaatctcctggcggcggggcggggcgggggaggcggggaggcgagagggaaagagggaggacggggcaggcggcaggggcagcagctcctgccttctttgcagctccgcggccaggggtggaaggaagccgcagccgcagccccaagtcaacccccgctgccccgtcccaccgtctcatctctcccccctcggtacggaattttctgtctcgtttgtttgcttccccagacctccccctcccctgggtggtggcagagacgggaggggaggtgggaggctaagcgcgggtgcgggtaga

SEQ ID NO: 44345 - DNA, 2300 bp, Homo sapien
gtccactgggaaagctccaaatttcagaagcacacacagtcctcatatgttaaagacaagtgcattggatatagggcctttgaaggaaacagctcacaagaataaggcttttgctctccctgagcactgcttctggttgcatctgggcttggagtggaagtctcagctggactgcagtttggctaaaaaaagggaaatgcccccaaagttttatccacggtcacatattctactcaccctcatgccaaagggaagacggcttaatcacaacatagacctcccttgtttgggagactgtatattagtttgctggttcacagtaaaactgcctttgaatgaaaggcaaagaatcaagtgatttttttttttcagcgaccctcttggccaatctttagaaacacttcctgaagtatttaagttgttaagaggtggaagctccaccctcacttcttcctccccaactcccttccccccagacacaaactcttcatcccccagggtaataattttcttttctccaataccttgctcccatacaaaagctaaatactctccagaatattggactgcctcgggactaggaggactaacgacaaggggaaaatttgtcttgcttggtgccccgagcgacttttccaaggtaggctaggaggagagtgcttagggcttccactaaacatagctactaccagcttcacaggctccgcaatgaaaacactcggccatttaggcaagggagatgattctggcattttcgggagcttacacttaggctcccagggcgtgcagagggggttaaagagcaacaggaagtacagtggagttttctcagagctagggattgttctgagaatgggtagggaaaggttttcaggtaccagcccggcgtccagaaaggcagagactcacatgcccctttcctgagagcgctaggaagggagataaaagacaaagccaatatttggggctgtgcggccaggccatgaaatgctgccagctagtggacctatgcgcctgcaggttgcaggtagaagtctcaggcttgtggtgggggtggggctatttagccccttccagttgggctcaagagggtggacattctgagcgccaggctataaggtgaaagaagtggagaggtgcttcatgtgaaaggaaggcgtaaagatcaaagagtggcccaagtgtccggtgacaccgcccctctccctccacaacagataccactaagcaacctagccccccgcccccatcctacaatatcactttccctccctgtatcaatctaggctggatcttgggagatcgaccctatgggtgagaggggcacggatgggagaattaggtagctccaactagattaatctagatctatcagggatccaagcctgccccataggaccccaggtcagtccctggcgactcagcgctccgctgtctccctgtcctaccagccgcccgccgcccttactcccccaggttcaactccccttcctcctgaatgacctatggtcgccggagcagcctcgccaccaccggcccagagcccaggctgacgggggtgggcaaaggtcactgcccaaagcaggggatattcaggccaaggggcaaagagagactctgctagccatatgctccgagggactcctgtcccctctacccgcacccgcgcttagcctcccacctcccctcccgtctctgccaccacccaggggagggggaggtctggggaagcaaacaaacgagacagaaaattccgtaccgaggggggagagatgagacggtgggacggggcagcgggggttgacttggggctgcggctgcggcttccttccacccctggccgcggagctgcaaagaaggcaggagctgctgcccctgccgcctgccccgtcctccctctttccctctcgcctccccgcctcccccgccccgccccgccgccaggagattgagagtggcttcggcccgggggctgggggaggtgaggggtgcttttgcctaccacggttgtctcaatctctctctctctctctctctctctttctctctctctctctctctctctctctctctctctcacacacacacacacacacacacaccccacatcacaaccacgacgggttgtccgcagctcgcagccaccccaaagggaggaataaagaacaggagcagagggaagccgggcgcagaaagaagggaaaaggaagagctcagggttggacatttttggagacaggggtggggaggataaagggagcgtgcctccttgattttcccctccccacccctctttgctt

SEQ ID NO: 44346 - DNA, 2300 bp, Homo sapien
actactcaactctgcaagtgtagcatgaaagcagccatagatgatacataagtgaataaacagtgggagtgtgccaataaaactttacaaaaacagacagcctactggatttggcatgcacagtctccggcttgctgaccccttgtctagactgcaaaatgctgtgggggtgttcatctcatttgggaaatgctattgtatacaacagtgtttggcaaatgaaggatggggatgggggtatatatcagaatcacctgttacccatatcttacccttgcagaatctcttattccagactgattgaaggcaggatttaggtattccctagtttcctttccaatacccattttagcaccatcctgtcccctaaatacattacaagaagtgttcctttctcaagcctttccacataatcttacgaaagcaaggctgaagagcatttttaattgaaaacatatcaagagccacaagatgcaagcaatttttttctgagagagcgttcaactgttaagaacaggaaataaaattttgtccaataaattagattattatttattatacacttaagtgtctatagagaaaagaggataaaagaggaaagtaaaatggtattcttcttagagtttcaaataatgataggttccccaaatgacaggtgtagtcactaagcaaagggcaatatttactgctgtgcatagagtggggatcatctattttttatatgtcaacattttcagccgtatctcacacagttactacgtgtcagttaatattaacctatatttaatgaaggagggcctaacatttctttttacataatcctatgtctgaagcaatggttcttaagggaatgacagctgggaggttataaaacttagttggggggcttacactgccaaaagtctaacattccacctaaggagtcatctgtgcttcccccagaaacatgatggcctcagtaagccatgattacagatgggaatggatttatcactgtgttgtagaacaaaacggtaaaaattgctgatggaaagttgctagatagacaaatacatgcatgaatataggatcatatcactgataaaaggcaggacacaggtggtatacacagaaggcaggagaaactttgtaagttcattaaataatcacggtacaattaatatgttaatttacggtcatattttgaattattgccacaacatgctagaaaataggcctaatcacctttgtagcattctggtgagggaactgggccatcagagaagcatggatactttggatcagtccagtgtgctctgttaatgtaaccattcttccttctaaatcatttggatttgttcagcaaagttccccattcacaggccatctaggaggggaaaagagacatgtacgaaaataataataataataatgatactaggtagaagataataagtttccccaaatatgaagtgtcagggacattcacaggtgggaaatatgacatcgggttggagtagaacatcaggcaaagctccattcatctccagaccactcagctcttttcccaagcagagtagcagttattagtgcactgggataaattaaacactgacttttgattgtattattactataaaaatatattagttattcctttcaatgtatgatttccacaaattctgaaatgtaagctcattacatcttggagccaaagattgctctgctggagcatcttccccatcaggcaatggaaatcagtttggggagaagaggttgttctgtcttattctatttaggcatgtgttctctcagtcacttctagccacatgggtctgctacctaccatggtagagattatctagggcattggaggaaaattagagaaaatctctgttcctcagcaggcttttgggcagcaagtgaggaagtaagataacgcagttcaagcgcgggcatgcctgcgcgcatgcgcgcgcgctcgcgcggacacacatacacacacacgcgcgcgcgcgcgcgcgcgcgcacacacacacacacacacacagagctgctttgtccgctgtgaggttggaggtttggggactctgtgcccactaagctactttctatttcaagtgcctgtatgtctgaggctgggtttgaagcctccagcgtgtttggagttaatccccattaggttggactccgcccctttctcccaaaggtaaagcaaggttttcaggcatcactgcaaagggcagctagtattcccatccttgtctaacaagctgtaaggagaagttgtttctgagatctgagcctgaagagagggaaca

SEQ ID NO: 44347 - DNA, 2300 bp, Homo sapien
ggtgagagggtaggggaacgatctgtgtccagttaacataaagtgatttgggttttgaaaaggatatggaggggcctagcgtggtggctcacgcctgtaatcccaacaccttgggagaccgaggcaggcagatccctgaggtcaggagttcaagaccagcctggccaacatggcaaaaccctgtctctactaaaaatatgaaaatcagccaggcatggtgacacgtgcctgtaatcctggctacatgggaggctgaggcaggagaatcacttgaacctgggaggcagaggttgcagtgagccgagatcccaccactgcactccagcctgggtgacagagcaagactccatctcaaaaatagataaataaataagaaaaggatacagaggacagaattgagagaagagagtaagaccttgcacgagaaaagttttctcaatgaagagctgagtatcaggagaaagtcagtaatatcagcatgaagaatctaagtagtactggaaaaaaatcatatggtagtttctctccagggactcgcgtttaaaagccttgggctgttttctggtgtttcagttggaaaaaaaaggatgagtgttttgttcagaattggacaatagaagcacggtggttatgtaccatagctctgttaacagtccagctttgattccaattagaagttgttcctctgcttcaaaattaggggagataccctaaaataattaccttgcagatttgagatgattttgcttttgatcatgattatatgttgtgccaaaacaagatggaaagacacatttccgtgtttgttcactctatatctgttcactttatttttggcaacattgcaaggaaataatgttaaattaatcactttgtggttttgtggagtttttaaaaacttgaatgttttgaacatgctctcaaaatacagagatgtttgtgtacttcttttgcattgctttcctcctctcatggagtcactggtgtggattaagcctttcctttaagtgatatgaatgaatcatacataggccaggatagaagataggaatgtggttcatgtgcatgtcacttaaactcctgagtcttagaatcattttgattaggctgacaaggctttgcagagagtccaggcagaaattagacataaggactatctcaaatccaggtctattattcatttgcatccagtctatataatgtaagtctatgagttttttttactgagacactggggcagtggaagtgccaagaaagcaagtggaggcatcttctgcttggagaagggttgcgctctgtgttgggaagggcagtctactttcctactccaagaatggatggaccattgatcagatgatcagagtgtaagctccatgagggcaggaattatattttatgtgtctttgtagcccttattgtgtctagtatgaggctgacaaatgtgtggaatagttgatacacaataaatacttaatgacttggttgaaaagaaggttcttcccctcccctccacctatctgagcttgaggcactcaaattgggagcctcactgagtgttctttttttgaccaaaaacctaccttatgatgactgccctcccttctgggatgtgggacagtgagcctcactaacctcccctgctactaatagcagtttaaagtttgcaccctaaaggtgacagtggttttggcttttgtcatcatccaccattccaacttggaatggaagtggtagctttctagggctgtgaggtcagaacagagcaagtctcagacctgaacatttccatcactggagactggcctggccttccggacacagctactggacactgaggtttcttttctgccctagtggagatggactctgctactcatttaaaagccaagcaccataggaggacaagtcattctcttggaagaactggtttgattaactgctggccattggtggcaaaatagaaacgacgtttttatttctccctccctccctctcctgaacatttcagagtgaccagtggttggactcttggcggcgcttaccctgaacctgagtgttaggggagagggaatctgccgttgcggtttctggagctgctcataagcaagaattccctatcctgatcaaggctttaagcctaaaagaaagcagaaataggtatggaatatttctgtgtgtgtgtgtgtgtgtgtgcacacgctcgtgcatgtgtgtatgcatgtgtgcctgtgtgcatgctgggtggggtgggtgtgacgtgggagggggtggtatacttttcagggtccagggcagctcag

SEQ ID NO: 44348 - DNA, 2300 bp, Homo sapien
tgctgcacactccatgacatgcaatagtccactacttttcctgcagagttggattctgagcccctgtttactgtgtgatagtgtttcctttaagcacacttcctcttgcatgccttgatccatggccccccagatggctcccattaggcaggcttgaattggatgtcactctttcattggcatgagccattataatggccttgcgctgtcaaggcgtttacatttaggcttgcttcctacttgaaatgttttctaggaaatatggatctgtagagaatggtggtttccatggtaaatgttccttcatatttgttttcttaagttcacttcggagatacacagcatgatttcctctttcagtaccagaaccacaatagctttaagttgtcatgaaattgtagaactttaaaaaagaaatctcacccaccctgcttagaaaaggggtaatttattattctaactgcagggagtcaacttcatatccacccccaaaattgtaggaaaagagttgactttttaaaataaagccacaaaacctacacgaccttggatgtaaatgcttaaaacagatgagcaaaatattgatcctctaacacatctaagactctccattatgtttcacacacaagtaggaacacatacatgtgtggagtgctttatagttttcacacacattttattttcataccagtgcctttaagttaatagggcatgtcttacagcatttacttacaggtagaaaaattaaggctgagaagttaagccacttaacagaagtcatacaattagctagtaagtgccagggccccaaatgaattcttcctttggttccaaattccatgttattttgctaccctgacactgtttctttgtgccttcgtttttctagatgtaaaatggtagattttccgtgtcccaggatgctgttctcaaccctctcgtttttaaccaatgtcagcttttttcacagtcagcagaacaccacaatgacacttcatgtactttcccccctcctgatttaataaactaagggggaagaaaagttacctattcgcagaaagctggacagtgccataaacataaaggcgtaccagagtcggccgacacactgttgcactcttttatgagactgagaaataaagcgtctcatctttctcttgccagcagtagctggggtagaacatagaactacacaatagcctcttgtttagttttattaattttgagggcgggtgggacaaagggatcagactggcgactccagggcccaatcgcaagcgtatactaggccaggctgggccaaccggtagctgcaaaagaatggtgggcgggacttacgcttcagggacgcgctccgcccaggccggcgctcccagcccgcccaggggcggagcctccgcggagcgccgcccgcgacccctcctccctcgcccctcagcttctgcggcccgccaacgggaggggggcaagcgcccggggcgggggagcggaggaagaaaggagggtgtctcgcagagctgtgacctgggtgggggcctgctggtaataggaagcaagaggggaaggaaaacgaaggagcgcttctccttcctgcattattttaagcaggctttggtggaagctgcttttcagcatttctattatttgtttttcttcctcccgcagtggggcggggagctgcactggctctcccacgcgtctatgccgcgctgttgccgcagattattattgtagtcttttgcaaaaccctttccttcttcccagccagtccccgcgcagactctcacggctacggcaaccgagtcgtgcccctctagtgggaaggcgagagcgagggtcccttgctttcgcccgagctcccggaccccgcggttcaattgtttgaaacttccacgccccccggccccgcctctcttccgcgctcccctcactcctcacttccagggtccaggcaggctcccgcccttctttccccgccctctactccgccttcctccctcgtccacccctcccgccgccctgctccggggcggtcctagccgctcaccgcaagaagaaaagccacccgttcgtccccctcccctacctcccatcctttgcccaggagctgccttggcagtcacgccccttccttccgaggagctttctggctgcctaaactggtagaccccctgaattactcctccatctccgctctctttcgcctcctcttctcttagttctctccgcctccccctcaactaccaccacctccagtcagtctcgcctccggctatccgctgctccaccctctggcccgg

SEQ ID NO: 44349 - DNA, 2300 bp, Homo sapien
tcaccaaggctggagcgctgtggagagatcatagctcactacagcctccacctcctgggctcaagtgatcctcccacctctgtctccaaagtagctaggactacaggcatgggacaccatgcccagctaactgatgagtttttacacacttctcagtaactattctctctgtctctccttctctgtaatttattatattttactcctactagatgataaggtaagttttatagagttaggaactgtgtctcttttcttactattgtagtcttgtacatagcaggtgtttaataaatatttgtccaacgaataaatgaatgaattcgatgttacaatcactgctctccacttagttcttttctttagctctgaaagttaaggtaaggaaaagataatctggagtgacttagaaagtaaagcaagagaaacatttaggttggtgcaaaactaatatatatattaggacctcactttcaatataatactaacctttttaaaattttattttattttaacttctgagatacatgtgcaggatgtgcaggtttgttacaaaggtaaacatgtgccatggtggtttgctgcacctatcaacccatcacctaggtattaagccccacatgcattaatactaacctttttaaaatgcaatgctttgccacacaattaactgccttgcttttatatcctgataaacatatgcttgtggttaggtggtctttatagtttaagatgatgtaaacatcagatgcctgtggaactgaattaggatccttttcaactttccatttaggcaaatcgtgtcatgtatttattaaataaaaattgaatatttggagtagcacttatgcttggaaacaaacttcataaggcacagttaattccactgaggaacacacagtttttttcttgcatttagtatttaaatattttttcttcattttttaaattttacttttcatttttgtgggtacatggtaggtgtatacatttatgggtacatgacatatattgatagacataccaggtgtaataatcacattgggataaatggcgtatccatcacctcaagcatttattatttctttgtcttataaacaatccaattatactcttttacatgtacaacaaattattgtgtatatcaactaatagatcttattgtgctatcaactaatagatcttattcattctaactacatttttgtacacattaactatccccatttccagccctccactacactttgcagcctccggtaaccattattccactctgtatctccatgagctcagttgttttaatttttagctcccacaaataagtgagaacaagtgaattttgtctttctgggctgggcttatttcacttaacataatgacccctaggtcatccatgttgttgcaaacgacaggatcttatctttatggctgaatagtactccattctgtatatgtaccacattttctttgcccattcatgtgttgatggatgcataggttgttttcaaatcttagctacagtgaatagtgctgcaataatcatgggagtacagatatctctttgatgtactgatttcctttaagtatatacccagcagtggcattgctggatcatgtggaagttctactgtaagttatcttgagttacctccaaactgttctccatagtggttgtactaatttacattcccaccaacagtgtacaagggttatgcttttttttttttctatagcctcggcagcattagtttttgcctctcttttggataaaagtaattttacctgggataaaattatattttattgtagattttatttacatttctctgatgatcaatgatgttgaacacgttttcatatgcctggttgccatttgtacatcttttgagaaatgtctattcacatttttgtccattttgtaattgggtaattacattttttccctgtagagttgttagagctccttacatattttggttattaatcctttgccagaagtatagtttgcaaatattttctcccattctacgggttgtctcttgactttgtggattgtttcctttgctgagcagaagccttttaacttagcatgatccatttgtctatttttgctttggttacctgtgcttgtggggtatttattactcaagaaatctttgcctagtccaaagtcctggtgagtttccccaatgccttcttgcagtagtttcatagtttgaggacttagatttaagtctttaatccattttgatttaatttttgtatatggtgagagataggggtgtagttttattgtt

SEQ ID NO: 44350 - DNA, 2300 bp, Homo sapien
agagcgaaatatataataataaaaactattattaccatcatcctcatcctcataattgctattatcatggtcaatttctccaagccggttcccccgggagccggggagcgagaacaggttttggcggatgctaacttccactcgctgctcggcagatccattttggcttagcaaaaatatcacagggatttatatttacattttttgaagtaatataaatgtctcagcctctgacaaaataaatacgagtcccgccagaaaaggcaagactaagcattccacattcatagagtaaggggacacttggggagtttttaaagatgagtgcttaattatttaaagagaagacatacgttttctcttccatatttataaattactgttcgctaccaaagcatttctaaagatgcgagcgttgtgcagtcggtggacttggcagcgctgtcgcagccacctgtgcggcatcatacagcagcattcaacagatgcttcaagaaaactgcgatgggtttttgcttttcgaaacagaacttgggtgccgacagtatgttcactgccaaattaaatttcaaagcctgaattcagtggcgatggagggaatcagaggattcccaaaatgccccttttggaatagactggacagctcctttcacaaatatggaaacagaggcacagagagaaatgactgttcctagggcatccagaataaggaaggggcctgacccttatcattgcttccacttccttctccatctctaacttttggggctactgaggcaaacttcggccttcagaatagccggcagctcccaccccttttgcgttctgccgggttaggtcctccaagcctctctctgtacggcctctctgtagcctcttctatacactcgctgcgctgccgtccggtcctaagtagccaaaccggaggctcgatcttttgcttcggtccagctacctccgacaggcggggagccaatctccacttttcccaccccggtcctcggtacagggccgagaaacctcggccgcgacccgagaccaccacccccgctcgccccttcgttccctcttaggagagatctgcttctgtccccattctccgtgggatcatctccattactcagcttggttttggtgcctctgagccaagggggccccgttcacccttctctgcgctgccgccaggacaccgcaggcacctgcccggttgcgcctgggagcctgtgaaaaagagctctgcctgaccggttagagctctgcctgaccggttgcagctcggcatcccagcagttgccaaaagagagcctttgtggttcacctcttgctgccttgaccttgcattgacagcacccctccctcccccacaacgactgggcaaccgactggctgtgggcccaaggccctgtgccagagagatatgttcacccccttggaaacccgtaagagctgccctcaagttgtctttctaatgaggcctgtggggtcaagaaaggaactaaactgtgccttcccggggctcgaaggccaagagcttttctttctcctttggggttagggaaaggatggggagacaaggatggggaagtgggccttataacaggattgtggcctttgcgcactcaccaaatgtttgaccctgtgagtgcctcagttgctactgttggaagaatgggcaagagtcggaacagagacccttgaagggagtttcaaagcttgatgaaatttgcaagacttgagaatgctgtttgttgaaatgaaatgtacaggggtgtgtgtgtgtgtgtgtgtgtgtgtgtgtgtttggggaggggtatgctatgaatctttgagggtacattcttgagaaagccttccctctctctctatccggtgccatggctgatcctggttccccctactctctaggccttgtgaatcagattaatcatcacccccacccccatctccaccatggggtctcgcgccccctgccagcaggctccagatgcactaagagaccggtccaaacaggcccgggggccacgtaatgctgagtgctgattggctgctcttggctcctcccctcatcccgcttttggcccaagagcgtggtgcagattcacccgcgcgaggtaggcgctctggtgcttgcggaggacgcttccttcctcagatgcaccgatcttcccgatactgcctttggagcggctagattgctagccttggctgctccattggcctgccttgccccttacctgccgattgcatatgaactcttcttctgtctgtacatcgttgtcgtcggagtcgtcgcgatcgtc

SEQ ID NO: 44351 - DNA, 2300 bp, Homo sapien
tattggtccccattctcttctggcttgtagagtttctgccaagagatctgctgttagtctgatgggcttccctttgagagtaacccgacctttctctctggctgcctttaacattttttccttcatttcaactttggtgaatctgacaagtgtgtgtcttagagttgctcttctcgaggagtatctttgtggcgttctctgtatttcctgaatctgaatgttggcctgccttgctagattggggaagttctcctggataatatcctgcagagtgttttccaacttggttccattctccctgtcactttcaggtacaccaatcagaggtagatttggtcttttcacatagtcccatatttcttggaggctttgttggtttctttttattcttttttctctaaacttcccttctcgcttcatttcattcatttcatcttccatcactgataccctttcttccagttgattgcatcggctcctgaggcttctgcattcttcacgtagttcttgagccttggctttcagctccatcagctcctttaaggacttctctgtattggttattctagttatacattcttctaaatttttttcaaagttttcaacttctttgcctttggtttgaatttcctcccgtagctcagagtaatttgatcgtctggagccttcttctctcagctcgtcaaagtcattctccatccagctttcttccattgctggtgaggaactgcgttcctttggaggaggagaggcgctctgcattttagagtttccagtttttctactctgttttttcccatctttgtggttttatctacttttggtctttgatgatggtgatgtacagatgggtttttggtgtggatgtcctttctgtctgttagttttccttctaacagacaggaccctcagctgcaggtcttttggagtacccggccgtgtgaggtgtcagtctgcccctgctagggggtgcctcccagttaggctgctcaggggtcaggggtcaggaacccacctgaggaggcagtctgcccgttctcagatctccagctgcatgctgggagaaccactgctctcttcaaagctgtcagacagggacatttaagtctgcagaggttactgctgtctttttgtttgtctgtgccctgcccccagaggtggagcctacagaggcaggcaggcctccttgagctgtggtgggttccacccagttcgagcttccgggctgctttgtttacctaagcaagcctgggcaatggcgggcgcccctcccccagcctcactgccaccttgcagtttgatctcagactgctgtgctagcaatcagtgagactccgtgggcataggaccctcggaaccaggtgcaggatataatctcctggtgcgccgttttttaagcctgttggaaaagcgcagtattggggtgggagtgacccgattttccaggtgccgtctgtcacccctttgtttgactaggaaagggaactccctgaccccttgcacttcccaagtgaggcaatgcctcgccctgcttcggctcgcgcacggtgcgtgcacccactgacctgcgcccactgtctggcactccctagtgagatgaacccggtatctcagatggaaatgcagaaatcacccttcttctgcgtcgctcacgctgggagctgtagaccggagctgttcctcttcggccatcttgagaagtttttgaagaatatattcttaatttctttttcaaagcattgatttgaagccatgtctactccaagagggggaaatttggtataaaccatgtataaataaaacatatacagaaaatttttaaaaactgcgatgataaataattgaaaaatctgctctctttgccatattttatcacttacacagtataacatgcttacctgtttgctgaattaataactgtttcttatcaccattaagtgcatttaagtttatttaattggttactatgcaagttatttcgatgtttaactaattttctctttcttctttttctctccccagaaaggatgatatgatgaacctagcctgttaatttcgtcttctcaattttaaactttggttgcttaagactgaagcaatcatggtgaacctgaggaatgcggtgcattcattcctgtaaggatgttactacttattattttagtgaaaagataactttgcttggtagcttgctcaacatgttaaaaaaatgcttctatatgatcagctatatttgcctaaatctgcataaatggcttgcttcccaaaagactaatattatgggtgtttcctattcaaaa

SEQ ID NO: 44352 - DNA, 2300 bp, Homo sapien
gggtatattgatcagtctgatccatgaaatgctatttgatagcctgagtcagatttcatagcctataaatggaatagaagcaaatgattttaaactctttacttagcatttatgctgtacatgacataatgctacgaaatcttaaaggacagatcgataggggagagagaattttgttagaatctctctgagagcattgtaagggcagcctgattgcccttagtccttaaaggtaatatggaaggttttctctttgtcagacctattgccctgatcccagtagtaaccagtgtgttcatcttaatctctgagggtagctctgtggaagatccataaccttctgttagccaaatctacctagtacttacagatgcattagtgggcagccattggctggcaagtaaagagagaggaattggggagaaagagagatttgttgggcctcagtgagagaaatgacattctctcctgattttatgaggcgcagaatttttaaaataacatggtgttgattcagcttggtttgctaattaaaggaagatttaaacactggggttccagaggaaaagcgttcataatcctgagtcatgcctgtgggacccagcagaatggggtggaagtgcacaggactgggcatcatgagatctctgttctacttccagctttgttactaatttgctgtgtaatcttgggtggggcaagtctgagttttactgcccaatttataaaagagaatttgactagccttgtctgtaatatacatactggttctaaaaatttgatcctaagattctataaagtagccattgaggcttaccaaagttacaatattacagatggatcaggtagggggaagagggtggggtggaagagagggtctgtcctattgaattaatctatgcacaagaaaagaagggcagtcccttcttttcttttgagtgacttttaatcctttactttatgtgaaattgttggttccagaatatagattcgaagagaagtgtatggaattgggagtagtagtttttcctgaaaagcaaagtatttttaattgagtagctatttgaaggcatgaatcctttaaattttgatcatatccgtcaagaaccaatatccaagaacagaaagatgactaaattgtattctatggcaatgaaatgctgttttagtttaagaaagagatgaaaagttcagatttgccctttagaaaggtcactcttgctgtatatggtgtggaaaatggatcagaggcaggaaagactgaataaggagatccctgctaagatcctccatttaggaagtggtagtggtaatggagagattagatgggagaggagttgaggaagactcccaggtttctggtttgggcaactggaaggatggcgatgccatttactaataaaggaaacacaggaaaaagtggaacaataatgagagtagatggaaataaaaaattttaattaaaagaagtaattaaaagaaaaaaggagcaaagaagaaagtcaatcgtccagcagggggcgaaagagctaaataaacactttttttaaactaaaaaaagaaatatttatgaggaaacagagcaaagttttgaactctctgaggcttcggtttaggttctgagctttctcagtggtcaaataactttctattttattttattttattttatttatttatttagagacagtctcgctctattgcccaggctggagtgcaatggtgggatcttggctcactgcaatctccgcctcccgggttcaagccattctcctgcctcggccttccgaatagctgggattacaggcgcccgccaccatgcctggctaattgtgcatttttagtagagaaaggatttcaccatgttggccaggctgtctcaaactcctgacttcaggtgatccacccgcctcagcctccgaaagtgctgggattacaggcatgagccaccatgcccggccgaaataactttcaaatacttttttctttttcttttttctttttttcccctcagaaaagagtatttgactgtgttttatgtgttgctaggggagacggttgctatggagatggatgatatcataactccattgtgaaccagtaagaacactctcgtgagtctaacggtcttccggatgaaggctatttgaagtcgccataacctggtcagaagtgtgcctgtcggcggggaggtgaggagctacaagggtttttgcttagctttgtttttattcttgtaagcaggatgagactagaatcctttctttccaattatattggttcctaacttgattatttct

SEQ ID NO: 44353 - DNA, 2300 bp, Homo sapien
gtgcctagcaattagttcaataaatgataaacagcaaatgttataatttttccccttgggacgttaacttttgtaagctttatttttttttgtaaaaagataataattataacttcaagactgtaagaattatgtctaaaatatgaggtgcatctaacacagtacataacacagtatagacactcaatgaatgctaacagttattgcctcttcatccacaagactaagctcaaatgccacattcttgagtgatgcctttcctaactttaccgaggagaattagttgaccttttttttttttctcatagcactttgtatttacctttgtcatagtcttcaaaacatttaaacacattcatttttcctctaggctgagagctagctctttggaggcaagttttaaaaatgtattttctcttaagcattcagcatagtacctgatacttggtaggtgattccctaaatgtattcatatacttctgaaaagtacaaaaaaaagtttttttttgttgttgttattgttttttttttttttttttttttttttttagcatgaaactggttttaggagcggaattaaaacatagtgattaccaccagggactttggtgctagataattgagggatcaaatttggactgctggctgcaagttgcgtatccttggataaattgcttaatccattccagtcaaagttttatcatatataaaatgagaaaacaccatcaatttgctacagtttttcacaataaatatgtaatgttttgtcttttaaacatttagcacagttcctcatacataataagtggtcattgtagactgtgtggtaaaattgcaaattaagtgaaaaatactttgcttcctgggtggcatattttgtaaatcagaaatttgcaaggacaaagtgaatttgaaagtattaaagtgcatattcaatactttgtagctttcatttttacatcctctctttattagatgggcattatttatataaataaaacatttttagagccaatgaagagtaaagcatataaattgaagttaaaagatgtttcgaagctctgtgatgaaatttgacaaaccaatgggaaaaacaggtcttccatcaagataatgttctaacaaggcagcctgattttctgaatctctgaggagaaataataggttattgttgacaattgacactatagagtacacgaagggaacaatattgcatgagtggcatgaataaaatgttttgtaggaagagttctgatatttttctcctcatgtccctaattaaggatcttagacatcaaaagtatatattctgtattatctagggaaattttaggtcaaatgtgcattatctatttaagaagaaaatcctaactgctcttaggatttctatttccatagtatggaagatttttatccaaataaaaatcatggccctgactctggaattggaagtgataatggagagaaacgattatccacaacagaagtgagtattttctattgctgatccattctgttttacaattttattagagcattgaaatagagacccttgtgcatacttgagtttattttgcttgaaaatatgatcattatattttatgactaaaactgaaaaaaagggcatgctgatttttaaagctgagcagtaaaccttatgttaattttgggtttgaaaactggagatgtaaagcagacattctgtaattcatatgtaaaattgaagtaacataatccatatcgtaagtttaaaatgcctcatttgtactttttgcttattccttttagccatcagatgatgacacagtcagccttcattctcaagtctcagaatcaaatagagagcagacatcaagaaatgacagtcacataataggaagtaagactgattctcagaaaggtaattcatatggtacctgctatttttgtttcatgtacatagcccacattaaaaatgggctttgaaaaattatattgtctttagcaaactcttacattgagaaaatacacatttttctaaggacagcagtgtcaagcatacagtttactatgtacattttctaataaatattaatctgtacctagaccaggaggtatatgattttgttgaccccaacacagaagatgtagcagttcctgaacagggaaatgcacatattggatcatttgtatcattctttaaggtaaataaaactttgaacaaatattaataacatgttctcttgatcttataaaagtggactatacaatttaaaatgtaactttcttttatataagggaaaagaaaaatgttctgaaaa

SEQ ID NO: 44354 - DNA, 2300 bp, Homo sapien
aatgtttcaaggggtgcaaataaccagacatcagaaggaatttctgtaaaacgatttctggaaagatctgaaaagaaaatagtgagtattaaacatatacctatatctatggtaattaaaagaactattttcacacttgctgaatcacttagaatctaagcaactacttaaaatactttaaaatatacaatattatccatcaataccttgaaggcaaaaaacatcatttagaaatacactcatacggctgggcgcggtggctcacatctgtaataccagcactttgggaggccaaagcaggcagatcttttgagctcaggagttggagaccagcctggccaacatggcgaaatcctgtgtctactaaaaacacaaaaattagccggatgtgatggtgggcccctgtaatcccagcttctcaggaggctgaggcaggagaatcgcttgaacccaggaggcggaggttgcagggagctgagatcacgccactgcactccagcctgagtgacagagcgagactctgtctcaaaaaaagaaaaaaacctcatagaacgcatgtttattaaccagatgtatttgatatgcttcagtatacctaaattccaaatatgctatttgtcttttaaaataccaacgaagaattatctctgatctttaaaagcaaacacaaaaatacctcccacgatcccacaaccccctccatctgcctcttcttttacagccaaactcacataaacccacaacacaactaaatttcttacttaccatggacttcttaacccactgcaatttggtttctatccactctcacatccaccaatgtaaccaacaaccaccatatcaataaccattccatatgtctggaaagattattttcctctggcttagaagactacacttctgggatctcttcctacctctctggctacttcttattttctattcctaggatttcctctacctgtatcatagacgttggtgttcccaagaactatgacgtaaggtactcttttccttcttgagacatccacccccccaaccggtaggagccgccctccacgagagcgctcgaaggccgcgactgaactgccgcgtcatcacttcccacttcctctgacccaccattcggcagggagacatgatggaagcggatcgcccagagaagcttttcattgggggcctcaacctcaaaaccgacgagaaagccctcaaagccgagtttggcaagtatggccacatcatcaaggtgttcctgatgaaagaccgaaaaaccaacaagtcgaggggcttcgcgttcgtcaccttcgaaagccctgcagacgccaaggctgccgccagagatatgaacggcaagtacctggatggtaaggccatcatggtggcccagaccatcaaaccggcattcaagagcagccgatgggtcccgccaacccccggcagcggcagtcgctcaaggttctcacacagaacccgtgggggtggcagcagcccacagcgacccccctctcagggcaggcctgatgacggccgcggctacgcggggtatttcgacctgtggccctacagggccccgatgcccaggaagcgcgggccgccaccgcggcactgggccagcccaccccacaagagggccacgccgtcgagcctggctcacagcgttggctgtggaatgcgcgggaaggcaccgactgtgtcggggcaagatggctactcaggcttgcagccacggcgctgggccggcccaccccacaagagggctgtgccccggtcaagcctggctcgcattggcggcagtggaatgcctgggaaggccccggccgtgtgggggcaagatggctactcaggcccgcgggtccgggagccactgcccccgtgccgcgaccctggggattttgtccctgcgctcagagactacagccgccgctattatggccactccagtgtcccggactaccgtcccttgagaggcgacggcaaccaaaatggctacaggggtcgcgaccatgagtacacagatcatcccagcaaaggctcctaccgagagcccctcaagagctacggaggcccatgcggcgctgcccctgtgtgggggacaccgccatcttatggaggaggatgccgctacgaggagtaccagggcaactcgcccgatgcctgcagtgaaggccgctcgtccgaggccttgccagtcgtcttgccagacgcctacagcagggaccactcgcccaaagcctatagtgggggccgcagcagttccagtaacggttacagccggagtgaccgctacggagaagaaggct

SEQ ID NO: 44355 - DNA, 2300 bp, Homo sapien
acaacaatcatatagtaggtatgtactattttccctcatctataaaatggaagaataatagtacctactttacaaggttgttatgaggatcgatagacaagtaagtatatacaaagcactccctggcaagtagcaagcactttaaaaatattattattattattattttccattgttacatatgaagacactgaagtactgagcttttaagccactttcccaagtattacacagggagttaaaagttcagaataaatttctaaactttatgccctctcttctaaatcttttggccttggtgttcttgtcaaagagctctacaacatgttattttgtctgattttaaggtatacatagcttacttaataagcgtcccattttcttagattatctttcaactttttgaaaaattattttccttcttaaatttggctgtacatgccttttttcactggacaggtatcctgataggacatatttttcctggagtccaatacattgttttaaataattgcaaaaattctcattggctaattattaaaatattttctttcctaatcttttctctaatgaacttagtgtcctttctcattcatcttaattctgaagttctcaattaattatgaattatgaattaataatttgatttaagatataaggaagatgagatataaggtgcaacatgcctttttgacaccggtgtgttttaataatttatctcacttgctaattcactatacagagtctgattctctgttttcttccttctgggtcatgcatatggtgaatgtaatttctcatgacataatcattttagttaaccagtatagccacaaatcaatttagacaagttgtaattctttcctgtaatcttttataaagtagagcctatggcagatatacttttttgaagtggagatttctcttaaaaaatgaggctgttgacacattgctcaaattgaaataggtgtaaaagagatacataggatactcaatgataagtgaatatgtccaagcattctgatagttttcttcatcaactttactgaatactagagaaaaagatttgaatgactatgattgagagtggagagggtagtgggtaaagggatggcagtggcctaaatggttgggtgataaactcggctagatagtctggggttaaattatggaggcctggaatgccagataaaggactttgaactttcttctctatgtcttctacattaaaaatatcttcaggttctgagaatgaactcctaaaattcaagatcgattggcttcataatacccagggttaaatcttcagaattccatctaaaaacaaaacctgtatttcagaaataacttaagattgtttgatgatcaaagagattttcatcaggcagtactgacacgatgagaagaaactagaggtattttggagatcttggcacaacttcaaagagtgatagaacagaatgtggataactcttccaagttttggaaggcaacagtctggctgagacttacatacattgaaacgagaggcttccttgaaaacattttacaaatcttttcctattatagaattctaaactatggagaaattcatatatgccccaaactcaacactgcactcatttccctccccaagtgactccccagcgtttctctaacactggtaaaggattcctgaggcatttgcagtaagcttctcaataagctgccccatagcccttctaagtgctgtttctgtatattctgaaacgaatccctttcatccctagctcatatatttgtttctgttttgcagaacggaaacagtgaagcaacttagagagttggggacatacagcccagatgacctatagttcgcctggtgtcgtttcgcaagactttggtacccaaagcagcagaaccgggatttagcatccttcttatcatacatttcttaaagcaagcgttctgcactttcaaacatcatcttttctctatccaacacctcctcccagcccgccccctggttccttcccactctctacctcgccccccaccccccgcccccagtctgcgcatgcgtcctaagaaccccttacactcgcggcacaggctgacagtattgtcgggggctattctctctcccaggaacatggcggcgagtcagggaggaggcggtaacagtgggggcggcggttgtggtggaggtggaagtagcggtggctgtggcacggctggagggggaggtggcggggctggagggggaggcggcggcggcggcgggaccctggtggtccccatcccggtaccgactcttttcg

SEQ ID NO: 44356 - DNA, 2300 bp, Homo sapien
ctctttagactcatctctcagtacccaccacatggaatgaatagaactttccacagtgtgttagtggtgctgcttcctctgccaagaaataccattcccacccctacaattattccctaatttctcaggatttaaataattttttcttgattccttgggtgaattttctcctttgaatcccaaatacattttgtacatacctgtatcctcagaacctaacacagcaggagctcagtatttgttgacagactaaattacagcacctaaattaatattttgcatgcatttattgtcttcaggcaattgtatatgcatggagaaacagatttatttattaatctttaggtcccaggtgcgaagcatttacttaaatacaataaatagttaaataatttacatttttcaaaatctcttccggcatttatttatgttgtggattctgtaatagcttgaacatatttttacctttgaaaatgtattaatttgatttttatttctactgaagagccagtgacaagatttctctaatattttaaagtagcatttgattgagcagtattaggtgataacaagaacaattacatttttcttaagaaatgtcatggacacatcttcaaggtcattgaacagcatgtggcaggctgggtatggtggctcatgcctgtaatcccagcactttgggaggccaaggtgggaggattgcttgaggccaggagtttgagatcagcttggccaacatggtgagatccccatctctacagcccaagaggagcctgggaggttaagcatgccaaccttggcaacagatcgaggaaagaaagaaaaaagaaaagaaagaaaagaaagaaaaagaaaggaaggaaggaaggaaaaaaggaaggaaggaagcaaggaagcaagggagagaagggaagggaaggggaggggaggggaggggagggaagggaagggaatagccgggtgtggtgagggaggaaggccgaggcgggtggaaagagagaagttaggaagaaggaaggaagggagggagggagggaggaaggaaggaaggaaaagaaagagaggaaggaaggaagaaagagagagagaaagaaagaaaaaaagaaagaaagggaaaagaaagaaagagaaaaagaaagaaagaaagaaaagaaagagaaagaaaagaaagaaaggaagaaaggaaggaaggaaaagaaataaccaggtgcggtgagggagggatgccaaggcagatggaaagaaagaagttaggaagaagaaagagagggtgggagggaggaagggagggagggaggaaggaaggaaagaaggaagggagggacagagggagggagggaaagtgtgggcgctgtggtatgagggtagcacagacgggtagatcacttgagcccaggagaccagcctggccaacatggtgaaaccctatctctactaaaaacacaaaaattagccaggcgtggtggcgcgctcctgtaatctcagctacttgggaggctgacgtgggagaatcgcttgaaccccagaggcggaggttgcagtgaacggagttggcgccacttcacgccagcctgggtgacaaagagatactgtgtctcaaaaaaacaaaaaacaaaaaacaaaaacgaaaagaaagacagaaaagaaagcgtgtggcattgcaaacctgtgaatcctccctagatgttaaatttgtgctccctcttggaatttgagagaagcagagcatcagcccattaagtcaagattataaggttttattcgccatgaatgtcaacagcaaagaggagaaatgggtcctaggaactgtgaaaggcaagggccggaacaccacatacactagaaacttgtagccaactacatagtgctctaggtggagagaatatttttagaaaggggtatcgggtgggagatgggcgggtctttcctttttttttcttctagcgagccaagctcctgataggagacttggtgaggggtaacgccaagctccaccccttggggcttagcaacaccgaagggagaggctatgattggaggatcaggttagtccaccactctgctcctcctgcgcggtgagggggtggtacacgcgccctacctcggagtgtgtggcgccatgatgcagggaagatggcttcgtttcggaagctaacgctttctgaaaaagtgccgccaaatcatcccagtcggaaaaaggttaacttcctagatatgtctctaggtatgtagatctcggatcccagtctccactagtttgggctcactggtcttgagcgcaagacctcggcatagcgctt

SEQ ID NO: 44357 - DNA, 2300 bp, Homo sapien
agctaggtacactgcagctttgaaactatggactattgcatttcaattaaaatgacatttcttgactgaattctgacatcctcagtgatagtggtgaatgaagacttttatcaaagtatagattctattaagcttttaaaaaattttattaattttttttgtagagatgaggtcttgctatgttgtccaggctggtcttgaactcctggcctcatgcaatcctcccactgcacagcctcccaaagtgctggattacaggcgtgagctaccctactcggaccaatgtaagcttttttgaattaaaaacaggaactgtaaatagcatatacgtaggattcttaatatttttactttaaattctagaatttgaaaaataaactaaaattgaatacaacgtaattgagacaaatatatctgcactggaaaatttagcttacagagtcccttcatgctattgctcagtctgtaattttaagtttaagagcaggtggaagctcttcagcggtgaccgacagacaccataaaaggtagaaaactgaaaaagcctatttcctgtatctaaaaattttttgtaaagaattccagaagtcacaccaaacctttggccaattactgaatgctagaaatctcatttgggagcttactgtaaatgtgtgtggcaatgcactggctccatgttcaatccaacgccaacatgttgaaatcagtatttttgtgctggcccaaacctgaaccagtagaaaatctcccataacagaaattcaatgtttgtgaaagcatgattgccctcccatttctttttcaccttcctgtgcctttcataagttcttccagttggttaatcattaattaatatttaacaaggctttttcctcgtgccaagtcctctgctagtctagcctttaggcaatatatgaactccccaagttcttcccttttaagaagccttggcactcactacggattaatttctctaaggaaattcataatggcagatgaaataggggttccttttcaagaacattccattttaaagcctctcagcattttttcctggtacatgtaaaatgcgacttaattgaactaattttaaatgttgacagaactttccaagcacacatttcctcaacaaaatggttacgactggaacaggaaagggcttagactttttcttctacagctatcccacaagtcagtctcttgacctgaccctgcaaaatccctcaaactctggctctctgagttgattttggatatacgatgaaccataggtttggaatgcagataacctccacgtgtattaatgaaagaggtcagctatgacgtggaagccatctcctgggcagagaaggagaagaaatggcagtctggggagtagtaacatgtctccaaattttctctggtgaaaggagactgatgagaattgatacccatttccggtcaaaagagtggaaccaatgtacttccaaccacctcctctcaacccctctccgcatggacaaacataccagacaggtgatgtgggctaacaatttacttggcatgaggccaaaggcttgagggccctgccctgcccatattcttctcccttgacttcttaaggaaaggaatgattgctgatgtttccctctgcaccctttggcacctggactgattgttgcagatgtaattaggaatgttccccaacatgccgttattcttctcacgattctgggagaaactgtacccctcccccatagacttatataggtggcattcaaattcttgttcccaactttttcatctgtttattaatcccacaagattgtgtgaatgtgtactccgagccaggcacgttggacttctaacttcctcttagcccaagtaggaaggggagactcaggcgctggggaccattctcctctccctgcagcagagttgcagtccctatccctcctgggtgcccatccccgtgcctattttcctggatccccacccagttgatgtgacaggctcgtggcccaatccccttcctggttcccaggccgactgctagcaccacccgagccaatggcggcggccgaggggcggagggggctggcaggaggggagggagcgctggctttagagccacagctgcaaagattccgaggtgcagaagttgtctgagtgcgttggtcggcggcagtcgggccagacccaggactctgcgactttacgtaagtgctttgtaggcgccggcgggcactaggggagcgggtttcctgggcgtgggcaggagtgggtcccggggagagcatctcggttaagctcagcaggaa

SEQ ID NO: 44358 - DNA, 2300 bp, Homo sapien
gtattgagagatattcattttcaaattttattttataccagctactttcataatctgtaccaaacatcaaaaaagaaacagttcagcttatacattccacatagattatgctagatcaaacacaacagcaaactcatgaatttatcatatgtgctaagaacactgtcagtacatttcatgaaaatccaagtagaaataatgcctaaaacagaatatgggataatggcaaatggactttcttcttgtaccctctcagtgtcaccaaaaagaaccactttggtgctcaagcaccatggccaagctgcccttttattttcagtaacagaattctgttctcctgggagaaaaatctcattgggtttctgatagtgccctagatactgacattctgccagtataaacagtcacagtcaaagtctaatgtgcgtgtaaccacttgtggaagaggcttaatctcacccaaattattactcactagttataattaatccttctacccaaaatgccataagcctagtcatttttatcaattgaatctaaatggttacatcagactagagactttggacttcaatgttgatcgtctgtattaagtcaaggcaaagtgttatttatttattaatagctccccacctcaggtaaaggggttgctatctgctagatctaacagtaaaaatcaagaatttgactcccagccccctaatttcaataaaaatttgggctcattagatcataccaccaaaaaaagtcagcaatattgggggtggtgttcaatgagtaggcatcccaagacaatgaaaagctgtggactagagcctagcgatgattctgtttagacatgatttcacaatacttaaaaaagaacttatccccctaccactgtaacctagttgagtggtaataacttcctttttttgaggttaaacatttattatttcgatctaaaattatattatcacctcacttccactagaggggtctatctaccagtgtagttaactctagtaactcaggtgcaccttaaatccatttccagctcatctgtgccacaaggctagccttggggtcagaacaatgtgctttaaggttgttctagttttcaggctcagaaacggatgaacagcaagaaactggagtgctccggtcattcagaggctgctgcaggagacaaagggtttttggcaaaagaatacaaagtcagaatctcttaaatatcttctgccctagttgttttcaagactgaatatgcatcaaccaggtccgttttttctttttttttcagataagcaaagcttttaaactcctgacctcagaggctcctctgcctctcttctatactctgtaatatataatctgaatagccaaattgccacgttttcccagaagcaaccttaacttgggccacttgggcgggtataggtcaatatgggaaagttgtttcagtgtcctctcattattctaccaaaccactgacaggcaaaaacccaaccaactcgatgtatcaaatttactatccactgtttttgtgcatgatttctaatccagttaattgaaaaccacaaataactggtggttaattttagtcaagaggttatttactacctttaagtagttgcctaaaatagggaacagttcaattagaatataggccagaccaaggaagatgaacagagccttactttttaacactatcttgtgggatttagcttcaaatctagtattcagggacaaaatgaggcatgagtaataggatgacttccctagaaaataattagtaagatgttttttaaatttagaaaaaccatgagattgaagaagagaggagatacatgtcccagctcacatatatttcaatcccttattttaaaaacagctcctgtttttgttttggataaaagctgagcaccaaattccctttctggtcccctcatccaaaatcctagtagacttccttgattagaagctagttcacactcctccccaccttttttttttcaaacgtagaggtggtttttggaatatgggcctcaaccattacattccagctttaaagtaaaaagacgtcatgtgaccatcagagacttggggcacgtgattccaactggtatgtgtggggctccagccacttagttggaattcaccatgaactgcatctcgaggatcaagtttaggctccccagtccattgtgacatccagcaaagtggagtaagtgcttgcccctcaatggtttttacttttccctacattttctacctactgttagccaggctcccttccctcctcccaatccctcttaaca

SEQ ID NO: 44359 - DNA, 2300 bp, Homo sapien
tgatactgctacatatctgaaaagggtggttacgtagcatttgggacagacccgtctcagtggtttgaggcaacaggtgtggctgaagaaaaggtaaggctggggaaaaaccaacatttctggtctaaactgatactgtcttcttacctgaggcagtttcctatgccctggttttctctgtctgaaaaatgcatgataacacatactcttcaaattagctcaaaatgcttggtagttacctactattccctgacaggccacaggcagatagttctatgcttgttttagaaatggagaatttggtactcagaaaagttgaagaagcttcatttcattcacatagtgagtcagcaacaaggacagacggaaaaacatgtcctatgactcctgccattgtattccttctcttctgcattgtgttgccttttgatatttcacgaaggttttgtgattggtgaaataaattaaagcacttccatgaaggagacaaaatgtaacccagtgtctgctgatggtggttagtgacgaggacaggagaacactgcctcataatggggactatccggtgagggctccttttcacaggtgcccacactgtgagtcacctccttatgctgagagttcggtatgctatcataaaatactttgttgtgtattatttatgaaggactagagtatctattgtctcactttctttcattctcatgaggtagattacagcagcagatggcattatgcatgctttatcccagacacaagaaaataatatctgccacttactgagtaccttgctggacccagacactcttacatatttatatcttcccattgggtcatcccgtggaccttgtgaaatatgtggaatagctccattgttatagatatgaacccggggctcagagaagctaagtaatttgttcagggtcacacagacttacaggtctgtcagactcctaagaccctgatgctttcattgtgctgcatttccttcaaattatgaacttgccctatgtcagcacagaaacggcctcttcagcctagcccagtgctccaactgattgttctctctcataaaaggcactcacaactaaccacttgcttgatttaggaattcactgattagattgctagaccagttaaaggcaaatttcaataatgagagcagttatcacgtatctagtacttaccatgcgccagactatgatctaaatttatgacacatattaaatcatttaagccttacaaccatgtataaaatagtgaactgcgatatgatggagttgctcttatcttcatcccgggatgagaaaatagaggcagaagagttttaagcaatttgcacagttaataaagtgtggagccagaatttgaacccaatctggctccagacctctttactacagctctcagttagaaaattatttctaactgagatatttcggttcagcaagtgttggcttagttcctgtgtgctatgccagcagaaaatatagttcctacacagaagagcttacatttttgacataaatcaaaatgtatatacttgaaataaatgctacaacaccttagcatatggggtgtaaatgttgtgtatggatcagcatgaataatagagactgttagtgagtggcttgagagttaatttgccttcgcaagtaatgttcttgactatggacgagtgacttgggcactggggagaagctgttccatgtgttctaaaataagcaggttacttggctactgttcaaactctaaataggtatatgggttgtagctatttgacctgaactaactttaaattcccctgagtccttatatgattttggggaaaaaaaaaaaaggaagaagaaaaaagaaaacttttctctgtaaatgctgcatttaaattagaatttattaaattctctgcaaaataccgccaggctgacaggaaggggattcgtaagtattgtatcattcttttgtcagggtgttctctttttctagcaggaagtgttgtgacttgctctctaaagttgcaattgtaagaagaatgttgggtttccagattgctcttctgggcgtgggagaaggttctgtctatcagtgctgcgagaaaggaaagaaacaagtttgctctcagcgggtaactattttaatattattttgacaggctctaactttgagattactaaatctaaatttaaatactaaatgattaagcaggaatttacgtcaaaaagcttgaaattcctgttatttatttgggtaaacatttggagtcactttaaaaatattatttattcaagtagaataaaatt

SEQ ID NO: 44360 - DNA, 2300 bp, Homo sapien
attcttttgtcagggtgttctctttttctagcaggaagtgttgtgacttgctctctaaagttgcaattgtaagaagaatgttgggtttccagattgctcttctgggcgtgggagaaggttctgtctatcagtgctgcgagaaaggaaagaaacaagtttgctctcagcgggtaactattttaatattattttgacaggctctaactttgagattactaaatctaaatttaaatactaaatgattaagcaggaatttacgtcaaaaagcttgaaattcctgttatttatttgggtaaacatttggagtcactttaaaaatattatttattcaagtagaataaaatttttgttaagagaaaattttgaagtttagattctaacctgttctgtgtgtattctgtatttttctttatttagagaatgtttagggagtttatactttttaaaaatgggttttgaaatcctaattatacagccgtatttatcaagttaagtatctaaaacactaaataatagaaattattgtctatatttgtggtgggggtgggatttcaaatgcttttgatcccagttacatggtttttcaaaattctgtaaaatggaggttgaggtggctgtcatgacagaacatgtcacgattagattgatattatactcttcctacgtgagttaaatcaaacagttgtcttagtgtttataatttacaaaataataaacatcactggtgattaaattttgatggcgttattggtacttggcagcaatagtgatttctggtgctcacatacattaggattttccatcacatggttgtcatataagtttaatttccccatatttctggcaaagggaagtatagctagttatacagtcaatcctcactctgagttgagtcacctctcggactggttgtacttaatatgcgcatatgaagtaaaaagtgaagcatgaaacaaaacaaaccagttttttcaattaacaagtgctgtatttgctaacatataagcaaggtatataacactgcaagaggcattttcagtgacttgccgatagctttctgcttcgtgtatatagtgatttgagttgtaggtcacaatattttatggcatttttattttgaattgaagtgaagcatggtaactagtctgatcttgcctagcctctctctctctctctccctccctctctctctctctctctctctctcacacacacacacacacacacaccccacacacacatatccctgaaagttgcccttggcttcactcaaacatatgttaattttcataagaaaggaaactggtggaaatacttcttaggtatgaaaattaattaatttcattagcagcagatttattttcccataaattattcagattttgggggtagatgtaaaagtttacttaggcatggaagacattagaccttttaaaagcaaagtgggctatttcaatctaagaagttagttaatgtaccttagctttctgaagctaggggaaggagaggtgtctttttgttgtgtctttgggtttgaaatagtattcttcatcctaggaaaaagggcttttagactataattgagacttgcattaaatagctgcaaaattcttgcctgagaaacgtttaaatgatgtctttaatctgaccaaattgaattgaatatttctattattggaaaaagctacgtattaatttatttttaaatagccattgctttcagatcttatctttgtttattaagtataaaaagaggaaaggaaacttttacctaaaatggaggtatttgatattcctccaggaaatgacacaggattgggcaccctttggggtttaagtgactcatagatattggtactgaaaacaaaacaaaacaaaagatcagttagaatctagctaatgatcaattatagcacagaatagaagtatttccagaaaaatgaactcatttcttaatagctatgtaggggtgaaatcacaggatttctgagatttgctttaaaataattcatggaagagagacagggaaggagggagggagaagaaaggacaggaagagagaatagatgaaccaagcaaatgtggggaaatctggataaatgtagaatctgtgatgggtttatgggtgttttttgtgctattttctcttgtatatattgaaaatattgacaataaaaaatgttagtagacctttagtttggggcaatttatatttattttctttcttttttttttttttttttttgagatggagtctcactctgttgcccaggctggagtgcagtggcacgatcttggct

SEQ ID NO: 44361 - DNA, 2300 bp, Homo sapien
tagctaggactacaagcatgcgccactatgcctagctaattttttttttaactttttgcagagatggggtttcaccatcttgcttaggctagacttgaactcttgagctcaagcaatctgcctgccttggcctcccaaattgctagggttacaggcgtgagccacactgtacctggcccaagttttgttttcaatatccaagttattttctttcataaaagaatgagaaaaaattaaaaaaaattgaaagagaaagcatgctacaatcctctgctcagagatacccaactactatgcacatattttggtctttttgggtttttttttttttaacggcatcttgctgtgttgtccaggatgaagtgcagtggcatgatctccgctcacttcaacctccgcctcccaggttcaggcaattctcctgccgcagtctcccgactagctgggactacaggtgtgtgccaccacgctgtgctaatttttgtatttttagtagagacggggttttcccatgttggccaggctgttttccaactcctgacctcagatgatccacctgccttggcctcccaaagtgtgggattacaggcgtgagccaccatgcctggccagggttttatttatttatttatttatttatttttcttttgagacggggtcttgctctgttgcccaggctggagtggaatggtgtgatcgtagctcactctaactttgaactcctgggctcaagctgtcctctttcctcagcctcctgggtaacctgtactacaggcacatgccaccatgcccggctaatttttttatcgtttttgtagagacagggtctcactatattgcccaggctggtctggaactcctggcctcaagcagtcctcctgcctcagcctcccaaagtgctgggattatagacatcagccaccacatcaggccttggccttttttatttttagtttttattttccatatgtgtagtttattatgatcaacatgataaaagtcatctagctgcattttttagagtacatgaaagagatgttatagtaagctttaaaatatttgtaaatatttacagccactttataaaaggaaatcagctctttttttttacatcagcctttttttaaatttttgtttcagtaaaatgattaacctttcagttcctgataccattgatgaaagagcaatcaacaagaagaaacttacacccttcatcattcaggtatgcattgttctcccctccctttaacatgaaattactgtttgaggacctgttctgcagacttcagcctctgcactctgtaggctcccaatcaatccttgtaaaaactgttgagtgtgggattgttatccagattatacagacagaactgggactcagaaaggtttctgagcttgcctgagattaatgttggaactgaggttcaaatcccattctaatttcaaagccccatgttcttttcatttcataatgtgttcaagcactacagagataagcagaagtatataagctcttaattaactggcgtgcttaagaaatggagcatttttttttctatcaagtgaatattagattattagcaaaattccctcagagaagagcacctcttgggatgtggacattgataacttctaaaactcttttgggcatatgcagtactgttggtctctcacccatttaggcatttttggaattataacactttactcacatggatatatttactgtggtactcagccttttcatttagtgccagcatacttcaaaaggtaccaaataaaaatacaaagttaacttctcatgagattctgcaaaaggcaatagcaataaggctgaaatttgtcttagctaggctttctaacacaaaactctggaatttgttttttgtgacacatatatggatgaaattaatacagggtattaatttcctcattgaatgttattttcagtgaagggagaaagtagactgctaaaaaatggaaaggtcaagaagcaagtgtgtaatttggctgtcttgcaggaaaacttgaacttggcactgaactctgcttctgccattgggtgtcatgttgtgaacattggtgcagaagatttgagggctgggaaacctcatctggttttgggactgctttggcagatcattaagatcggtttgttcgctgacattgaattaagcaggaatgaaggtaatggaacacagtcattctggcagttgtttattggttatttttttctagtcatgcagactttcgtgctctcacttaatggaggtgattaaatggtggtaactagaatgaac

SEQ ID NO: 44362 - DNA, 2300 bp, Homo sapien
ggaattaccaggaggtggggggaggaggagcataaatgggcacaggtgatgctttattcttgtcaggcagctgccttcacctgctaaggggagagttgggggagggtttaaggctctgcacaactccacgttgtagaaaatggaaactgaaaagagctttcccctcaccccaggtggaattacccaaaaagtaactgagctatgaatctcagctgcccctctctggatacttccctgtctttctcctcctttatttaagggaggaatgtccatcgcctgacacagagaactaagtcatagccttttttctgtctacattccctgaacggacagattcaataagcactcattgtgccaggaaaccaaggtctacagaggctaaatggttttgccaaggtgaattaaggtggcaggatggaaccaaacatgccaggctctcatgctgcaaatcctttgctttctccatgcaaacggccaagcagctcagtacaggatgcctgcctgggcaacaagagcgaaactccatctaaaaaaaaaaaaaaaaaaaaaaaaaaaaacctgctgctcaatatcattcatttaggcaaataggcaaatacaaaggaaactcacaaggagatacacctcacacttattaggatggctagaaaaaaaaccaaattgaaaataacaagtgtgtgaggccaggcgcggtggctcacgcctgtaatcccagcactttgggaggccgagatgggcggatcacgaggtcaggagatcaagaccatcctggctaacacagtgaaaccccgtctctactaaaaatacaaaaaattagccgggcgtggtggcgggcgcctgtagtcccagctactcaggaggctgaggcaggagaatggcgtgaacccaggaggcggagcttgcagtgagccgagatcacgccactgcactccagcctgggcgacacagcaagacttggtctcaaaaaaacaaaatcaaaacaaacaaacaaaaaagtatgtgaagatgtagagaaattgaaactgtcatacactgctagtgggaaagtaaaatgatgtagatagatatttaatattatcgaaagcaatttggcacttccacagaaagttaaccatagtgccatttgatccagcaatcccactcctgggtatctatccagaggaaaagaagtcattatacagaaaagacacttgcacacgcatgtttgtagcagcaccattcgcaattgcaaaaatattgaaccagcccaaatgcccatcaatgagtgacgaatatatgtgtatgtatgtgtgtgtgtatatatatatatatatatacacacacacatatatatacataccatggactactacttagtcataaaaggaattaaataatggcattcacagcaacctgggtggaattggagaccattattctaagtgaagtaactcaggaatggaaaaccaaacattgtttattctcactaacaagcgggagctaagctgtgaggacacaaaggcataagaatgatacaatgggtcaggcgggatggctcacacctgtaattgtaatcccagcactttcggaggccgaggcagatggattacttaaggtcaggagttcaagaccagcctggccaacatagtgaaacccgcccccccccccgactaaaaatataaaaattagctgggtgtgatggcacgcacctgtaatcccagctactcaggagggtgaggcaggagaatcgcttgagaccaggaggcagaggttgcagtgagccaagatcgctccactgcactccagcctgggtgacagaaagagactccatctaaaaaatagatacacagtggactttggggatgtgggttgggggagggtgggaaggaggcaagggataaaagactacacattgggtacggtgtacactgctccggtaatgggtgcaccaaaatctcagaaatcaccactaaagaacttatccatgtaatcaaacaccacttgtttccccaaaacctattgaaataataaaaaaagttaaacagaatgggaggctccggcggctcgtgctcgcgcacgcagggtggaggcagggagcgcacgacgtgcgcgcaccctctgccctggtccatcgctgccgcctccttcttctgcagctcctggtgctgcttgtgtgctcgtttggtgcggacctggtacctcttttgtgaaacggcagctgaggagattccggcgcttgccatggccgacgaaaaacccaaggaaggagtcaagactgagaacaacgatcatattaatttgaaggtggcggggcaggatgg

SEQ ID NO: 44363 - DNA, 2300 bp, Homo sapien
aatgtatgacagtttcaatttctctacatcttcatcacacttgttattttcaattttgtttttattctacccatcctagtaagtgtgaagtgtatctcctcgtgattttgctttgtatttgcctaaatgaatgatgttgagcatcctttatggagctgcttgcccatttgcatgaagagcgcaaaggagttgcagcctagcatgtttggattcatcctgtgacactccggttcaccttggcaaagctttagcctctgtggaccttggtttcctggcacaatgagtgtttattgaatctgtgtcggttcaggtaatgcagacagaaaaaaggctgtgacttgattctgtgtcaggcaatggccattcctacattaaataaaggaggagaaaaacagggaggcatccagagaggtgcagctgagattcatagcccaattctttctcggctaattccacctgggaaccagagggaagctctttccactttccattttctacaacgtggaattgtggcagagtcttaacccctccctcaactctcccctaagccggtgaaggcatctgtctgaccagaacaaagtattacctatgcccatttattctctttcccctacctcctggtaattcccacccacctctgcccaaacagcaagggaatgagtaagagaagaggtttgggagtatctggccagcaggtggtcttggggtggggtggggatgggggactgagagagtgaaggtcagttggtggggagtgaaatggaggcagaaaattctaaggagttggaggcggtaaaagtgcagttgtaccctcctcaggttggtgtagaggccttggatttctttttaaagtgtttcttttaaggtgggtgtactggggagtggacctgggcagcggtgactttggttctcacttgaaacacttatttgtagggaaaacattccttaaaatttttcttcagaaaaatttttgtaaaagtccatcaggtcctaaaacattgggtttgtgaaacaaaaaataatagtaaaagtccatcaaatactatattatgaatagaaaattaaatgggtccacaaaaatatcttcgcaatcaataggttggcaactgaatagcgtgcatgcttcccatgggtcttgggagctcaccagactattattttaaaaggatctttatttgcatctctccctccaacttaagaaatcaggtgctagaaggatgtacgccccaatttaacagtcctctgagtggtgtcatcacgggttatcttcgtttttctttatgcactacaggtgtcttcattctgcgaatattattttgcaagacaaaagtgttcctttttttttttttttcaaaagaaagaagatatcagggcactggtcagacaggggaaaccttcgagtcgctgtcactctttcggacgtagcatttcatcacccacctaggcagcgtgtgcgccaaacagcagcatcccctggaatggccgcagaagcagcactgggcccctaacagttccagacaaaaatcagggagtgatagggcaccggcagtgtctggtcttgggaaccacacatttcactccccaccaactgaccccacactctcagccccatgcccctaccccaagactacctgctggccagatactcccagaccttttctcttactcattacctctcacctggggagggagcaattgaggcttttagtaacctcagtcaatgtaatgatacaaacttatcggttgaaaatatgcatatttaaatttcttttacgtctaaatgttttgcgaatattgaactatagatattccattgtattgttctgactcaatcatcgtttgccccctagcaacaagtaccttattctaagggaaagaaatagattctaccgagcaactggccaagatgaaagatttcccacctgactttccgtagcccacctctcccggccctttaagcacctacgactggcttaagatgtcccactcctcccctgggcggagccgacaccacacaacccggattcccaacacctccccttcctctgaccttcagcttccaccccctctggggaacaggagacacagaagatggagggagggatggcagcctaccctgtggcaacgcgggagtcgcgttgccgcagggggcgcattggggtccagccgtccccagaacgcagatcagaggtagtcggacctttcccgctggcgcgcagcctcagctaggtaggtctccttccttcgtctttcctttctttgcctttcctttccctgacgctgggggaagtagggcaggg

SEQ ID NO: 44364 - DNA, 2300 bp, Homo sapien
atattgttatgtgtgaatttgatcctgtcattatgaggtactggttattttgctcattagttgatatagtttcttcgtagccttgatggtctttacaatttggcatgtttttgcagtggctggtagtggtttttcctttccatgtttagtgcttccttcaggagctcttttagggcaggcctggtggtgacaaaatctctcagcatttgcttgtgtgtaaaggattttatttctccttcacttatgaggcttagtttggctggatatgagattctgggttgaaaattcttttctttaagaatgttgaatattgccccccagtctcttctggcttgtagagtttctgccgagagatcagctgttagtctgatgagcttccctttgtgggtaacccaaccttcctctctggctgcccttaacattttttccttcatttcaactttggtgaatctcacaattatgtgtcttggagttgcacttcttgaggagtatctttgtgacattttctgtatttcctgaatttgaatgttggcctgccttgctagattggggaagttctcctggataatatcctgcagagtgttttccaacttggttccattctccccatcaatttcaggtacaccaatcaggtgtagctttggtcttttcacatagtcccatatttcttggaggctttgttcatttctttttattcttttttctctaaacttctcttctcacttcatttcattcatttgattttccatcactgataccctttcttccagttgatcaaatcggctactgaggcttgtgcattcatcacgtagttcttgtgccttggtttttcagctccatcagctcctttaaggacttctctgcattggttattctaattagccattcatctaattttttttcaagtttctaacttctttgccatgggttcaaacttcctcctttagctcggagtagtttgatcgtctgaagtcttctctcaactcatcaaagtcattctccatccacctttgttccattgctggtgaggagctgtgttcctttgcaggaggagaggcactctgatttttagagtttccagtttttctgctctgttttttccccatctttgtggttttatctacctttggtctttgatgatggtgacgtacagatgggtttttggtgtggatgtcctttctgtttgttagttttccttctaacagtcaggaccctcaactgcaggtcttttggagtttgctggaggtccactccagatcttttttgcctgggtatcagcagcagaggctgcagaatagcagatgttgttgaacagcaaatgttgctgcctgattgttcctctggaagttttgtctcagaggagtaccgggccgtgtgaggtgttagtctgcccctactgtggggtgcctctaaggctactcaggggtcagggacccacttgaggaggcagtctgtctgtcctcagatgtccagctgcatgctgggagaaccactgctctcttcaaggctgtcagacagggacatttaattctgcagaggattctgctgccttttgtttggctgtaccctgcccccagaggtggggtctacagaggcaggcaggcctccttgagctgtggtgggctccacctagttcgagcttcctggtcactttttttacctactcaagcctaggcaatggtgggcgcccctcccacagcctcactgccaccttgcagttttatctcagactgctgtgctagcaatgagcgaggctccatgggcataggaccctccgagccatgcacgggatataatctcctggtgtgccgtttgctaagaccgttggaaaagcacagtattagagtgggagtgacctgaattttccaggtgctctctgtcacccctttctttgactaggaaagggaattccctgaccccttgcacttcccaggtgaggtgcttccttgccctgcttcagctcatgctcggtgctctgcacccactgtcttgcacccactttctgacgctccccagtgagatgaacccagtacctcaattggaaatgcagaaatcacccatcttctgcatcactcaccctgggagctgtagactggagctgttcctattcggccatcttggctccacctccgctggcttcagtttttatctagtgcagtcatagtggtggtggctatggggtgcttgtattactccactcccagattttgttggctcagaacagagagaaagagactctgcatgtttggaagaaggaaatggaaaggaaaaagagtctctgcctgggaatccatagattc

SEQ ID NO: 44365 - DNA, 2300 bp, Homo sapien
ggcaaaaacaaacatttgaaatggagggagaaaccaggtttaaacaatgagtgaaaacagtttccatctcagctttcctgctgataaacatatgtgccccctcatttgtttctgaaacataagttttccatcattttaacagagcctcagcctcaactgaatctgtccagagcataggaaacaaatattttgagatttagtaaaatggtgcatacatatattaggggcattttgacaatgttcaaactgtttaccaaacaaactttatgatggcctatgcaaacctttgaatcctactgtatttttcacataacgatgacttctcactgatctcatctgcctgtgtgctacagtattgactttaatattaatggagaaacagacagatatcaaaagccatgtgatttgtctcatgccatttgcaattttgtcttctgtcatcaacactgacttctccttccttgttctgctgaactccatacttaggtgcccagctacttcctcagagcctgccctcattctttacctgtggcctgcagcatggacaggtgcattcttgctgcttatctgaaaaatatgatccacagaaataacttgaatctttttgcccatttaaaatgtgctctaggttctctggttctctgtactaactatagaaagccatctagtcacaagtttctccttcctgtggtctccatttgggcaatacaattaagaaaaatacgtttccccacataacaattcttccaattcttttccccttctttgatgcttttatgatagattatgaatggtcatcagtgattttctgtaaatgccacgtttcctttttgccaagacaaagagtgagactaagggaccatctagtgcttcctcttgtggtatagaggctaaacagcgtgagttctgatattagtttcctttgatttaaatgcaagtgtcttcatttaatagctgtatgatctcagaaaagttattaaactctatgagtcctagtttcctgatttgtaaagtgggggctaatatgaatagcttgtaatagcacctaccatatgctaggcatgattttaggcactttaaacatattagctcatttaattttccattagcttatttaaaattcctactctacgatgtaggtaatttatatcattctcctttctcagatgagaaactgagacatgaagaagtaaagtaacttggccaaggtcagaattagtaagtggtagagctgggtttgtaaagccaggtagttggatcccagaggctatttactaaccagtgtgctatattgcctctctattaaattattgatgataaataactcatcacagtgttcggcacataacatttattgtcagctagtattatcactaccatcacctgttcttatctttcttcattttgtcactcttgcttctgctggattggttgtgtagtttattgcccccactgccacaagagacagcagcaacagtgatctaggttgaaatagctagcgaatccctcttcactttatgtgctttgtatttaaaccacaaatatgacagagacctatgaaaggagactaaacctctttttggtcgtgtaaaaattatattcctgcaatctccaaccctccagcaacaagccaacaaaaactgcgcaaagcaagggagaaattttagaagtggtagacttcaagtaaaattcctaccattctttaataaacaggggtaaaaatttcagaaagtaatgaaggttgtgaaagctgatgaacaaagactttgctactataataaatttcctagtctctactcactaatttctattagaatgccaatatcaggaaaaaaggaagagaaaattctgtaaataattactatatttttctcctaccaagtaagccactgacttcaaaattctctagcacatttgtggaaacttcattttttttgtttgagatttatttgaatgagctgttatgattggagacagtgagaatttcagattaatgttttgcagacaaaaaaaaacctctctggaaagctggcaagggttcataagtcagccctagaattatgtaggttgaaggctcccagtggacagaccaaacatataagaaggaaaccagagatctggtgctattacgtcccagcgtctgagagaacgagtaagcacagaattcaaagcattctgcagcctgaattttgaaggtaagtatgaacaatttatatataatttacttggaaagtagaacatacattaaatgaaaatattttttatggatgaacttctgtttttcctgtgttttaacactg

SEQ ID NO: 44366 - DNA, 2300 bp, Homo sapien
gagaaacatgtctgtgacatacacactaaacgtttgagacaatgaatgggaagagatgatactaaaaaggcaggcaggagccaggtcatgaaaagcaaagcatggtaatgggaataatcctacccccccccaccccgaaacagaagtatattatctaaaatcgatctcacattttatgtgttaaatgctccaactctcaaaggtgatagaaactttactgcataacaggcagggaaaattggcccccctgtataacagatacccttgccttgtgatatgtttgggctttgtgcccccacccaaattttatcttaaattgtagttcccatgatccccacgtgtgatggaagggacccagtggtatgtcattgaaacatggggtggttacccccatgctgttctcgtgatagtgagtaaattctcacaagatctgatggttatataagggacttttctccctttgcttggcacttctttctcctgctgccatgtgaataaggacgtgtttgctttcccttccaccatgattgtaagtttcccaaggcctccccagccacgtggaactgttaatcaattaaacctctttcctttataaattacctagtctcgagcaattcttcatagcagcatgagaacgaactaatacaccttgtgattcccataatctctctatccttaggattcctgtcttctttctatttccttggttaccaattgtttgacgtgccccaaggttggcttctttcatttatatgggactttgatcgtttagtaaatgctattggatttgctttttagctcatccttttataaggaggtttataagcccttcttgctcctctcccttctatgtttaatcttagcctttaggtcataccagtagtgtacagtactaataggcacacactcatgcattagcactctccatcccccaattccccattgatacatgcacatgtgcacacacacacacatgcacatcagcctttgttatgttcaagacaaagttaaataaaacttattgatactttccttactaccatcctacatctttcatggacttttctctaccttacctgccaagattccccagggcatatttctattgcaaatggaaaattcttgcagtcagtggagaacaaaggagctatacatagggtacagaatttgcctatttgctcattcctctgtgtgcatgaatttgtgctttgcttcatagaaccaccatcactatctgttacctgggcagactgagtttaaatcctttgagtttcctgatgaaaaggcattccattggtaaacagcattataataattatttcctccctggtcaagctgggatgtttcctcatagtttactttctaggcctcatctttcttacagactgtgctcctttgttaaggttagaatttcccataaacctgctcaataatttgtttgtgtttggcttctttgaaatactacacaaagcaatccctgtaaaaggcaaagctgtcctgaaggctgagaaaggagcctgagacataggctccaagttgctcttttcaggcagagccagctgggtaatcttatctcagatggctgcttttcaaggtgcccaattcaggggcttttcctctgggagcagcatttgccccagggaatcaagtgctttctagtcaggggcaaaactttgggaaatctgaggacccagggtggtatggtctgttcaggagaattttggggaacagaatggcccccttctccctccagcacttgtacagatcagcacttggccccagaacagagaccagactgagagacgaggttaggaggaaacaggggacccaggaaaggcggctagattgcaaacgtacctacacagctctgagtcaaaggctgtcagtcatctcggctcagactgctctgctctccagcagcccagccctttcccagggctggggcaggagattgctacatgtaggcttatctggggaaaaaccagagcctcactttagtcccttccggtaattgacactactggacacccaggagggggaggagagagcttctcttcataaatgttcccacccctgggcaaggtggctcactctggcaggtaggaacaggggagagtgcacctgctaccagtcaagctcagccagactgcaagaggaggcgaggcggagccagccgagggagtgaaccatggacaagttgaaatgcccgagtttcttcaagtgcagggagaaggaggtaggggtctgggagctgcgggaggtgtggaggacctgagagtggaaaacttaaggggggttgc

SEQ ID NO: 44367 - DNA, 2300 bp, Homo sapien
aaaaaatcaatggttagcaacagtactttaatgtgtttgatgataatattttcaaatatttctgaagtttccacttaaataccagtaggatcaaaattcaatatcctattgttagagataaggttaatgggcttcactcaatgttattcaatgaaacagaaaatttagatgccaggaagcccacaatcacatactaatagaagtgttattgcccagttattaaatattaaaatctttcaatgctctattcaaatttgtcttcatttgtacttcctagactgacatgaagaaatttcttttatatctaaaatttcaattatgatttatatgtagatgactcacaaatttatgtcttggcttatctccctgggagcatttatttcatgtctcaaagccacctcaaactgcatttgtccaagactaaattcatgaccagcaactccatacttttttatctcctattcatccaattgagtaagccataaagccaggaacttcactcctctttagatcctatattctattatgagctcccacaccaccaggtactttttggtaccatttatctcagcactttcacatacatttctgtatttgattaatgtctgcctcttaaactagagtgcacattccaggtggagaaagactttatttttgcttataatcagattcttaaaatacagaacagtgtctagtatataagtgtttaataaatattcattgaatcaataaaactttaagctttgtactcataactaggaaatggtgtgatatgaaaaaaattaaaaatgtaatttctccccttcccatctatatgaagatgagggttgtttacctagcagagttactggattgcatttgggcactcaccttaagattaccgtgggtattatttttagttccaggtctttaggtcagtgtcatagtctacatttaactgaatttcctgaacatttctaacctgtctagtgcaattatttctgtatgtgttacgtcccattaatacaactccaaatacaatgttcagtaccttggtaggagaatataaaatacttcatgctcacaaatcagagtggaggtggagatcatgtgtataaggaggagaatgggggagtttatctcagagctcaaactccatggattcaagtcctgcttttgctattagtttcaaatgaatttaacacctgaatctgtttccacatttgcaaaaatagacatagtaaaaataccttggctctggagaaccaaacaccacatgttttcacttataagtaggagctagtgagagctgaacgatgagaacacatgacacatagtaaggggtaacaaaacgcactgtggcctgtggggggcggcgggatcggtggggaggaagagcatcaggaagaacagctaatgggtgttggggtaataggtgctgggcttaattaatacctcggtgattggttgatctgtgcagcaggccaccatggcacacatttacatatgtaacagacctgcagatcctgcacatgtatcccggaacttaaaagttgatgaaaaataaaataaaaataaatgtcatggtataaacttgaaattaaaaaaaaatacctttagtacaaatttgttgtgaggtttatatgtgaaaatgtccccagaattatttcttaaactgtaaaatgatacaaatgtacataattattccaatgtaactagggttggagtaaaagctaaaatagcaaggtgactgtggaggaggtagtttctggcaaagataatttgggggtaactactttttacattacatttttgtcttgtttttgaagtgaataaagcagtggttgtagcaaagacatattttttaaaaggtaggagcactttaaatattctatttaaccaatccatttacagcctgtccttctactacctttcggcttcccagaaatcccaaacttcctcactgtctttcactctcctctctaaggacttgaaactaaccaggtaggcggtactaagtgccgcctggtttccggcagggccggtttttacatcatctcattgtggcgtggcaccgccgcttgcgtgcccaattgtgaggtctcgcgccctcagccgtacataaagcgggacaacacagaacttcccagttacaccaggcatcctggcccaaagtttcccaaatccaggcggctagaggcccactgcttcccaactaccagctgagggggtccgtcccgagaagggagaagaggccgaagaggaaacatgaacttctatttactcctagcgagcagcattctgtgtgccttgattgtctt

SEQ ID NO: 44368 - DNA, 2300 bp, Homo sapien
taactccactataaaaagaataagaagaaactaatggaaatcacattggaacagtttgaattaaacataagaaaggacagttacaatccaaaaatttcaaagtttaagtcagagtcccgcattaagaaaagtgtaaaactatagtgaatcctgtctttggcttcaagcagatgaagatgatatctggaagtctttttagaccccgtttctgataggatgtgtggtttaattacttctaaaagcttcccattaatggctttgctaatgccaagtaccaatcaatgcactaggttttctcttatgtggcgagagagagagaaggagagagagagagagagaataataatgtaggattttgcttgtccgttaggtaaaagtcatgccaaaggcaaatagaaatgaacatttgaaaaggcatccagtgactggaaatagtaaaaaaaaacaacagtactggggcatgtggcagtttaacttgttattaattttagaaatagggtttaaaagaaatagaattggcaaggatccaggcctaaagcaatgaacaaagccaacaaagcagtaggtaaaaatgagaatagtaaaagcctttgaaataagactgaaaattcaaagctaaagtaagtggaaaaggaagtcagtagagagatacaagaagtggcatgatataggtgtgcttggaggagaaaagcatactttgcgtagtgaatttgatgatgaaatgaaattattgaatagagcggaaaagtagtctctctctctctctctctctctctcgctctcctctctctctctctctgtgtgtgtgtgtgtgtgtgtgttttgcctgtcaccatgttatttttttttaagtagagaatctcattcaaaggttgattcatcaggattgcatttggttgcaagtagctaaacctaattccagtggcttgatcaaattgtcctactcaataaacttctgcttacccgtcgctgcccagaactatatcatatggtggaccaaagcttcaagggaacctgctaaattaaatttcgtttttagcttggtgtagtgcttccctaagcagtgttgtggttctgttagtttaaaaaagtagggttgggggacgcaagaaattggattagcagttggcagtgtctgcaataaataatatgaacttttcaagtcaatctagacctcatgcttttgatgagttctcttaacagcttctctgccttttaaaaagtgattacattttccatctttcttggtgacattgttctgttcttgaggttataacagactgattgaaagatacttaagtgagttgaggtcacttctccaaaatacattatgttaaaagatgataaatacattactgacaggaagtattcttaataaagatcttcatattatgccgccaaccatcttcaggttaagagtagtactggctgcaatgatggtgggtatatacgaactattagctttaaagtataaatgtagagaaattattatcagtgtccattttgtagtctgtatatgaattaaagcagtgggcttcagaacataaaccaagaagtgtgtatattttcattctcaatgtaaaagtttgcttcttatgtattaacgtttgtttctatcaacatggggacccagaattgaggagtttttcatttcttttgatttttttcatcctttcttcctatgtttttagagcaaagaaaatggagaaatgtcaaattataaatatgtaagcagattacagaataaatcttagtgatttctgcaatgacagaaatttgttagattcttacactatctagtctaatgtaacatgtactaatggtttatattattaatatagtctcaataattactgtaagagctcccccaaagtcttacacatatctatcatagctataatagatatgtttcaagtgtttggatattattactgttccacttaagagaaaaataattaattgctaaatttgaagttaaaaataattttcttttctttttttttttaacagccacagtagaatgttacaatccaagaacaaatgaatggacctatgttgccaaaatgagtgagccccactatggccatgctggaactgtgtatggaggagtgatgtatatttcaggtaaacaagtatcatgtgaacacaatataatatataagcttttaactatatggttatctttccatatagtggtagtaataataataataattcaggcgtcaggagtttgagaccaggcgggccaacatggtgaaatcctgtctctattaaaaatacaaaaattaactgggtgtggt

SEQ ID NO: 44369 - DNA, 2300 bp, Homo sapien
gttctgcatgtatatcccataagttaaagtctaattaaaataatctatgaaaataacaatgtgtgtgtgttaaccttagagatttcagtgatattatatcctaactgggctgtcattttatgcggaggagtaatgtttttagctttgtttcagtttttaaagaaatgtcaacaggaggattattttattttctcttaaccatctgccaaatctgttaactatacaggtgtgaggttaacaatacattgataaagtttgtgtgatattgaggacacataacctgacaaaattttaaaaacaaccaaacatttaagtcttttgcctgtgatctgtgtctgtttgtatacatacacactggcattttttattgtaggcttgtttttgtggtttgttctttgtattatatttgctaatattatttttcctatttttcctttgatgagtcagttattagagcattgaaaagaggttctactgaggaaaggcctctctgtcacttctcttctttgtcagcttttcactttatggtatattttgctctatggtggggagatggttctgggctcatgttgacgccagagagaaacagaatgtgctgaaagtaagagtggctaaggaaagctgtgttgcccagatggaagcagtcatcacagataccaaaatctcatttacatgagagatttgttgtagatatacccctctgcccttaagaaagacatttccttgcttatatttccagataaataatgttgaaaattaatttgccctagggataattatcttattaaattattttcattatgagtgataactttgaaggaaccaaaatgaatgatagtaatgagtgatgcctatttacgtgaaagggaaatctagggtttgggtattagagcttttctgttcatggatctgctagctgtgtggtatttttaagaataatgactaagaagtggattgagatgaatcataatagaacaaccttctattttcccaagtttccatctggcaggaattttatcagtattttgggggtgggggtgggatacatttttgaggagagaagagtaactggtttggccatattccagttataacattgtttcttagagtagcttctaacttactgactttgatcattttcttttagtcagccttctagtggattaagtaaaggtggtttgcaaattatctgtttgtagatcattgatacatttagataagaatcctatttgtatctatttgaacattaaaagcataatttactcttattctagaacaggtatttgtgctatcaagatgtgattgccatgaaagtagtcatgttttaattttttttaattggcttaataggtcactttagacaactgtgttgaagttggacggattgccaacacctacaatctaaccgaagtggataaatacgttaacagtttcgtcttgaagaattttcctgcattgctgagcacaggggagttcttgaaactcccttttgagcgtcttgccttcgtgctttccagtaatagccttaagcactgtactgaacttgagctctttaaggctacctgtcgttggcttcgcctggaagagcctcggatggactttgctgcaaaattaatgaagaacatacgatttccactgatgacaccacaggagctcattaattacgtgcaaacggtggatttcatgagaactgacaatacttgtgtgaatttgcttttggaagccagcaattaccaaatgatgccatatatgcagccagttatgcagtcagacaggactgccattaggtctgacaccactcacttggttacactaggaggagtgctgaggcagcagctggttgtcagtaaggaattgcgcatgtatgatgaaaaggcccatgagtggaaatcgttagcccccatggatgccccaaggtaccagcatggcatcgccgtcattggaaattttctctatgtggttggcggacagagtaattatgatacaaaaggaaaaacggcagttgatacagtcttcagatttgatcctcgatacaataaatggatgcaagttgcatctttaaatgaaaagcgcaccttcttccacctaagtgccctcaaaggatatctgtatgcagttggtgggcgaaatgcagcaggtgaactgcgtaagtgcatttatattaagcatagagacaaatttcttcactcagaaattcttatcaaatcataaaataagcagtcctgtaaaatcagataaaaatgtagttagggttttattttaaaactatttttctgagaaaatattgaagaccatcttta

SEQ ID NO: 44370 - DNA, 2300 bp, Homo sapien
taaatattcctttctctgactcatttgacaatttctgtgagtctgttttgtgtgcaagtactaaaaggagttggatatgtaatttaaccctttaaaatgcttgactgggtttttgggggctgtttcttttgtatgataggttgaataaaaattgtatgtaaggtaatgatggctgacataattttaatatttacaaagttcatatattacttgtcaatctttcaaaataagctttctctttccatatatgtatgtatgtgtatatgtacatactgcatgtacatatatgttttgtgcttcacaggaaaatagtagtttgtctttttgccttgatattggtctgtatcttaaaaggaaggcatttgtgattatgttagttgatttcatgctgtatttcttatatactaaatttggtattttggaatttttgaaaatagttccttactgtagaaacattcatgtgtgtttctaaaatacagatgaaaaagcctcttaggggactaaatctcaatctttaaaaactaggaataatttggaaagaatattcgaacgctaactatttaagttggaagcatgagtttattgtttggatacagacttgaaagtaaatatgagctttgttcctgcagtgattttttaaaaataggtagttgctttcatgtcaatcatgatctgcctttactaagcttgcattgatggaaatggataattctgtttttaggtagaagcagaagggtactatgattgtgaattgcctatatcagaagtaaaattcttcagcctgtaaataaacagttcagcataatactcatttaacctatattcactttttagaattgtgtagaaaatttgtgagtttgttttggtgctttaaacagaagcttaaaagtcactttcagggcatttacaacgctattttctggcagtattttgaaacaatatagatgagccctttatttgccattgctttcatgaaatacctcaagctgcctttgacagcagcttcaatttttgaacctccttgacaatcgctaatccctataggttaccggacccgctgttgagctttggagtggtccctgctggacacctgcttggccagcagtgttggtctttcctctaggcaatttgtgagctgtctgcgggggagggaggggaggagtggggggggtggtgaacaagaggggaaaggggagagaaggggagggcagtattgaattagattgttgatagcgtccctctgaggactgctattaagagcatgctactctgtacttcgctgctgcagaagagagagtgatatttgtgttactacagcatgttgtaaatgtgtgagattttgctcatctcagcttggaaataagaatagggaaaggagagcaacttgaatcagaagctactagaagaacctgcagagttctgaagcagtttatattcttcttacattttgccttctcctagctggaaagcagagggactggaatttttgaaacgggcttttcccataatggcattcttgatttgtgtggccagagcttgcacaggaggaaagcaggctgctgaatttagtcactgatctctattagcggtagcctaaggctatgctgaggtttatatcccatttgtattgttgcagctcaaaagaagattgttcagaggatgacaagtgtattctgagtaggtatgttgttgtttcattttcatatgaaacccatctatgttttttcttgctactattggtcagaaatcaggttaataggtgcagaatatagtacagtgctgcagtatccctgttaaggtagaacaatggtattgcaagcttaaaaaaaaaaagcctggctgcttttattaaataaagctgcattgtatggtatgcacagtgcagtcctaaaaaaatatactgcagtcaacgcttttctggcactattgttgagttggaatgattgaatcatcatattgctttaggggacagaagaatttaaggaggtaccttacagccctattttacagattggaagcatcggtttaagggcactggcagaatcctttgcttgttctccgcggcagccactgctgtgtcagtacagtgtggaatggaagtcttagttggtagtctgttatggaaacgctctttactgttattgtagtaccgtggtgacaacatgccattgaaatggaaaacgagctctcctgctatctggaaattcccagttcctgtgcttaaaacatccaggtcaactccactttctccagcatacatgtaagtgagagaaaataggatattaaagtgggatttcatt

SEQ ID NO: 44371 - DNA, 2300 bp, Homo sapien
tgggaatttggaaaactctaccttaacttgcctgttttccactcatcaatgtttgagaagtcttcatagacagataaactcctggaaacacttcactaccatgttttttacacaggtttttggatcttcattctcagaaggtgaagtagaccaggcacggtggctcacgcctttaatcccagcactttgggaggccaagtcgggtggatcacctgaggtcaagagttcgagaccagcctgaccagtatggtgaaaccttgtctctactgaaaatacaaaaattagccaggcatggtggcaggtgcatgtaatcccagctactcaagaggctgaggcaggagaattgctgcaacctgaaaggcagaggttgcagtgagcctggattgtgccaccgcactccagcctaggtgacagagggagactccatctcaaaaaagcaaacaaacaaaaagattcataagctggaaaatgattgagtctcttttctaaaacatcacctccttactacataatatatagctgctttatgttttatatttttaaatgtttgcaaatgcttcgggttttgaaaatttgtttgaaactcactgtggaataagacatttcaaacttgatgtgttcatacatgtgtgtggctgtgtgtgtgtgtgtgtgtgtgtgtatgtatttctccttctttggatttcaaacaagttgcccctgctgattatacctgaggcctttttgctatataaccattaaggattattgcagaaagccttctaatgtaaaatattgactataatttatgtgtattaatggcaggttaaaaaaaacttttaaatatattttggccactagcgcattgataaatattcctttctctgactcatttgacaatttctgtgagtctgttttgtgtgcaagtactaaaaggagttggatatgtaatttaaccctttaaaatgcttgactgggtttttgggggctgtttcttttgtatgataggttgaataaaaattgtatgtaaggtaatgatggctgacataattttaatatttacaaagttcatatattacttgtcaatctttcaaaataagctttctctttccatatatgtatgtatgtgtatatgtacatactgcatgtacatatatgttttgtgcttcacaggaaaatagtagtttgtctttttgccttgatattggtctgtatcttaaaaggaaggcatttgtgattatgttagttgatttcatgctgtatttcttatatactaaatttggtattttggaatttttgaaaatagttccttactgtagaaacattcatgtgtgtttctaaaatacagatgaaaaagcctcttaggggactaaatctcaatctttaaaaactaggaataatttggaaagaatattcgaacgctaactatttaagttggaagcatgagtttattgtttggatacagacttgaaagtaaatatgagctttgttcctgcagtgattttttaaaaataggtagttgctttcatgtcaatcatgatctgcctttactaagcttgcattgatggaaatggataattctgtttttaggtagaagcagaagggtactatgattgtgaattgcctatatcagaagtaaaattcttcagcctgtaaataaacagttcagcataatactcatttaacctatattcactttttagaattgtgtagaaaatttgtgagtttgttttggtgctttaaacagaagcttaaaagtcactttcagggcatttacaacgctattttctggcagtattttgaaacaatatagatgagccctttatttgccattgctttcatgaaatacctcaagctgcctttgacagcagcttcaatttttgaacctccttgacaatcgctaatccctataggttaccggacccgctgttgagctttggagtggtccctgctggacacctgcttggccagcagtgttggtctttcctctaggcaatttgtgagctgtctgcgggggagggaggggaggagtggggggggtggtgaacaagaggggaaaggggagagaaggggagggcagtattgaattagattgttgatagcgtccctctgaggactgctattaagagcatgctactctgtacttcgctgctgcagaagagagagtgatatttgtgttactacagcatgttgtaaatgtgtgagattttgctcatctcagcttggaaataagaatagggaaaggagagcaacttgaatcagaagctactagaagaacctgcagagttctgaagcagtttatattcttcttacattttgcc

SEQ ID NO: 44372 - DNA, 2300 bp, Homo sapien
atccgaacccaaacagcaatggacttctattggataagcatatttgtaatatcttattgccagttctttttcttttttctttttttttaaactgagaatctgtgcaagctactggcagttcaaatgcagatcctgcagttgcccccatctcaacacccttgctatgagggttttctctttgtgtagataagggctgcttggcccacactggattatcccatttttactggcatttctgtgggagaaacttattataaagtaaccccacttgaacctttttatggcaggacaaagcagtgactcgagtgtacaccagctcagtttgtacttattttttttttaacctgtgtgccaggtttttgatacatgctaaaagtgattgtttggaatatatcacctcagtgagattgtaaacttctgtacaaggtgctttctacccaataagcatttagtgtgtaaggtaggtatacaataattattgaataagcatagtggagaagccagtggaagcattcctgttaacaaaggggaattgggttcaatacacttgcacgtaaaaggtaataatgcaaattctatgtatatttggagttctttgattatttggtaaagtccaacaatgtggtattatctttagttctagcaagtttttgagtagctgattattctcaaatttacctaaaacctactactagaatttcagtgtatgtaagttgaaatacaaagtcagcaatgttgaagatctcagatcccagagggagaaatcctagaaaacataaagattccacactcaccgcatcacttccttaagaagaagaagaagaaaaaaacagccaaagaaaaaaaatcacaatagtgattaaactggttgctaagagcaaactccctttattttcccaaggaggagtctggaattataagtagaaagggcaaaggaataggtgtaagaaggtggccccaggctgtaaccgtcaagaaggcaaagaatgaatagaagacaagcaaggggaaaaacaggcttgactggggttttttttgggggctaggctgatagagcagaatcaagattctgacttagaagagcagtcccaccagagtttggaagcagtttgcatagtggttaagagcctgggtaccagaatcacaccgcttgggatcctgagtcccgctctgccacttactatttatgtaacctctggcaacttggttaacctatacacctcagttttgtcacttgtaaaatggagacaatagtgtgtaacttgtagagtagctgtgaattaggtaagttgatgcttcagtgcttggttcatagcagacgctcagtaaaatgttaaactgttatttgtagtttttatccttcctctttcttaatgttgtgtactgcagcagggagggggagggatgaagcgcttatcccactagaagagtgatatttgtgtgagagcctgggtcaggcttattttgagacgtgggccccactgaggtgaggtggcaccgcttccagggcacaccctttgctcgggccccgccgtgactatgaggaggccgaggccacggctggcagaatgcacgggtggacctccttggagtggctaacccggggcggctgcactgttgtccctggatacttgacacttttcactttttctgcctcccggcactagaatccatgtgggctcacaccagagcctcccggtttccgaggcgtgagggccacttagcggtcattcagcttcagggtccggccctgtcacgctttcgctacagcctgggagttccgttcggaccccacacaccgtcctagccccggctccccgccaccctgcctcccgcgcaggcgccgccggggccacccccgccgccatgtttcccccgcccgcgcgctcccccccccactgccccctccctccccaactgggttcccgcccccctccctcagcagcccccccacaccctggtgaggtcaggcggaggctctgccgctgcggccgcagtagctcagctcctattcctgggaagcctggaacggggacttttgaaaataactgcagcggcattcgggttagggtccgtgctctccgcctgcgccaggacagggtgaagtggtcggggcgagcagagggtgcgaaggtgcgggtgctggtgcctcgcagcaggagggagccccggctgcgccgcgcgactccctctttggccctcggagcgcagcacccggcggacaagcggcgggacgccaggacgcggcgagcaaggtgaggcagggtcctgaagtcacaggggctccagcagccgcttcc

SEQ ID NO: 44373 - DNA, 2300 bp, Homo sapien
ccggatctagttgtctttttaatctgtcaattgtcctcagcatctagaacgcttcatgacaccaaattgtatatgtttactgaactgagcgactggtttccacacacggcattttgtttttgttgttgctgttgttttttgtgtgtgtgtgtgagagacagggtgtggctctgctgcccagtctggagtgtagtggtgctatctcagctcactgtagcctcaacctcctgggctcaagcgattctcccacctcagcctccacagtagttgagaccataggcacatgccaccacacccagttaaattttgaattttttgtagagacagggtttcaccatgttgcccaggctggtctgaaactcttgagctcaagaaatccgcctgcctcggcctcccaaagtgcagggattacgggcgtgagccaccgcgcctggaactaacacctctatcatatagagaaaactaacttttttttctttggaagccataaattcactattagatatctaggaagagaatacattcaggtagttaacatctttccataaatatatatttccctaccttatatctggtatctttccataatccaaaaagaaaacaaaaaaacctatcttagtgagcaaaacgtttttaaaagttagtactttgagttacatttttatacctaggaagttaattaacatgtttaagacacataaaacctaataatttttaggtttgacaaaagtcataccctcacaaggatccacaaatcccttgtctccaattctgaaacttcaaaagctctggaaaccaagtttctgtttttttttttttttagtaatttatttgacagtcaaatagatctatcttaaacttatttggcagaagcgtctgactcaaactgaatgaggctatttacttgtatttatttatcccgtatgaacaatcatatatcttgctgcaaaaatattaatatatttgattacgcagtgttttccctaaactccctggggtattatagaatatacagtatatgacatttggtttttacccaagtccactagaccacagcagaccttgccctgattgcttgacaaagtctagagcccctttccagtttctctgagaccatacccctggctccaatccagccttttcttgaatactaattgaggctgcacgaacagctcaaaatgcctatcatgatgtcagttggagaaataaatatgctgtgtgatcatactgaaagtcaatgttatcaccttgatggtcaatgacccgtggtttaagaaggaacatctcggttttttaaaaagtacctttctatttttatcaccggacgctgggcagttgaggatcagaattaagccattagctcgtaggcttgcaatgatatctgctcaataaatatttaccatttagctgacgcacatcttgggcagtatgtaagaacttctctcacactgtgttggcagcgacagacatgtgcggagaaaaagtaaccggaggcctaatactggctcagctccagcaataaatccatcattacaccatggaactggcacactccccgtgtatatctcaaggaccccaccctctggccggcaggatcatatctagggatctcaattagagatctcgtagtgaataagggcgagttattctcgtaacgccagaggtggtggacctgccgacgccctagggtgggacattccgggcttggatagtaagacatcgtaaatatacgccaaaatgtccacaccaacgtttcccgagagtatttctttacaagtaaaagaccgactcaaaatcacccctctcaaaacgcgtctctttggaactgcagagttagggagtaagactttctgcctgaccccacctacgtcggccgcgcgctctcagagccagggcaccacgctgctcctgcgcaggtcctagactcctcccttcgggaggctcaccccctcccttctcggctacttccggccctcaccgaacgccctcaacgcgcttgcgccgttttgataggcttctcgggccgaagtaatcggagcgctgcctctctggaaccgcccccgccacctcttcgccccgcccacgtattaccgcccctccgaaatctcgcgagggtaggtgcgcgtcggtattttgcgggcaactagctcttccagctgctgtaaattgctgctgcgggagaaactggagccgctgtagccggcgcgcccttcttcccttactgcgaggagccaccgcctctttcgcgctccttatacacctatcactgggagcggtggcagcaacattccctggaccaa

SEQ ID NO: 44374 - DNA, 2300 bp, Homo sapien
tttggctttgtagcttactaattgtgggactggcaaaattcttaaagcctttacctcagagtcctgcttttctaggagggaggtaatccagctacctaacccaaaggcctgtatgacaattaaatgagaatgtgtatactaggtctaatacacagtaggccttctttcctttcttttccagaacattgctctgttatcttcttttccagtagttccttcccttcaggttataaaagtgctgggtcactttatcgaagtctttttgcatttatagctaagctttttgaaaactcagaccgtgctaatgtctctgtatcttcacctcttattcaatctcaaatccattgtaatatgacttctgttatcactgttatcattgaggttctcagtgctcagtaaccacctaattgacaaattggttggactctggttagttttggtgaaagcaaggtaatttctaaggttaacaatttgaagtttgagaaaaactaacatatagaacatgctaagaaatcagggatgaatattactgagcagcagtaatacccagttcaagttagcatgaaattgtagtaaaccagattaggatggttctatgatgcattctgttaactttctgaagccagggaattgagaaagcagaagttgttcatggttggacatggtggcaggataagtgatctgggagatttaatattagtaatgacaagactggggagaaaatatattctaaatgttggcagaagataatagaaagcctgtttatattttaagctacatataagaaagggggccaggcgcagtggctcatgcctgtaatcccagcactttgggaggctgaggcaggtggatcacatgaggtcgggagttaaaggccagcctggccaacatggtgaaacctcgtctctactaaaaatacaaaaattatcccggcgtggagcacctgtaatctcagcttttagggaggctgaggcaggagaattgcttgaacctgggaggcagaggttgcagtgagccaagatcgtgccactgcactccagcctgggtgacagagtgagactccatttcaaaaaagaaaaagaaaggaagggaaaagacaaggtggactgggtatttgaactcttttcatggtcctgccatcagtccacatagtggagtttaggtgtagtctgtttaagaatgttaatctccctgcatctgctggtttttgggtcataagcttgagttcagagctaaacaacttgaattcttctcctggggatttggattatcgtggtttggttaagtaggctcaaaccattaggctggtattacaacaagtttggcataaatatgtaaatgaatcaggatattgagtcttaatgtaagtttaggattgaacttgattttacaggattatttgatcttttgtacctaagtattaacacaaatttgctattatgagggttaagagtatagatgctggaatcaaactccctgggtttatacctgcttcatcacttactagctttgtgaccttggacaaatcatttgattagttccctaatttgtaaaatggtgacagtaggagtagaatctcataaggttgttgtaaagattaaaatatgtaaagtgttaagaacattgcctggcacatactaagtactatgtaaatgattagctgttactgtgttcttataaatagcttcatttttaaaaactacttttaaccctttcatcagattattgaaagtattattgaggagagtcagaaagtactacagcttgaagatgactctttggattccaaaggaaaagaactctctgatcaagctactgccagtcctattgtggctagaacagatctgagcaatatacccggactgttagccatagatcaagtactaccggaagaatcccaaaaggcagagagtcagaatacatttgaagagactgaattagaattaaaaaaatgctttccttctgatgaaacctgtgagaaaccagtagatgaaaccacgaagttaactcaaacaagttcaactgagcagcttaatgtgcttgaaactgaaacagaagtattgaacaaggaagcagtggaagtcaaaggaggtggtgatgttttagagcctgtgtcctcagactccttatctactaaagattttgccgctgtggaagaagtggcccctgccaaacccccaagacaccttactccagagcctgatatagtggctagtacaaagaagcctgttccagcacgcccacctcctccaactaatttcccacctcctagacccccacctccttctcgacctgctcca

SEQ ID NO: 44375 - DNA, 2300 bp, Homo sapien
aagttttctgacccctacctttgaggtagccacatacagtccagattaatagcagtcttagtagagaaatgccttttggccaggttcaaatagaacatttatttgttttcaagaatactaagacattatttcatgagcagcaatagttttggttcctaatgtttttcagcatgctgggaaaaatgaaggactgaaacgtaatgttccatttagattttcagcagactccattatctgaattatgaaattctttagaattatatgtggtaataattgaaaatttatagaaattgattcagtctaatttctgtttataaaattatatttccaggaaaatggaaaagcacctgatgggcagactgtagcaggtgaagtgatgggccctcagagacctagatccaactctgggagagagcttactgatgaggtagaaatagatttttttgttcttgttcttaaaacataaagtacaaaaaacataatgggaagatgaaaacgttctggagatggatggtaatgatggttgcatgacaatgtgaatgtacttaatgacccagaactatacacttaaaaatggttaaaatggtaaattttatgttatgtgtagtttaccacaatttaattttttttaagtttattgctgttacacacaaaaaaaaatacagaagaaaaaatgaaaattgaagattgtctttgttgatatgctggatgtagcatctctgacttaaacttgccctttcactgtgttgcatagtggaataaatatattgaaagcaaggtttatattttatagaaagtgggctttaaaagaacttgatattgaggccaggtgtggtggctcactcctgtaatcccagcactttgggaggccaaggtgggcaggtcacttgaggtcaggagtttgagaccagcctggccaacatggcaaaaccctgtctctactaaaaatacaaaaattagccaggcatggtggtgtgcatctgtaatcccagttacccagaggctgaggcaggagaatcacttgaacctgggaggcggaggttgcagtgagccgagatcacaccactgcactccaacctgggcgacagagcaagactcggtctcaagaaaaaaaatttaaaataatataataataaaagaacttgatattatgaatatatgttataccaaaataaatttttttattattttaatggtttcttatcattaaaacttagtatgcacctattagccaacttattcagaattaaattttacagcaaaatcttagttgatgtttctttaaaacaatacatttcttaaaatattgcactttggaaaacagtttggcaattcctcaaaatgtgaaacatagtgttaccatgacccagcaattccgttcctttgtatataccaatgagaaatgaaaacatatgttcacacaaaaaaatgtacacaaatattcacagcatcatcattcataacagccagaaagtggaaacaacccaaatgttcatcactgattggatggataaataaaatgtggtatattcataccatgttatattttttagcaattaaaaggaatgaagggataaagtactgatacatgctacaacatggataaaccttgaaaacatcatgttaagttaaagaaaccgacataaaacgccatatattacaggatttgatttatatgaaatgtatggaataggcaaatctatagagacagaaagtagattggtatttgccaggggctaaaaagaaagggaaatgaggtgtgactgctaatgggtagggaatttccttttggggtgcagaaaatattctgacttagtggcaatagttgtacaactctgtgaatatactaaaaaccattgaattatatgctttaaatgagtgcattttgtggcatgtgaattatatctcaataaaaatgttagaaattattgtgtgcagtattgaatatatctaaaaagcctttagcttaaattttaggggattttgtagactcaaaaagataattaaattgcaggtcatcttggtgtgattgttttttttttttaacctcaggaaattttagccagtgtaatgattaagaacctggatactggagaagaaatacctttgagtcttgcagaagagaaactaccaacaggcattaatcctctcactctacacatcatgagaaggacaaaagaatatgtaaggtatggcctaatgttgttatttgtcatttctagtatttcagagttgttaagatttctctgttaatgaactatgacaacccctaatttggtttcattcagtcttttttcttc

SEQ ID NO: 44376 - DNA, 2300 bp, Homo sapien
aactgtgctgaattcttttatcagttctgagctttctggaggagtctttagggtttccgaggtaaatgatcatatcgtcagcaaacagtgacagtttgactttctctttaccccatttgaatgccctttatttctttctcttgtctgattgctctggctaggacttccagtactgtgttgaagaggagtggtaagagtgggcatccttgtcttgttccagttctcagagggaatgctttcaatttttccccattcagtattatgttggctgtgggtttgtcatagatggcttttattacactgagatatgtcacctgtatgctgattttgctgagagttttaatcataaaggatgctggattttgtcaaatgctttttctgcatctattgagatgatcatgtgatttttgtttttaattctgtttatgtggtgtatcacatttattgacttgcatatgttaaaccatccctgcatccctgctatgaaacccacttgaactgggtggattatcttttcgatatgttgttggatttggttagctagtatgttgttaaggattttagcatctatgttcatcagggatattggtctgtagttttcttttttggttgtgtcctttcctgattttggtattagtgggtgatgctggcttcatagaatgaattagggaggattccctctttttctatcttgtggaatagtgtcaaaagaattgttaccaattcttctttgaatgtctggtagaattctgctgtgaatccatctggtcctggactttttttgagatggagtctcactctgttgcccaggctggagtgcagtggcgcaatctcagctcactgcagcctccgcctcctgggttccaacgattctcctgcctcagccttcctggtagctgggattacaggcacacaccaccatgcccggctagtttttgtatttttagtagagacgaggtttcaacatgttggccaggctagtcttgaactcctggcctcaggtgatccgcctgcctcggcctcccaaagtgctgggattacaggcatgagccatcgtgcccagccagtcctggactgttttttttgttgataatttttaaattaccatttcaatctcgctgcttgttattggtctgttcagggtatctatttcttcctaatttaagctaggagggttgtatttttccaggaatttttccatctcttctaggttttctagtttatgtgcataaaggtgttcatagtagccttgaatgatcttttgtatttcagtgatgtcagttgtaatatctcctgtttctcttcttaatgaggttatttggattttctcttttattttcttggttaatcttgctaacagtctatcaattttatttatcttttcaaagaaccagctttgtgtttcatttatcttttgtattttttgtttgtttcaatttagtttaattctgctctgatcttggtaatttcctttcttctgctggctttgggtttggtttgttcttgtttctctagttccttgaagtgtgaccttagcatgtcagtttgtgctctttgagtctttttgatgtaggcatttatagggctatgaactttcctgttagcaccacctttgctgtatcccaaaggttatgatagattgtttcattattgtcattcagttcaaataattttttaatttccatcttgatttcatttttgaccgagtgctcattcaggagcaggttattttatttccatgtatttgcacggtttcgaaggttccttttggagttcatttccagttttattccactgtagtctgagagagtgcttgatataatttcaattttcttaaatttattgaggctcgttttatggcctatcatatggtctatcttggagaaggttccatgcgctattgaatagaatgtgtattctgcagttgttggatggaatgttctgtatatatatctgttaagtccatttgttccaaggtatagtttaaattcgttgtttctttgttgactttctgccttgatgacctgtctagtgctgtcagtggagtattgaagtccccaactattatcgtgttgccgtctatctcatttcttaggtctattagtaattgttttataaatttgggagctccagtcttaggtgcataaatgtttaggattgtgatattttcctgttggacaaggccttttactgttatatcatgtccctctttgtctcttttaaatgctgttgctttaaagtttgttttgtctgatataagaatagctacccctgttcgcttttggtgtccatttgcatga

SEQ ID NO: 44377 - DNA, 2300 bp, Homo sapien
gggcgcaacaaggttggaagaaaaattactggcattgagcctttacctggagaaaataaggtactacagtattcaaaaccatctctctccatactatatgtagattcttgaaagttcttaatatcttggcaaaaaaatgtattctctttgttgtggaataccgcttttcttctagttttgaggtatattagtttgtatgtgtgtaacaccctttttgggttgtagcttagcttgtactaaaagatgatatttttaacttttcatttgatctacttttagatattggtaacctcaaatgactccagaatcagactatatgatttgagagatttgtcactatccatgaagtataagggttacgtcaatagcagcagccagatcaaagcaagtttcaggtaaattggcaatgagatgttcccaaaagagatcaggacatttctcccctagttccatttttccattggtctatgccttatgtttaatggggttcttttcacttttgcaagtagtagtttattatcatgcaatacgtaccttgtccacctatatagtatatagaattcgaattgaccctgttctgcaaatgaagaaaccaagactcagaaaattaagtgattggcctaaagtcatggttgtagagccaagattatgaagactctcatctctagagtttttgcttttgtacctttgtttacgcttttaagagggggcttacggctcatcccgccactcccctccctgccccattgtcttgaaccttttaggaaaggaaggaaccttttaggattctaagaaagcattttaacaccccacagcacagggtcttgtattcaaaactttacatatcattattatttaaatttctaatttgggttctggacactctcctgaaatagggttagctaccttttcttctttctagccctcttcttttgccgttttcttaccagttcttttttcttgaattatacattaattaattcaattggtaaagtattctgctcctgtctttcacaccttaaatcatcattcctcccaacgtggattaactaacatcacagttacttagagctttgatgcaaatacaagtgccaggccactacatcacacgtacacatttagaacatctagagtgagaccatgggtctacatattcaacaagacccttcaagtgttattttaggtatcacaaagtaggaagcactgataaaggaaacctttaaacatatacacacacacattttatttgcttttcctttctccccaaaattcagccatgattttacttacctcgttagtggttcagaagataagtatgtttatatctggagtacctaccatgacctaagcaagtttacttcagtcaggagagatcgtaatgacttctgggaaggtattaaaggtaagtacatacttgcttttgtgtgtcttataagagaatcaagttacagtggatatatactagaagtaaattcatgaccggacacagtggctcacgcctgtaatcccagcactttgggaggcccatacgggtgtatcacgaggtcaggagatcgagaccatcctggctaacacggtgaaactctgtctctactaaaaatacaaaaaaaattagccgggcatagtggcacacgtctgtagtcccagctacttgggaggctgaggcaggagaatcgctggaacctgggaggtggaaattgcagtgagccgagatggcaccactgcactccagtctgggcaatagagtgagattccgtctaaaaaaaagacaaaaaaaaagaagaagtaaattcatttaggcattattttagagaggcagtttgacaatgataaagtgccttgcatttggctttgcttgttttatctatactaaggaagaactttggtctaaaatttgagaagtcagggaatttcagaacttatatgtgattttttttagaaaaatttttgggttttaaatcactcttagttacttctatgttagtttttaaggatatttggcatataacatacactatcgtgtttgtcttggtatccaatttgtcagttatcctgaagtaaattttttccacagcccacaatgcagttgttacatcagccatctttgcaccaaacccaagtttgatgttatctttggatgtgcaatctgaaaaatcagaagggaacgagaaaagtgaagatgctgaagttttggatgccacaccttctggtaaatctttacttgtcctatatttttttctagtcagcacttagtagcctcatttatctcatttgagtataataaggttttcactagtata

SEQ ID NO: 44378 - DNA, 2300 bp, Homo sapien
gttcaatgctgtctggattctacattggcttctctgagattgccttggccttgcctcatggttgcaatatggctgccaagggccaaagcattgcaagaaaacatccctctcaggaagaaagtggggcctgggcctctctcctttttttttcatcaaggtagaaaaactttcccaggaaccctcctctcacacttccctcttatatcttattggcccaaaccgattgggagtctagaccatcccactagtcaataagagggagcttatcatggttttttcatcagtcatgattcatcacctggagttgggcctgccttccttaaaccctgtggctctgccctatatctgaagtaaatctgggctctctttgcaagcaaaaagtgttatagctattgtggtggtaaccaacagcatgagccacacaggcatttatggaacagagggtatgaattcttggagatcagcctacacgcaacaattaacaaattttacacgtactgtgcaaaactaagatttgtgacagaatgtctttagaggacttccaggtcccaggccctctaggagcctccatatatgctttattgagactgatgggatggctgaaataggcttactgcgaagagacttggccttttctgggttcaaagaaaccatcaccacgcatgcccttgtttccataataaagtcccctaaaagactgtttggtctttgagggtggggaaagtgcccgatgggtggtggtaggactgctttcagaagggctgctcggtcccccagactgagggccattttcaaactctcaacaaatgaaataaccagatagaaaactgccaccatcagtggagcctttcactctgcacttcaggaggtctgacagggtcactagtacttcaagattcccgtccctatttctgtcttaagcatgttcgttttataccctgttatgagatgttctttgattcttggaaaaacaatttcttggaagctgaaaagagtaaggagatgaataggaaatggagaggtgagtgcagggcacttgtaaaagctactataagattggtaagtccaccaaacccagggagatggccttcctaatgcccacccccaccccactcctggtgcagtcagtgctgacctagggatcacctgccacaggctcatcctaatgcccacccccaccccactcctggtgcagtcagtgctgacctagggatcacctgccacaggctcaggctccaccacccagctctcccccgtgggggacggagcgaggggtgccgccacaataagttcccacttccagaagcatgctctctccccagtgttgccccctgttaggtgagccaactgagtaggaaaacggtgtgggcgaggagggggacccagtcgagccgctcacgctggaaagcagctctctgtccttcgacattggtgcgacccttccccaaggagcacacaaaaggcggctgctccacgttgttttccagcccctagccgcctgggccctgggggcttgcggggtggagggacgtgagagttctccagccctcctgcgggcactgcagctcggaggcgggagaggagcactagggcgggagaggagcacgccccactcttggagacatttcatcacccctctctgttcccccaccccaccccgccctccccactcaagcggaaaaaaagaagcagcccagatctcccctcccggatgcggctgcaccagcaacatcagctgcgggcggagcccgagcggtagccacttcccccctcttccctcgtgaccctcgcccccacctccagttctccctccccctctacacacccttccccatcagacacaccctcctgcttcggctggtggcgatcggagctcgggccctctaggggagggagctgccgccgccgacgccgtggggcaggacagtgagcgggcgaagcgagcgagaaaaggagggaaggagggaacgagggaggagcagcgggtgggaggtgggagggaggagcagcgtgagccgcgccgccgccgagctgcgatgtggccggccggccggcgagtaaacagagggagcagcagcggccgcggccgccgcgggccggggcagtgagtccacccgcccgccgaggtccgcccgcccgccgagacccgcccgccgccgctgccatggccgaagtgcgcaaattcaccaaacggctcagcaagcctggcacggcggctgagctccggcagagcgtgtctgaggccgtgcggggctccgtggtgctggtgagtggccgggggacggggcatcccgggggac

SEQ ID NO: 44379 - DNA, 2300 bp, Homo sapien
attttctcttcttctgcctctctctttgttgctggctgttgactctgcaagtggattctgtaggctgtcccactgaagcagcagaatttcagttttagatttgaacaattcaaatataaattttttcatattatttttttcatgttacttttggcctgaaagatgtattctagttttgttatagataattactgtgataactttaaaaagcaatgtgttatacaaagttagtgttcattacatgttattcatttgaaatgacctcagcatgtaattttaagccttctattcccatcattttaatgagagatgtgaaccattgtcatgaaaataagcaaataggccaggcagggtggctcacttttgggaggctgaggcagaaggatcccttgagctcaggagttcgagaccagcatgggcaacatagggagaccttgtgtctactaaaaataaaaataaaaataaagaaaataagcaaacatgcatatataatcaccattatgattaacattttcctttaatattaatctagatttcttccagcaaacttaaatgtagattaattgaatatgagaatatatgtatatattctcacatatatgagatatgtacatatatgaaagatataaatatacccacacattctctttctgttcctttgcatactaatacaataacatttaattgactggcattgcaaaacaagctgatgttttctgctaggactcttttctgttgatagcacgtagcccacatggccccttcccgagatagaagctgtagcatttatcagtctaacctgttagggtattccttacactgatatatatttttgtcattcattaaaaaaaatcaatgatatttatacaagtcaaaaataaatatcaatgttatttatttttactggtttttctaaaaagaaatgtcccttaaggcttttatatattttgcttggtcatgctatggagaaataaattgatgtttcaggtactttgccagacgttaagttgttggcaagaacgatcttgccaaataatactctttccataattaaagttctcaaaatgatcagggatcatattggataatcagatgggtaattaaaaatgaccagcttaaattttaaagccaggttcttcgaataagacaagatgcataggaatgcatttcctcaataatcaccaggagctgctcttcccatctcaccctgaagtgacttcagatctgtcatcctgggaaattgcaacttgaataagctctgcctttcactgtgacaattgcttgacatagcctgcagtttgtgacttactgaaagaagcatcaattcatcagagagctcctaatcccttttctcacctcttttatcagactgtcaaagtctgtttttaggggagaatagagggacagcatgaactcatcaggcagtccccaaccttttcctgttcctgtgggctttgctgtgagttgtagcaacaggctactccttaactattgtgaatccctaactccaaacaaatggcatagttccattaggcctgttgatttaaagctcagcacttggggcactcgacaacaactggcaggcaactaatgactctgtgcttccctgtgagtgccctgtaaattggactttcagaagcaaagacagtggtacagtgtagatgagtacatgtgtaggtgagatggaaatatgtaatgtgggtatatgtatatatgtatatatatgctttttatgtttattcttggattcgtggtaatagaaaccaaattaaaatgatgtaatcatggtttgcaattaaatgggaaaagaatgctatagtgaaagggtcaggagattcagatatcagaatgctttatacatttcaaagtgttaagtcttaattattgttctctagatatttgattaactgagggtaaatcatgtgattttcattcactatcttagaaaaatgaagataatgataattcctaacatcttgtcagggttgtctgaagattgtccaggcacaattgcctggcaagcttttgaggtttttagttcagagaaactattcaaatgcaatgtatatgtaacaaatgtatcattgctgggttttccccatgtaggtattcaagagacgatatttttacttgacccaacttcctgacggttcatatattctcaattcctataaagatgagaaaaattcaaaagaatcgaaaggttgcatctacttggacgcctgcattgatgttgttcaggtaaggccattgaggtaatccttctctttttctaacagggttattgataaacttttaag

SEQ ID NO: 44380 - DNA, 2300 bp, Homo sapien
ttctggaattaagtggtggtcatggagatacaactttgcaaatatactaaagaccactatatgtacactttaaatagatgaattgtgtggtatatctgaatgaggtctcaataaaaatttctatttaaaaatgttgcttaagaacaagaaatagattttcctttcattttcctattttctgggctggaaatcttttctcatttgtcaaatttttagtttaactactttgacagagtcatttctaatggttcttctgctcatgttactttcctctgctttttataaaagaaaaggtctgggtaaagcatttctgtagttgaactagtaaagatgcccgtcaggcacatttcggagtctgagaaagccatttagtctacttagagaagcaatgttttagtctccttttaagaattaaagcatttgccaaattaaacacataaatgaaaacattctaaccagatttgtgttgacttctgtgttcacagtatcacacacacactcacacacagagtcacaaataattttaaagaatcagaaagcagtagctttaaaaaatgttctccagccaataccctctctcatatgccaaaactcagtccagagcaagcttttttacagctgagttataaacacttgaatcccagagtaatttctataatggaaatactgacaccactcaacttgagtaacacagatggctctggcttttttagctagaacatgatgagttttctaattgaaagccaaaaggctcttttggggagaactgttaagaaatgtagagattggggaaaatctcttgatggattcaagtcataaacactatttcctgcctgcattctcctacctacacctacacctcttccttctgtaatcaggacaagtctgcctaactaaatgatttatgcctactgccttgtataaatatggagtgtagccgtgactttgtgaccttaattttccatagttccttaccctagggttgccataagaaattttggaacatgtgattgttatctgaaatagtctcagccgtgagactctgcactcttagtgtaagaatggatgagaactatctgagccttttgaaaataaatccaccaaaaatatttcccaaagcataaagataatggtatcgatgcgcttttaaaggtttaaaatgttttcatataatctcactctaggtttctcaataattcttgtagatggaaaggccatgttgctgttcccatttttatggtcaaagaaatagagtacataacttgttagtggccaggctgggattcagagtcgatccaaacccattgttccttccccagtactcagttgcccagcacctgaactcccacatacagatccctggagacatcaccaccctgccctgccccctagcagtcagccatttgtgtagctgattgcatttgatatttcatttctcacagtttgttattatcttggcagttgggtttgcctgggtacctttgctgaaagatggtagaatcatcacatttgagcagcagctgccagtttccgccaatcttcccccaggctacttgaatctgaatgatgcagaatcaagaagggtaggaaaatactgcatttgttgaagtaatcatgattaaatgtgcaaaaaatagaattctgttggtctcgattgtttagtacaatgttactcaaagtggggtctgagggctggtgcgggtccacaacaaagataaacatggaatgtgcatgtttagaatttatagcagtttgacaaagtaattttatgtctgttgattttaataatttttttagtggggctcagattttgtgcataattttaaaaaattatttaagtaattcattttatcataatttataaaaatagtctgcaaaggattggaaatgtaaaatgatttatgatacatttattctaaaggcagggtattttctccagtaatctcttggtatgaaattaatacattcatttctgaaaaaaatgtttaaatgcataaaggtattatatgttattcatctatccattattatgttatagaatctcaattttctgttcacagcaatgtaacgtggatattaaatgggtagatggtgcaaagcctttgttgaagattaaaagccacttagaatctaccatttacactcaagtaagttgcatcatttgaattttgtcaatttttatacttgagtttgtttgattaaaatagaccacatttgattcctacagccttagagaatatgtgacctgcaagattttctcattagtaataacatctgtccaggtgcagtggctcatgcct

SEQ ID NO: 44381 - DNA, 2300 bp, Homo sapien
catgtggctattgagacttcaactggggctggttcagctgaggaacagaatttttttttttttttttttttttgagacagagtttcgctcttgttgcccctgctggagtgcaatgtctcacttcgcctcccgggttcaagcgattcttctgcctcagcttcccgagtagctgggattacaggcgcccaccaccatgcccggttaattttgtatttttagtagagatggggtttcaccatgttggtcgggctggtctcaaactcctgatctcaggcgatccatccgcctcggcctcccagtgctgggattacaggcgtgagccaccgcttcctgcaggaactgaatttttaattgtgtgtaattttaattttaatcaatttaaatagacacaggtgactagggatgcatatttaacagaatgtggccccaagccatcaatttttacttgaaagaataaggaagtattatttttatgtgaaaacaaacaaggatatattgtagagtagaatgcaaaatgcacctgaattttgaaatcaaaacagggtacttaaattgtgggctgagtgctggaagtttctggctttggctttgctgcctctgctgttgccacaacctcttccagcaggcctcacaccacagccacacaccatttgcgggcatcgctgctgttggggatagtgttgttgaaaatggaagaaactttaggccagtggtttccaaaacatggttcccataccagtagcatcaatatcgcctgggaacttagtaaaattgttaatcattgagcttcactccagacctacaaaatcagaaattccgggagaggggctgagcaatctattaaaagggcccaccaggtgcttctgatatatgctaaactttgaggacactgctagtctcttacccccaattatagttcatatcattacacctgccccggctctcccttccttttccccgttgacatgcttttcattgcgtctttattcctttcctttccttctcctttcctttccctttcctttccttttccttttcctttcctttccttttccctttcccttttcttttcctttccttcttttttttttttttttttttttaggtggagtctagctctgttgcccaggctggagtgcagtggtgcaatcttggctcactgcaacctctgcctcctggggttcaagcaattctcctgcctcagcctcccgagtagctgggattacaggcgcccaccaccacacccagctaatttttgtatttttagtagagacagggtttcactgtgttggaaaggctggtctcgaactcctgacctcatgatccacctgccttggccacccaaagtgctgggattacaagcatgagccaccgtgccgggccttcatttttttttttttttttttttgagacagagtctcgctctgttgcccaggctggagtgcagtggcgtgatcttggctcactgcaagctccgcctcctgggttcacgccattctcctgcctcagcctcccgagtagctgggactacaggcccccgccaccgcgcctggctaattttttgtattttttggtagagacggggtttcactgtggtctcaatcttgtgccctcgtgatccacccgccttggcctcccaaagtgctgggattcagccttcattttatctttctattctcttccttttattctcactagaggagatctcaatatttacctaatttgaagtcttttactggatagtagctaccaccatgcttcagacacatacagagatttagaaacagatgtgacatctgggttgtcaaattaaatatccttcttttgaactaggaaatatatttcataaggcccaagcatgttagatgctgaaatctttgttatgcctaaactatcaccattatatctaatgcaatcatctcacttttaattattcaggcagtgttagatgttttgggggctagacatgacgatcttaagaatcaaaatatgttaattcattatagcatgacatgctgactcttgtgaatgtcgtttcagggttctcttacatattgtatcaaagtgccatgaagaaggcttggatagttatctaagatcattcataaaggtttgtggagtaaagtttctttctgagcaatttgttttatgtgacaattttgtcttacagttcatttttttttgtttgtttatttgtagtatagcttccgacctgaaaaaccgagtgctcctcaggcccagctgatacatgaaaccctggctactacgatgatagcaatattgaaacagtctgcagattt

SEQ ID NO: 44382 - DNA, 2300 bp, Homo sapien
gcttgcctctctcagatgctgtttagtgacaccttggccacaattttgcaggtgtagatgaaaccacctgattggatttattcaaatcaccaaaataacaaattgattaccatttgtaaaatctactcagataaagccacctttgttagtcagtcctggcccttgtgcatagaaggtgatagggattcacaaaagagcaagaccaatgcaggaagaaaataatctgccttggtctgtatagaagtatctgctgagtggtggttttagtgatggaattatagccagtgaaaatggagaaaaaaatatttttaaaccatagcactcctattcagctacccccttattcgattctgaacatgtatagctcacataattcacccaatatttatttataactatgaggaagtcaggaaaaagaagaggtggacagataatcaggatttaggattaaattggactactcgcagcatttattaagtcccaactgaatataaagcattgtattaagtgctgaacaggccaaaagaaaaatagaaaacataatccttcggcttcatggcctatctaattaaatagcacgggagaggaaataaagatagtagaaatctaccacagaaattactaaacttggctgggcgcgatggctaacgtctgtaatcccagcactttgggaggccgaggcgggtggattccaaggtcaggagttagagaccagcgtggccaatatggtgaaatcccgtctctactaaaaatacaaaaaaattagccgggcatggtggcacatgcctgtaatcccaactactcaggaggctgaggcagcagaattgcttgaacccgggaggcagaggttgcagtgagccgagattgcgccactgcactccagcctgggtgacagagcgagactctgtctcaaaaaaaaaaaaattactaaacctgatcacaatcccctataagtacttataaagcaagtcccaaccatgatattaacatctgggatttaaaatagactgaggatctagcctgggcacagtggcttatgccttaatcccagcacttcgggaggccaaggcaggcagatcacctgagctcgggagttcgagaccatcctggccaacatggtgaaaccccgtccctactaaaaatacaaaaagaattagttgggcatggtggtgcacgtctatagtcatagctacttcagaggctgaggcaggagaactgcttgaaccctggaggcagaggttgcagtgagctgagattgtgccactgagctccagcctgggcaacagagtgagactccatctcaaataaataaataaataaaatagactgaggatcttaaaggaagggaaagacttagttcgaagtgattattttctgatataaaatatttgtttttgagtgatgatggattggaatgaaatgagactgttttccttattgttcttatgtcccatgtatattttcagcccaatatataatatttactaaaacagtcaatactgtcagactattcagttgtttagtttgtcttttcccactttataagtataaatggataagtaaatcaagtattattacatagaatttttcaaatttatagttgtgacaaaatctcttcagctataaagaaatctgttaaaacgttgcaaaatatataattattttattgtagtttctatcctaagatttctatgagtttaaaagaatctaggggaaaaaaaagaattagggactttctttctgactgaaatgatcattaaagctatcgtttagcccaaaatatgagtgctcctgtcttgtaaattttgcatgcttattctagatgataaaagaattgctcagaatcattaataataaaaattatagctcttgctagcatgatcacatattattaaataatacagtattttaattataatcatgttttgaatattttcataaatgggttttaaatttcattgtactgcagattcaaatcttgaatacagtttatcagatgagtattgcaagcatcacttcttggttggtctacttctgagggaaacttccattgctcttcaggacaattatgagatcagatatacagctatctctgttataaagaatcttttgataaaacatgcatttgacacaagataccagcacaaggtaaggatatccatgcagtcatcagtatcacactggtagagttctactatgattttttatagaagatgaagtttttgtagcaaggagcattatataagcattgaggaaaatttatttttgcttcaaatcataagttgttttttttttgagac

SEQ ID NO: 44383 - DNA, 2300 bp, Homo sapien
ctgtactcacctgtagtccatcctggctctgcgaaaagcatcccataattcttagatattttagcagtatcttcctatagtggcagctgctacttcaatgtcttaaactatttatagagaataaggcattcatcctcaagagttctaactctgaatatctcctttaaccctagcacgctattttagtgaggagaaattcaagtttaaaatatctaatgtgccttgttatttaaaacgaagcacatcctggcaggattaatgcagtctttcattcttttgtaatagagtaatgatattaatttgggaggaaaaaatataggtcccaaaattgacaatcttagggtcccagcatcacttaatcagaatatatcctcccaactcttctatcaagtcgtttcacgcctaccattaaagtttgagatgtgactgccttaaggcagaaagacctcattttagacgagtaaagttttgccatgttgttatgtaaaatcattgaatcgtataaaattatattagaagggactataagaacaataaattccaactctcaatttacaaatgaaaattgggattatgacttagaacaaccagctatggcaggaccatactcgaacccagattttctaatatgagcactttgtctcctatatcatggtgctcttagtgtacatcagcatcacctggagggcttaaaaaatagatgtctgggcctcaccccagggtgagattcagtaagtctggaatagggcctgctaacatgtatttctaagttcccaggtgatgttgatgctgctggttgggtattgttacccttgagaaccagtggactatacttccactggttccttgagcctttgggtaaacagtaatttattcacaaatgtttctcttttacaccatttagaaattgtgacaacaggtactgtcatagctaaggcaaataaaggtcagagaggttgaatgacttgctagtagtcacatagtagctaggcaagcaatcagaacctaggtctgtttgctccaagtaaaagttcttccttagtaaattccaccctagtcaatggtgcatccccagtttagctcaactgaaagtattagtttttaaattttttagattattgttattctattcatataaatccccaaataagtcagatcttgtcatgcttaatttctgatattttttaaaaagtcattaaataataggaacacatcagtactttgtagaggtactaattttgaagtattattgggtactcctaagtgtaattatcgtaatataattagcccattttttaatttatttatagtttttagaaatagggtcttgctctgtcacccaggctggagtgcagtgacacgatcagtgctcactgcagccttgaactcctgggctcaagcagtcttcctgcctcagcctcctgagtagctaggactacaggcatgcaccatcacacccagctaaattttttttttttttttttttgtagagacaggttttgctatattgcccaggctggtattaaactcctggcctcaagtgatcctcccacctgagcgtcccaaaacgctgggtctacaggtgtgggctactgcgcctggttttattagcccttaagatagattttctaatgtatgatttggaggttggattttaataaactctaaggaaagattcaaatgaaaaagtttaagatgtttcttatgctttcactccatgtaaaagctatctttccttaaatagccatgattattttaaaattttaccactaaaacacatggcatatgagaatgaaacacagtattcatggctatatctttgtgaagactccaaggtaatttctagtgatattactagctattactaggaaagaaagattcagcccattcaccttcaagttgtgatataaaatttagatttatgtttagaattttcccaaacagatctaatgataaaaaaagagttactgagttaaaggctgtggaaaattgtactgatactatttcacgaacatcctgtccttacagacccgacagagttctacaaggagtagtgtatcccagtataaccgcctggatcagtatgaaatcagaagcctcctgatgtgctacctgtatatagtaaaaatgatttcagaaggtgagttaccatcatattaagcatggactgtactagacatacaccctcacaggttcacaaattcatgcaacaatatttgatcatcatctggaggcagagcacatgcacattataaacagttatttggagactctgactttaaaatgtttcttaaattgaa

SEQ ID NO: 44384 - DNA, 2300 bp, Homo sapien
atgcagaaattacctagtcaatgtggggtagtacactgaaaaaggctggcatgaatagtcaggaaatgtggatggcagttctagtttggttatcatgtgaccctggaagtcactgagactcacttgtgtcatccataaagggaagggagtggactaacttgcccttaagctctcttctacctcttaaattctattagattttcgtatttaaaaacaaagtttccatactttaagtagccagcaatttttagcccaaaatatgattggatctgtttgcccaaatacccattgtgatgagatgtcctgtcagggtagatgatgtccgggcagtctggctggcttccctaggcgcgcacttagtgttttttctcagatgtttgcctctcagtgcaaatcatcattgctatgattttaaaaagaaggtaaaagcagttatctagcaggattattggagggggaaatgggataatggacgtgagagtgctttgaaaagtaaaaacggtgtgaccataatgtaagaactcaaaggtgaaaatcttgcttgctttcacttcagttatacagattttttttttcctttttcccctcttctctaagtaattaagttaattgcttcagacctcgagattttctatggaaacctggcctgtgcttttcaaagaggcttataaaggaaaattgaattagatactaatataaaataggctgcagaatacctttaataaataggctacagatccctttatgaagtattaggtttgttctatattaaaatgcaacacaactccatgtttcatcgtgccaataactaagaaagccattagatctcatgatgtacattgtattccttcctcctattctgatacctctaatttatttaacaaacatttatatagtctcttggtagatatcaggcactgtcctaagtgctttacaaatattaactcactttttcattgtgaggctgggaatgagaaaggggagtgatctttttgaaacaatggaaatgttctaaaattggattgcggtggtcacccaactctgttgccgaatttactaaatgtaatttaattgtatacctgaaactggtgaattttatggtttgtaaattatatctcaataacttaaaaatacaaatatgaactcacttttaatcctcataatagccttatgatgtagatactgttattattcccttttgataatggggaaactggggcccacaggaggttaatgtcaaatagctgggcagtggcagaatcaggattgagatctaggccagttataagagaccatgattctagccactataccatgccttgaaatatactaaggaaagtgccagaaaaatcaaacaccattcagggattctggctgtcagtattatcattagattgttgttgttttgggttttgttggttttggccaagctgtaacctgctggttactttcttgagggttagcaggatagggctggagaaattaaccattgctgattaaaacaaagttgacaaactaaaaggtatttctctacaatttgttgtttctttgcaagggacatttaaacaatttacatagtctgttcaattgtgatacctgttaattatctctactcatagagggcttattttttcacaaatggctaaccatatactaaacatacttttaaagtaaattagatcataatctaataaaatagaactggtattttccttcattcatacattacaatatttagtctctcagaaatacaaaggctgatttgcttgtattcattattaatttattgatttcttaattgagaagcaatatggtataggttaatagaaaatactcttcccatactagtcctgtatattgctgtgttgcattgaaaaaaaatctacctgtttaaaatgttgggattaaatattttagatatcatgtatgtagtagttgtttgagatttccaagttgaaagatggcacaaatattttgaaattatatgcaagagccttttattttcctgaaacttccaaacagtggtttcataaacaggtattggtgaaatcagttctgtcattctcagtggggcataaaccatattttttaatgttttatagacccaacttttaaataatgatggccataacccattaatgaaaaaagtgtttgatatacatcttgcttttcttaaaaatggacaatctgaagtgtcgctgaaacatgtatttgcctcactgagagctttcatcagtaaggtaaggacagaagcttgggagcagccggtgggctctcttcattgcaaaaaggaaagatgg

SEQ ID NO: 44385 - DNA, 2300 bp, Homo sapien
tgtgtcttccacaaagcagactgaatacattcttaaaggaacaggccacttgtctcttttgataattagtcactttcttactccttttctatgctaaaatgtatcttaactatcagtgtttatgtgaagaggatatgtgtgtgtgtgtgtgtgtgtgtgtgtgtgtgtgtgtgtgtgtgtgtgtatctcctatatcccatttgttaaaagatgaacttcacttgctgagtagattttagctataattttctcagcacgttgatgttcacaataaaggaactgttgaaatataaagcaaaagagtaagtaatgaaaattgaccttcccatttttaagcccccatttgagacccatcattcatcatttcaggcattctttcaaaacatattgagaacctgcttactgtattatggcggtgcaaaagtaattgctactatatcactatatagtggcaaaaaccgcaattacttttatatatattatattattatataatatattatataataatataatatataatataatattatatattatatatgttattatatattaatataatatattaacatataatatatcttatatattaatatataaatataatatataagatatattatatgttaatatattatatgtttatatattatatattaataattattatataatattatattataatataatatataataatataatatataataattaatataatataatataatatataataatatataatatattataatatataataatatataatatattataatatataataatatatattatattattataatataatatttaatatatattataatataatatttaataacatgtaatatataatatttaataatatatcatgtattatatattataatattatatataataaataatatattttataatatataataatatataatatataattatatataatatataataatatataatatattattataatatataatataaattataatattatataataatataatatataatatataatataaattgtaatatatataatataaattgtaatattatacaatataatatataaattgtaatattatataatataatatataaattaatatataataatataatatataatataatagtaatatataataatataatatataatattataatattatataataatataatatatatataaaagtaattgcggtttttgccactatatagtgatatagtggcaattacttttgcaccgccataatacagtaagcaggttctcaatatgttttgaaagaatgcctgaaatgatgaatgatgggtctcaaatgggggcttaaaaatgggaaggtcaattttcattacttactcttttgctttatatttcaacagttcctttattgtgaacatcaacgtgctgagacaatatattattatataataatatattatattgatatgttaatatattaatatgtaatatatatatatttatatatttatatataacataaattatatatattatatacatatatataaatatataatatatataatatattaatatataatatataatacatatataatatataatagatataatataatactataatatgttgcagactctcgagctcttctcagatctatagcatttatattcagtacttctacatctttgtaataacttatatactgacttaagttctattattatcacatgctggtgtttatgttaactagttcaggctctctggagagcagagcctgccttatgttgattttgtatcctcaaagcccccagcatagttttaggtgaggatatagagggcacttgatattctattgattttatgattggattttaaatacttatttctgttttccctgttctttagtttccttcagcatttttcaaaggaagagtaaacatgtgtgctgcattttgctatgaggttttaaagtgctgcacatcgaagattagctcaaccaggaatgaagcatctgcacttttgtatcttttgatgagaaacaactttgagtataccaaaaggaaaacctttttgaggacacatctacaggtcagtgaaaataaaagcgcctcttcatctttcttctcttcaatctttaacctctagatcaagatccagagccacccaatccagtccaatacaatgtggccatctagcacttgatgtgtggctagtctaaatttagatgttctgaaagtgtaaaatatactatggcttttgaagact

SEQ ID NO: 44386 - DNA, 2300 bp, Homo sapien
tcagccagtccccaggggctcctgttccaactaaagactccttaaaaggcagatgacataaccattttggaaacgttattataaacttattgtataatgtttatagcaaatgtcaacaagtgtatatgtccgtggtggtggaggaaaggccttgggatacacagtggctgacctatttgtgggagggatttagaaataatgatactatctctcagttctacaggccttgatactttacaaactgttttcataaacattattttgttcgataacacatgcaagccaggatttattttttttttttttgagaacggggtctcactctgttacagacccaggctggttttgaactcctgggctcaggtgatccttccacctcagcctccagaatagctgggattacaggtgcatgccaccatgcctggattctggaatttattctgaaccgttagccaaaagaatcaacatcctgagattcagcacaggcaggccctcctcctggaagcttcccttgctccttccctcccaaaaggtaccctttttgtatcccataattccttgttcttgcccttatcattgcccctcagactgactgcagctttctgttagcagagcttgcttttggtgagtgtcttcaacagttcctggaacaatttcataaatatttattgagtttgagagccttaattccaagagtggaacctttgttgtgaataggttaaacaaccctgtgccctttgggtggggtctagactaggtatattatcagcatttttattgctatactttttgtaactgttttcaggtatatgcattggcttaattcggccaaaatacacctcattatgggtctcatcatccacctagacatgattcttttttgggagaaggtgatagaataatgtccccctcccatgattccatatcgtgatccccaacacctgtgaatatgttaacttacatagcaaaaatgacttttcagttatgattaaatcaaggattttgagatggggagattattatgaattatctggtggacctaatctaatcacaagggtatttataagggaaaaggggaagtaagagggtcagagtcagatacgacaagggaagcagaggtctgagtagttccgcaacaagccaaggaatgtgggtagcctctagaagctggaaaagtcaaagacacagattctcccctagaatatccagaaggaatacatctctgcccacaccttgatttaagctcagtgtcacttctgacctccagaactgtaataaaataaaactgttaaatcactaaatttgtggtcatttttgacagcagcaacaggaaacgcctaaggactcttgttttccttcctcccagcctcactgaccctcataggcgcccaagtatcaatgtgtattcttccgattcacctcccatccctttgaaaaatatgtagaaagtttgtcgtgtgctttaaaaaatgcacgtatggtatcctccctcatgtttggaatgttccttttaaaatcaacattatgtattgccagctttcaaatatgccctttgtccttttcacaaagcacagtactgccagtgtccccaactccacccagtgaagtagggctggtattactaaccctggagtcagcgctagcaaacaagggctcagaggtcaagggctggaagccaggtctccagactcccaggccaaggctcttttccgcagatgactctgtcctggtgtccagcagggcacagcccctagcacctccgaggccccgcaagtgtgctggcagcggcgacgccggctccgccacgcggagggaggaggcccaggcagcgcccggagtgggcggcgacgtggtggaagaagttttgttcggtcagagaccggacgcgggagctgcgggtgggccaggtgtccagccttgggagccgtaggagccgccagagccgccagagccgccggcgccccgccccgcctcctccggccgctctcgccggctcaggttacctgaggccggtgggcggggcggcccttcccgtctgcgccggcccccagcctccagggcggcggagccgggaagtggaagagggagcgaaggaggcggggactgccaaggctccagcccggccgggctccgaggcgagaggctgcatggagtggccggcgcggctctgcgggctgtgggcgctgctgctctgcgccggcggcgggggcgggggcgggggcgccgcgcctacgggtgagtgcgaccctcggggcccgaggggcggccggagggctgagggcggtgagggtcacggctga

SEQ ID NO: 44387 - DNA, 2300 bp, Homo sapien
aaaggcaggcataataaaatttgcacattgtacaatactagagactgtcctacatgctggttggcagaaacaagagtggagccatttaatagaaacctgtacctaagtttgaaaaaaatcatttattaattgaaaggctgagcaagctaggctcaagtacaggactggaaagacctgtgctttatggatgtgtgtgtggtggggtgggatacacggctttataagtgcaatgtgactcaacattgtaatcttaaatgtgtcaaaaaggcatatacaatcttaggagtgataagtgcagcacccagaaaggaatgctgcaggttggggcacagagctatggtcacatcagaattgtgcagtattccattctgagcaccacattaaaggagttgccttggcagactggaatctatccttgaaaggataatcaggatgttgaagaatctcaaaacttggcaaggaacaattggtaaagtaactttgaggagtcatgattgctgatttctaatatttgaggtattgtcaggtacaagaaggaataggctttactttttgtgtctccaaggggcaacacagaaccaacttaagaactttttaaacagctgtatattggtcaaacaggttgtcgaggtagccaattccctattaattgagaagctcaacaagttatgtgccaggcatggttgtattcgtttatttattgttgtataacaaattactccaaagtttaatggcttgaaccaacatacatttaccatctcacagtttcggtgagtcaggagtctagccacggcttagctggaggtctcatgaggttgcagtcaagctgcaatgagaactgaaatatgtctgaaggcttgactggggacagagcatccatttccaagttcactcatatagttgttggaaagcctcagtacctcactggttgctggatggaggctgttgcaggttgaattgtatctcccaaaaaggtatgttcgtaggttccaaccccggtacctgtgaatgtaaccttatttggaaataggatttttgcagatataatcaagtgaggatgaggtcatgctggattaaagtggacagttaatctaatgactagtatccttataaaaagagaagccacacagagacacacagacacacagggaagaaagccatgtgaagatggaggcagagattgcagagatgcagctacaaccaaggaacaacaaggattcccaggagctaccagaagctaggaagaggcaaagagggattcttctctagagccctcagagggagcatagccctgctgacaccttcattttggatttctagcctccaaaactgtgagataatacatttctgttgttgtaagccattcagtttgtggtaatttgcttcccttagttccttgccacttggacctccccatagggctacttcctgacatggaaactggctttcccaagtgagtaatccaagcaagaaacagtgtgagagaacacgcaatatgggaaccatggtcttttataacctaaccttagaaatgacatcccattactgctgctgttctgttttttagaagtgagtcaattagtctagcccatgctcaaggagaggggattacaccagggaatgaatatcaggaggcaggaatcatgtggagaaatcttagtgactgcctaaaacaatggtgccaggccttgatgatgctttctagatgttcatgacctagtgggaaaaatgaatttgtatatagacaaatgacagtctatatgttagatgtagcaaggcaggctttggaattggacagtggaactggaatttgaggcctgatgccattatttactaaatccttccggatgacttactaaacctctctgagccttatctttctcatctgcttaaatgggagataatgctatcattatagcatatatatgagataagcatgcaaaaccacctagtgtggtatcagacatatagtaggtgcttatttaagaataatagtagttgttaggattattttaggtattttagtagtggtaagtaaccagtaaaatatgtagtcactgttaataagattacatatttaatatagcatctttgttaatagtatttaaaactagttaagatcttctgatttacctgagcgggtggggaaacccaccccatgagcatcccctgggctcacccagtgcacagagggaggcctcccgtggctgggcccctctcagtcagcccatgtggctgccatgacctggagcaccacagccgggggcgcccaccagctcaacaccaccacattcacgtgg

SEQ ID NO: 44388 - DNA, 2300 bp, Homo sapien
catcagactgttcactcacttccaaacatcaggagtcaagaacaagcaactcctttgcacttgggcagtccaagtgcacttggtcttgaccccccaaagttcccacaggagtctcttaaccacactttacatgagagaaggaaggcttgctttcccagaaccagaagtaagggaaaatggagtgctgcaggctgaattatgttcccccaaattcattgtaatcctaaccctcagtaccttagagtgtgactgtatttaaagatagggcctttaaagaggttattaaggtaaaaatgaggcccttagggtgggccccaatctgacttgtgtccttataagaagaggaaatttggacacactgagagaacccagaggcacatatgcacagagaggatggccaagcaagagggcagccatgtgcaagccaaggagagaagcctcaggagaaaccaaccttgctggcaccttgaagttggacttcccaaccttcagaactatgagcaatacatttctgttgtttataaaccacccagtctatggtattttgccatagcaccccaaacagactaaaacagcactgtaacaaattatcacaaacttggcttaaaacaagagaagtttaatttctcacagttctagaagccagaagcttaacatctgtttctctgggctgaattcaaggtgtcagtaggactgtgctttattccttgcctcttccagtttctggtggctgctagcattcctctgcttatggccacatcactaatctctggtcattgccttctcttcttggtgcaccaactctccctcttttataagggcacttgtggtttagatttcagcctgcctggaaaattaagtcaaaaagccttaacttaatcacacctgcaaagaccattttactttataaggtaacatttacaggtttcagggattaggacttgatacatttgggtggccattatttagcttcatacagagtccgaaatctttgcatacaatttcaggaagatcatggattccaggtaggcacatctgctctggagttgcatttcaccacagatacctgtggacagatattggagacaggctcatttacttattcacaaaccttgctacaactcagaaccaaccgcagcgccggttaaaaatactaaatacaaaaccacatcacaaccgctagtcctagtaaatctgaatccaccagagttggggcccagagcctacatttcttttcttttcctttttttttttttttttttttttttttttttttttttgagagggagtcttgttcccttgccaggctgaagtgcagcggtgcgatcttggttcactgcaacctccgcctcccaggttggagagattctctagcctcagcctcccaagtagctgggattacaggcacgcgccatcatgcccagctgatttttttttttttttttgtctttttagtagagacggggtttcaacatgttggccaggatggtctcgatctcttgacctcgtgagccgcccgcctcggcctcccaaagtgctgggatttcaggcgtgagccaccattcccggccagaagactgcatttctaacaagctcccccaaatgactctgatgtcttgcccccatacttgaatgggtattggttgagagccttgttctccagctctcctctctgttaaatggacatactgctacttctttcacagtaaaagaggagatgtgtgtgaaagcctgtttccgcaatgcacgtgctaatgctcttcccgccccttcccctcttccccgtcttttccctataccaaggtgaagaacttttattattcacttgattttggacccacttcgtgtttaatgcacctggcctaagatgcagagttgagcccagggagaagggacgggttgggggaggaagaaagagtcgcaaattcccaggcagattggctccatcggtctaatcaagctgcacttgacgctccgcgggcctgctgcgcccccgccccctcaggcgaaaactcgcctctgcccaaggctgtgcggggcgtccgcccccgcacttcgctgattggccgcactagcccgctcgtcacgctcttttgtctcagctggcagaggataaaagccgccgcggctgccttaggaacggcgctgcctcgtctctgctacccctggttgggcggccctgcgaagcagctccttcgggcagccccgggtcgcttagcggccaaggaggcttcagttctttgccgcctgcaaggcggagaccagaaggcggaatccacagctggcgacgcgggagcatc

SEQ ID NO: 44389 - DNA, 2300 bp, Homo sapien
aagaggagtaaaggggtaaagcctgagcaaatataaaaacatactaataaaaaaactataataaacactgtgttgttactggctgacaaatatccatcataaattgtaataaatatgactcttttcctagaaaaagcaagagaattgatggaaacacagctgaaaataaaacaatgagggacaataacataaaactgaatgacttaggagaagaaaatgatactactcttttgagtgcacctgttagaagatttgaatgaatggagaaaactcaagcttagctggagggtggtaggcctggtggctggggtaaagaggaagatatcaccataaaatcatccaggccccagccacatcataggccaacctcaccattacaatgcagggaccccctgctccaataggcttgccagtatgtgaagtagttcactgggaatgaaacaagtgtgaggcccggcttggtggctcaagcctgtaatcccagcactttgggaggccgaggcgggtggatcacttgaggtcacgagttcaagaccagcctggacaacatggtgagacctcgtctctactaaaaaatacaaaaagtagccgggtgtggcacgtgtctgtaatcccaggtactcaggaggctgaggcaggagaatcacttgaacatgggaggcggaggttgcagttagccaagatcatgccgctgcactccagcctgggtgacagcgagactccatttcaaaaaaaagaaaaatcgtgcaaatgcttggctaattattccaacaccattaattgaataagtgggaggatcacttgaggccagtagttggagagcaacctgggcaacatagcaagaccccatctttaaaacaataaaaaatcaaatgctcgctccccatatatcaccaatgcacctgatgatatgacgaagtgcatttattgcttccctcactacgggagaacaccacttcgtgaagctttagcggtgcttcagacaggaaaagaaagatcagaatttattgagaaatgaaaaatgggcttaaggcggtgagtctttcaatgctgggatttgattgggattgggtaagaaccacgagataccaacattctaggattggtgtaagcagcaagaggaggattttaatgagaggcattcaaaaaattttagagtgcaaactgttggtgctgtccattgacgagttgatgggcctttgcagaagatcctgtaatgcagaaactattcgcctgcagagaacgtcctggaaaagtaatgcgaatgaagacagtggattagcaaagtcctttttatgtagatgctacagtggggtttttgattctcagtgtccaggccgagtttggggatagatggttttaattcccatatacatacatttttaatggacaattcaccttaggcacgtgtttattttatggtgtcaaaatcctttcatttctcgaaggtgtttactgagacctgagttagttgctaaactagctggtttaaagctaaacaagtagcttaaacctgtctgctaaaaccttcaggtggattatttcatttgctcctcacaaacacctgtgaatcctcacaaacacttcaccattattgtccctattttatagaagaggagaatgagactcagaagtaataattagctcacaatctcggggctacaaatacatgttttcaggagcatcagcaaaaccctcttaatcaaacaaacaaacataaactccaaaaccctgccttattcttctgtttttgcacaaggagctggaatccaggttcaagataattatctggccattctgtcttcttagaggtccttttccctttcgggggaagggaggaaagggtggaagcggcttccacccactccagttcgggcttgggtcagctccctgggcttcgcggagcacgccctggtgccaccggcggggccatttccgccgcgggggcccagacagcgccgccggctcgcgtagggtccagcggaccggcaggctcgccctcgcggtgccagctctgctctcttctggtcaccagggggcgccagaagcaatggtgcatcccgaaagggacggcggccacgtgacaggggggtcacgcgcagggtcgtaggggaccgcctggggatccccggacggctgcgaggaatgagcggttggctcgggctggtttcctccctccaccgcctgcttgtttcgccatgcccgggccggacggtggggctgcagcggcgaaagcgactgaagtccgggagcagtcgcatgagcttcccggtcaccaggaggccccgggaacagacacc

SEQ ID NO: 44390 - DNA, 2300 bp, Homo sapien
gaacctgggaggcggaggttgtggtgagctgagatcgttccattgcactccagcctgggcaacaatagccaaactccatctcaaaaaaaaaaaaaaaatctagctcaggtctgaccccgactaaatggacaatcttccattgatttcccatcccctcaaccccggttcaagccaccatccacagcatttggactagtcatttgtacttaagtaactgagttagtatcatgaaatttggtcttaggatcaaagccactcaaggttagagctggagggaaccttggagattaagagaaactaaggtttggagaacctacctaaggtttcatagcaaatatgtgacaaatccaaggcttcaagccaagttttccaatgtgtccctcgtgctttcctgactacatctggagtttctctatttcttcttctccttctccttcttcttcattttttttttttttcgtgtgtgtgtcttttttcccctatgtgatgcttcctttctgccctgtgaccctctccctctgtcctgtcttattagaaagaggctctagagctggctgcatagtacctgttctctgggaccttggtgttgatctaagactggtttaactacctaaagagaagcagagacccgagggggcctgccataacccaactctgaaacatgacttaatcccaagtaagatcagctctaacatttgttcagaagcaaaaatgatggattctaaagtttgacttccccaaggtcatctggctaagaggtggctgcagcagggggcaacaataggtcttcaggcccctggggcggcaacctggcactgcccaagagcccgcaggctctgaaggccaactgagccagcggcaagcctagtccctgcctccctgcttggagcagtgcgactataccgttttctgtctgctcatttgtgagcttggttcccgtcctaaatgtgggggttcaaggcagacaaagagtgtgcagttggccaccccgctcgccttcaggaagtgtgtaggacaccgtcgaggccccctagccattgtaaaccaggcgctgaggctcgtgcccagttgtacccttcccgcgcagcgctcaggagcgacaaacctggaggctattcggtctgccactgggctgtgccgggattcgcggactttctcctgaatagcgctctcagctcgcgtcttccccctgccactctcccacgcccccagagtacccaccgaccccagcaggccgggtacatccctgccgcgcccatccggccagtggctccaggggccggcctggtgtgtctccagctgggcgcctaccgcctgccccagcgctagttctggcgttgggggtagagaggtaaagaggggagttagcggggcatctccctcccagggctgagccggcaagcgcatcttctccgcgagttcctcactgtccagcgagcgctgcccaacttctgcgccggtgggacccgctgctctgagtcactcttggcacagaacaccaagcaccctcagaaaccgaattcaccacctttgggaggctcctgggagaaggcaaggaacccaggcggggctcccagggctctcgggctgggactgggttgtgtgtgtgtgggggggcttcacggatacccctcccaacctgcttcctttccctgacagcagccatctcccccaagagggagagtcttaggcgtcccggaagaccctgcggactgtgcacctcgaggtaccagcctctcctgggaggagtggggggccgctggtcagcggctggcagaggggacctgtttgctggcccgtttggaggtgggatggagtggggtttggagactgagaagcccaagagaagacactgagtttctccccaccccacaaccccacttccgaaaaagaaccaggtggtgaggaggaataaggcgaagtgtaaacacaaacaacctcaaaaagaagccaagaaaagcgaagcccaaagaagcaagagcaacactgttacaaaactgtctggttttgtaacaatttccccgccgccggccaatgaacagcgtggcggcacgtcacgtggtaccgttttatataacactttgctgagacaagacagttattaggcggcgcggggcggccggcatggagctcccggaggcgcggcagggtcaggagctcggtggcatggcggcggtggctgccccgatttcctccagctgccactccttgcttcgtgtccccggtccctagacgcctcgtctcctcccgtgtccctcttcccatggagtcagtacggatcgaacagatgctgagcttgc

SEQ ID NO: 44391 - DNA, 2300 bp, Homo sapien
catctggctaagaggtggctgcagcagggggcaacaataggtcttcaggcccctggggcggcaacctggcactgcccaagagcccgcaggctctgaaggccaactgagccagcggcaagcctagtccctgcctccctgcttggagcagtgcgactataccgttttctgtctgctcatttgtgagcttggttcccgtcctaaatgtgggggttcaaggcagacaaagagtgtgcagttggccaccccgctcgccttcaggaagtgtgtaggacaccgtcgaggccccctagccattgtaaaccaggcgctgaggctcgtgcccagttgtacccttcccgcgcagcgctcaggagcgacaaacctggaggctattcggtctgccactgggctgtgccgggattcgcggactttctcctgaatagcgctctcagctcgcgtcttccccctgccactctcccacgcccccagagtacccaccgaccccagcaggccgggtacatccctgccgcgcccatccggccagtggctccaggggccggcctggtgtgtctccagctgggcgcctaccgcctgccccagcgctagttctggcgttgggggtagagaggtaaagaggggagttagcggggcatctccctcccagggctgagccggcaagcgcatcttctccgcgagttcctcactgtccagcgagcgctgcccaacttctgcgccggtgggacccgctgctctgagtcactcttggcacagaacaccaagcaccctcagaaaccgaattcaccacctttgggaggctcctgggagaaggcaaggaacccaggcggggctcccagggctctcgggctgggactgggttgtgtgtgtgtgggggggcttcacggatacccctcccaacctgcttcctttccctgacagcagccatctcccccaagagggagagtcttaggcgtcccggaagaccctgcggactgtgcacctcgaggtaccagcctctcctgggaggagtggggggccgctggtcagcggctggcagaggggacctgtttgctggcccgtttggaggtgggatggagtggggtttggagactgagaagcccaagagaagacactgagtttctccccaccccacaaccccacttccgaaaaagaaccaggtggtgaggaggaataaggcgaagtgtaaacacaaacaacctcaaaaagaagccaagaaaagcgaagcccaaagaagcaagagcaacactgttacaaaactgtctggttttgtaacaatttccccgccgccggccaatgaacagcgtggcggcacgtcacgtggtaccgttttatataacactttgctgagacaagacagttattaggcggcgcggggcggccggcatggagctcccggaggcgcggcagggtcaggagctcggtggcatggcggcggtggctgccccgatttcctccagctgccactccttgcttcgtgtccccggtccctagacgcctcgtctcctcccgtgtccctcttcccatggagtcagtacggatcgaacagatgctgagcttgcccgctgaggtcagcagcgacaacttggagtcggcggagcgaggggcatcagcggcccaagtagacatgggcccccacccaaaggtggctgcagagggccccgcacctctaccgacgcgggagccagagcaagagcagtctccggggacctcaacgccggagagcaaagtcctgctcacgcaggcagacgccttggcgtcccgggggcgaatccgtgaagccctcgaggtgtatagacagctctccgagcggcagcagctggtggctgagcagctggagcagctggtgcgctgcctggcggagaaagtcccgcaaggcgaggcgctggcgccggcgcccccggacgagggtagcactgcaagcggcaccgtggcggcggaagagacgggggccgccgcggctgcggcggccaccgaggtgtgggacggctttaagtgccggaaatgtcatgggtttctatcagaccccgtgtccttgtcgtgtggccacaccttttgtaaactgtgcctggaacgtgggcgggccgccgaccggcgctgtgcgctgtgcggggtcaagctctccgccttgatggtggccactgggcgggcgcgtggagcccggcgggctgggcagcagccgccgccgccgctgcgagtcaacgtggtgctcagcggcctcctcggcaagttgtttccaggcccagcgcgagcgtcgcaactccggcacgagggcaaccgactgtaccgcgagcgccaggtggagg

SEQ ID NO: 44392 - DNA, 2300 bp, Homo sapien
gtgcacctcgaggtaccagcctctcctgggaggagtggggggccgctggtcagcggctggcagaggggacctgtttgctggcccgtttggaggtgggatggagtggggtttggagactgagaagcccaagagaagacactgagtttctccccaccccacaaccccacttccgaaaaagaaccaggtggtgaggaggaataaggcgaagtgtaaacacaaacaacctcaaaaagaagccaagaaaagcgaagcccaaagaagcaagagcaacactgttacaaaactgtctggttttgtaacaatttccccgccgccggccaatgaacagcgtggcggcacgtcacgtggtaccgttttatataacactttgctgagacaagacagttattaggcggcgcggggcggccggcatggagctcccggaggcgcggcagggtcaggagctcggtggcatggcggcggtggctgccccgatttcctccagctgccactccttgcttcgtgtccccggtccctagacgcctcgtctcctcccgtgtccctcttcccatggagtcagtacggatcgaacagatgctgagcttgcccgctgaggtcagcagcgacaacttggagtcggcggagcgaggggcatcagcggcccaagtagacatgggcccccacccaaaggtggctgcagagggccccgcacctctaccgacgcgggagccagagcaagagcagtctccggggacctcaacgccggagagcaaagtcctgctcacgcaggcagacgccttggcgtcccgggggcgaatccgtgaagccctcgaggtgtatagacagctctccgagcggcagcagctggtggctgagcagctggagcagctggtgcgctgcctggcggagaaagtcccgcaaggcgaggcgctggcgccggcgcccccggacgagggtagcactgcaagcggcaccgtggcggcggaagagacgggggccgccgcggctgcggcggccaccgaggtgtgggacggctttaagtgccggaaatgtcatgggtttctatcagaccccgtgtccttgtcgtgtggccacaccttttgtaaactgtgcctggaacgtgggcgggccgccgaccggcgctgtgcgctgtgcggggtcaagctctccgccttgatggtggccactgggcgggcgcgtggagcccggcgggctgggcagcagccgccgccgccgctgcgagtcaacgtggtgctcagcggcctcctcggcaagttgtttccaggcccagcgcgagcgtcgcaactccggcacgagggcaaccgactgtaccgcgagcgccaggtggaggcggcactgctcaagtacaacgaggcagttaagttgggtgagtccaacgcgctgccgggccggggctggggctcggtggctacatgagggagcgggagaacaaaccccgcagcgagaagggatttggaccagggcagaagagggggcgggggacccatggactgtggcggggtgggggaggggtgattctggggctgggtctctgagtttgttctgttttcactgcttatctgtgtttcactgtgtttgtgttgatctcggttgctttttgtcttttcctgctacttctgttagcttttgtgttcctgtctctcagtccccgttcctgtctgtgtctccttgcttctggttctttttctccgtctcttcgtatctttgtcactgtttctttctttttcggtgtcactgtctctgttcctctgactctccttctcccgctgcactcctggtctcctcttacacctgctcgcaccttcccagcgaggagaggaacttcgcgcgctcctcgcacttgcgcccggtcctctgggctgtagccagcaggagatgtccggtcggcgcctgcgtccgccgctcgcgccgccgggtgttgccccttccggggccgcggctccctgtggggtgggtccggcatggaattaggtcaggagagcactggttgcataagggccgcgagcggcccgggtcgggcgcccctcccccgcgcgagcgggcgggattgtgtaaccgctgaggtaactgaagtgggccaccacgctcgcttcggaaaccatcccacgagcatgtgcggggggagggggagcgcttgcgccccgctgccctgtgactcattgtcaccgcttcctatcacacgatcctcggctgaaatagatgcccccccttgcccgccccgccaacccgtagcctgtgccctcgcctccaacccctttaacctggccagcccggcgggaggccggcgcggcaactgcttg

SEQ ID NO: 44393 - DNA, 2300 bp, Homo sapien
gaggagtaatctgtacaactactagcatgtgcttgacattttctttatctactcataggttgatgggcacttaggttgattccatatccttgcaattgtgaattgtgcttcaataaacatatgtgtgcaggtgtctttttgatataatgacttcttttcctttgggtagatactcagtagtgggattgctggattgaatcatagatctatttttagttctttgggaaatttccatactgttttccacagaggttgcactaatttacattcccagcagcggtgtataagtatgctctttttatcacattcatcccaacatctattgttttttgactttgtaataatggccattctggctgaggtaagatgatatcgcgttgtgtttcaatttgcatttccctcgtgattagtgacattgagcatttttcatatgtttgttgtccatttgtatatcttcttttgagaattgtttattcatatcctttgcccactttttaatggattattatagtttattgtcacctggcttcagctctgggtgctttcagttttgaagactctgtatgagttccttggttgcagagtatctttgtgtgatggctttctcagatgctgactgtagtagtgatgtgctgggtgtgtgcgcaggttcactgtctcctatggggagttttccatctggttcacagtgtaggctgctgcccatcacttctttcaaagggtctgtggtttctttcactctttctgttaagttcctgtgttgcttcttggaaaaagctcacagcatgaatatctacatgctatttgtctttccaagtgggagagacatgctaacaatgcctccaatctgcatcttggaaataaaaacaactaggattgttttaatgtaagagggtagaaaaaaagaagaaaagggggccataatcttgcctcccagataactcctattgaccccttcttaaaaaaaaaaaagcaacatggccaagcacggtggctcatgcctgtaatcccagcactttgggaggccgaggcaggtggatcacaaggtcaggagttccagaccagcctgaccaacatggggaaaccccgtctctactaaaaatacaaaagttatctggacgtggtggcatgtgtctgtaatcccagctactcaggaggctgaggcaggagaattgcttgaacccaggagtcagaggttgcagtgagccgagatcgcgccactgcagcctggtatgatgtatgaattcaaagtgtgaaatttgtctttgggtagagtgtaaaatagaaccataattaattttcaatttaattttcaatttcactccagcctgggcgacagaacgagattctgtctcaaaaaaaaaaaaaaagcaatacatgcacatgatatgaaatttcaggtagttcagataaatattatgtagaaaatagaaatgctaattagaaagtaaaaaattcaattcctccttccccagtcagtttccccacaggtagtcattgttacaggttcaaaatttgccttctgatgtgtctcacactgaatggtggaccagactattggtaaaaaggtgataagccaaccctggagtcagtttctagaactaggatttctctttggcttaaaaatatccaactgcagaaacctaatagtgaccatgttgccctctgtcttccaaatagctgcttcctcatactaggaaatttagtagcaaataggtaccactgggccagggcacagtattcttattttaggaagtgaaagtcacacatatttctcctttccttatttctgtttggtgcagattcctcaagccagaaacagaacaacaaaactgagatgtatgataagaagacaacagaccaggctccaaacactgatgcttctcggagtcagggctatccaatgtcagcagcatatggaagaagatggagaagaaaaggagcaagtgtttcaggattgagtgggtgtgaattcaaaggaagaagccttaaacaatccagtgaagggtatggcctgggcgatagagctgggtcttcacctaccaataagactgccaggaatgtccctttctcgcacttgtccttagagaaggacaacatggagcagcctacaacttcacaaccagaaaccactacccctcaggggttgctttcagataaagatgacatgggaaggagaaatgctggcatagatttcggatccagaaaagcatcagcagcacagcccatacctgaaaacatggacaattccatggttagtgatccacaaccataccatgaagatgcagcttctggagctg

SEQ ID NO: 44394 - DNA, 2300 bp, Homo sapien
atttcatgctcccaccagcctgattccctttccctaattaggactccagaatgatgatatttgaatggccttttaatggttttgtcacaattcaagtgaattaattcgccattttatttgaagtcggacatttaggttgtttccagtttttctgtattaaaaatgaatctctgctgagcatcttagtaatgaaatatttgtctgcgtttctgtctccttgggatggattcctgaaaatggaattactaggtcaaagagcagatttctagaagtgggattaatggatagaaaatatttttatggataataaaaggttatacccaacagcgtatgtgagtctcaccactctctcgccaatagtgtgttatccttttttttttcccttttatctttcctgtagaaaagtagtaggtgacagcggcatctccatgcttttctttttgttactaatgagactgaacatttttcatatgcttattcaccactggcatgctctcttttgtgaactacctgttcctattttttcccatttattgactagaatcttatacattttcttatcaatccaaatgatctctcaaataaatattaaccctttgtcatattagttgcaaatgaaaatattttataagtttattagctttctaaattttcttggccatacatgttaaaagagatagattctaactatagacaagtgccctcagtttgagcctgtttctccatgattaaattgaagagttttgacaaaagatttggaggggctgtttcagctaatcccaaatttagctctgagaaaaatgcctgggcccgatacaaagattgtttggctcattgcactttataatgatttaagaagatgtggggggcagggatggaagcagtttttgccagaaatttttagaattctgaggtaggaagccaatctttactcaagtctcttgcgtgttgggaggaggagtaagttatgtgcaagccaacagaacacttggtggaaaagtactgctctgggctgcagatgtgtgcacggcttggttttaattatttgtttccctctctatcctttcttctcctcccctccccccgccaccagaaaaagggccagattaggacgaggcaaccccttcctccgtggaggtctgcttctgtgcagcctgttagcacatcaaaggccggatgaaatacctaggaaaggaagggaccaggcctaggatccttccaaactcccgcctttgtctgggctccagctcagggttattgtgactgccaagggtagcctgacagactccaaatagaagaacgctgccaaacaaagaaactttcacattattctgaggggggaaaaaagagcaacaagagaacgttgcttgttaatgcctggtgactgagcaaatcagtaattgcaaaagggtttttcggagaacaaacccaaagttaactgggcgatcagattcgtttccccagataatagggagagttgtgcactgactttagcaatcccgggggtgtcggtcccacagcatctgggggagaattggggaagggccatcaaggagagcgaatgggggttcccaaggtgaaaatgagtcgtgtagggctctaacatagaaaatggagttcgaagaatgagtttcctgtctcctaagacagcttggagggcccgggaacggcagggggaagatgaggggcttcagaatgggaggcagggaaaagcctgcagcaacagaaagggagtcggtgtctggcgcgcatcaggtggcggaggggcgctcgcacagagcccggcaatgccgaggccctcccaacgggtcggtctgcgaggagcaaaaaaggggttcagaggagggcagcgcgtgcgtcgcgctcagctataggatggcgcgaggatggcgtgaggctgggctggggcctcccaggtagaactgaggggggcaccgcgcggccgcgggggagcggcgccggactctagaggctttggagggggcctgagggctgcggggcgggaccgagcagggcggggcgcttaggtggcctcgggggaggcggggcttggaggctccgcccctcaggccccgcctcctccccggctagtctttggccgccgccgaaccccgcgcgccactcgctcgctcagagggaggagaaagtggcgagttccggatccctgcctagcgcggcccaacctttactccagagatcatggctgccgaggatgtggtggcgactggcgccgacccaagcgatctggagagcggcgggctgctgcatgagattttcacgtcgccgctcaacctgctgct

SEQ ID NO: 44395 - DNA, 2300 bp, Homo sapien
ggagtgatcaactatgtcaagtgctcctgcttggtcatgtaagatgatgacaggatagtccattgaatttagtaacatgacagtggtcctgacaaaagcagcttacgtggagtggttggggtgatagcctcatttgaatttgttcaagagagaaagaggagagagaaattggagttggcaagtgtagacaattctttcaaagaacttggctgtagacaggagtggagaaatgggtgcattagctagaacagaaagtggggtcaaggccgggtgtggtggctcacacctgtaatcccagtattttgggaggccgaggtgggcagatcacctgaggtcgggagttgaagaccagcctgaccaacatggagaaaccccgtctctactaaaaatacaaaattagttgggcatggtggtgcacgcctgtaatcccagctacttgggaggctgaggcaggagaatcgcttgaacccgggaggtggaggttgtggtgagccgagatcgtgccactgcactccagcctgggcaacaagagcaaaactccatctcaaaaaaaaaaaaaagtggggtcaagagaattttttattatggaagaaaaacatgcctatatgccgatgggaattgcccaataagaaggaaagttcgattatgtgtatggaggagagggcttgctggaacaatgaccttgaagtagtaagaaagaatgagatccagagtacaggtggaagggttgtacagataggtcatctacagaaatgtgatggaaggcagaatataggcaaaaatgcaggcagatgggtagatgtgttttgagggtctgtggcaattgtcctctgatactctgatttttagggcaaaccgaaagtgtctcctgcattctcccacactgcctggagtgtcagcatgagattactttcaggtgttcccgcaaaacaggcacattttatgtaccacttgtaccacttaagaggggattttagtagctttgtgtttaacatttattagaagaaggtaactagtacacctaatgcatgatttttcagatataattgcaattttaaaatgtaaacaaaagaaaagtgttagctaaagtacagaagaggttgaagggatatagcaaaacttttagtcagttgtgaataactgacccttgagagaatgtcttaaggtactggatctgctggagtccctctttaagagcagacatctctgagataacacatttagtcagcttcattcctgaaattctactgtgaatgaaactgagacatatcaggactgaaaggaatcccccagggtctgctagtttacattcaaggataaagaactctataccactgaagactgagacagtttctttcatcctgaggggcctctgactaaaagcaaaacaaaaatacaacaaattgaaaaggcaaaatttcttatataaccacacagtgaatataaacagaaagcctagagccatgcattatgggagatgccacagggaaaggagtctgtagatgattgagaaaaagggtttctccaggtagagagataggaaattgtggtagacagaataatgaatcctcgaagatgtctatgtcttaaacccctggaagctgtgaatatgttaccttacatggcaaaaaggactttgcagatgggattagttaaggatcctgagatgggaagattatcccggattatccagatgggcccagtgtaatcacaggggtccctgtaagagggaggcaggaggatcaaagtcagggaagatgtgatgacagaagcaaaggttgcagtgatgtgctctgtagatggagaatacagtcacaagcaagaaattcagacggcctctggaaatggcaagaaaacaaattctcccttagggcttctagaaggaacacagtcctgctgtgatatggtttggctctgtgtctctactcaaatctcatgttgaattgtaatccccagtgttgggggagggacctggtgggaggtgattggatcatgggggtggattccccccctgctgttctcatggtagtgagttctcacgagatctggttgtttaaaactgtgtagcacctcccccttcactctctctcctgtcaccatgtgaaggtgtgcttgcttccccttcatattttgccatgattataagtttcctgaggcctacccagccatggctcctgtatagcctgcagaactgtgagtcaattaaatctcttttctttataaagtctcaggtagtttttttatagcaatgtgagaatggactaatacatactgacagcttgattgtaaaacttttggcc

SEQ ID NO: 44396 - DNA, 2300 bp, Homo sapien
aagtacaaaaattagccaggtgtggtctcgtgcacctgtaatcccagctacttgggaggccgaggtgggagaattgctcgaacctgggaggcagaggttgcagtaagccaagattgcatcactgcactccagcccggacgacaaagcaagaccctatctcaaaaaaaaaaaaagaaaagaggatttattaaaaaaaaaactttcatatgatcaagttgtctattaattaaagggaaattataatggtctttctagagattgggcttgatgtaagaaaaaaccacttacacactaaataattggttagaataatgaaattttcttaagggattgatttactcttaataaattatgagagattttaattttttaacccaaagttcaatttgtattgcatcttgccatttttggttttctctccccttttaaagggcaagaaatagtaatgctctccaactcatttttcaactcatataagtttttctccttgagttttgtttgttgtggcctgatgctaacaatgttttcttaaaagtctaaaggaaattctttcttccaacataatattctgtgcagtgccgaaggtcttttcttttgccttttggtaactggcctaacagattttatggtttattgaaacaattcctatgctattattattaagttttggtttacttagggaaaaaaatgaaataaaaaaaattttttcattaaggttattatattcatgtatctttctgtatgggcttgtaaagtcattgtgacatagagttacagggctttggctcctggatctaaaaaggacaccaagtcctccgaaatcttaaacgctgacagcaattaaagcctcatcttcaggcccagtagagatgccaatcaaaataaactgcattcctgagacacaggccagaaattaaagctatctaactcctcaaggccagggactattgcagaagaggtgggcatgagattgtaagggccaatgttgagagataaaataagttcagtttctctatgaattaatcattaatgtcgaaggcacactgatggaagaccagcatatgggcccctgtgtcagattaataagtttttcttgaagcattaaccaactccttaataaaggttataaagattataaaaggcttattgaagttatatcttatgctcaagattaaaattttatagattgtttataaaattttgaaaaacaaatttaattggcgtcatgctgtttttattagggcttattgtttggaaaataaagtctcctctctcaaagaatgaaggattttgtctttttttgaaatccttgagttaccagtttggtgaaatgaatggcttattttacaatgatctgtgatatcaagtgttttaaacctttgatatttgacaccttccaaaatcaaattataaattatgtctttttctgatctaattaatcctttaagatattaggttccccaaagtccaaaaatgacataatttggcctatttcatataaacatcatacaggaaacattgtcaagtgtgaaatggtgtttggttttctttgagctgtatctatataaatatgttattggtatgtgttccaaaattatgggaaagtcctataattctgatatgacttactgtacataatcagtaataattataattgttttcttaaattattgtgtgccacagaggcaacaaatttccttgtccattgtgtctttgactatggctgccctaaaacttttttcatccatggacaatttttgtcttgttttcgtcctctttagaaggtagttttataatcagctataaaattctaacaggtgctcttgaatacaagtttctgaaaatttttgagattgtgacatcagaataaaagaaaaattttcaggactcatggagaactgaaatgttcatgaatatcaagcagaacaggaattaactacatggactgacatgcataagtacaataagaatctgttttcatttataacaggacacaatttgagaaactggttattttaccaaagctttgactggaatggtgtgctttcctttaaggaatcaaacttgacttatggagccaataaaagtcccatgggaaaactggccttataccttgtctacacagtccctgtacagggttcctgacatgtggtaagtaaagaatgccactttctgacaggtgcaggagccctaagtttatcttggaacctcaagaggggaggaattcacccaattcatagagtggtttttttgtttgtttgttttttggcataatctcgatctgttgcccaggctggagt

SEQ ID NO: 44397 - DNA, 2300 bp, Homo sapien
tgagtaaaatatgaacacctggttagcacatgatcatgaaaagacagaaggcatccaatatatagtttggtgttattcattttatgcttcagtgtacctgcagtgaaaaatatacattttactttctttttttttgagacggagtctcgctgtcacccaggctggagtgcagtggcgtgatctcggctcactgcaggctccgccctccagggttcacgccattctcctgcctcagcctcccaagtaggtgggactacaggcgcccgccacctcgcccggctaattttttgtattttcagtagagacggggtttcaccgtgttagccaggatggtctcgatctcctgacctcgtgatccgcccgcctcagcctcccaaagtgctgggattataggcgtgagccaccgcgcccggccatacattttactttcaaggttaaaataggccaggcgcggtggctcatgcctgtaatttcggcactttgggaggccgaggcaggtggatcatctgaggtcaggaattcgagaccagcctggccaacatggcgaaccccatctctactgaaaatacaaaaaaattagttgggtatggtggcacatgcctgtagtcccagctacttaggaggctgaggcaggagaatcgcttgaacctaggaggcagaggttacagtgagccaagaccatgccactgcacttcaccctgggcgacagagcgagactctgtctcaaaaaaaaaaaaaacataacttggctgacccaatctccatacaatggggttatcacatgaaatgttccagacccacgaacttcctgaaagagctttagaatcttgtcccgttatccaacaaagggctttaggaagtaccagtacccgaaggtttccttattgtaatccccaaattccaattcaagcccttttaaagtcggggtcctccggtcttcagagtcatacatctttctcaagcttcccccagccatcaaattagcttacaacaagacagaagaattcacaaaacatgaaaataagcattccccaattgttgagagcagagtatggcttctgcaactagaacaagttctcacagtcaaaaccttgtaatgtcatactcaagtgagattgacagtgaaaaataaaaaaggagaaaccctgcaatgccttttagaaaacgttcctatagcattgtgtgttagtaaatgtaaataactatacaagcctaaaaacaactatgtacccggaacatcttgctcacaccaacagactgctgacagttcctttccttgtaattattagtgacatggcttttttagaaaaaaaagagacagaaagaaattctgaaattctgaaatttttgaactgattaaagaatcctcggattctggccaagcctctcttagccattctttgcctctattgttctcttagcttacagaaccactgaaaatgtccctactggagttaactctgcagtcctagtagacatatagtgtagccgttagtggaaactgacataaaccgccctagatttcaaaccggtctctgctttgtaggtagctgtgtgagcctgagcaagtcctctctgtgtcttggtttcctctcctgtaaatgaatacctaatcagaactaacacatataaactgcttacccataccagtcattgttcattaatccttacaacaacccctaggaggaaaaaattataatctctgttttataaagcaactgacacacagagaggttgagtgacttccccaaggtcccacagctggtaagctgcagagccaagaatcttacacaggttcaagagtccagattcaagtccccacacccacacagcctctgtcaatgaggacatacgtacttagggccgttttgaggattacatgagaacgtctgtaaagcccagtacttgacaagtgcctgagagatagcaactgtggttgttagaattttttaccttctgcactgggaaaccatcaaggctttttggttaggcaggaaaaaaaaatgggttggaggcaagaggaggaggagggaagcgccaggggaggaagacagagaagtggcacgtgaaagggagaaaaggggcaaaccagaggagaggcagggaggggcggcgggggcgcactgaacatttaggaagcaagatgtctagcaggctgggccttgagagaacagtaactgtttcgcaactgaaagtcgctactcgagccttgccaactggggagactatgcccatgatatccgcggcctcggaccccggaccctccaggccctcgcgccccacccccgaccagcctcggg

SEQ ID NO: 44398 - DNA, 2300 bp, Homo sapien
ccaagtgatgacaagaagttgcttttaaatgacccatcttgtatttcatcgtcaataaaaccacacttagttacccaaagactgagaagggaaaaattctatgtaattatttgatcatctttttttgtggagagaaaaaaaactgacaaaacaatgagctctggaatagaatacagtagaggcatcatgctcaaagagagtagcagatgtggccagggaaaggtcacatgtagaaaagggatacacaagtgatggcgaggtgtatcgaggaataattaacagttgaataaaaatgcattaatcagaatgtcaagagttcaaactagaaagattttgaattttaaatgcattataaataaaatccacctctctccaaataaagccctctgtagaattttgctttagctcttgtttctctcaccagaatagagaagcgagtatcacctttggaggatatactctaccattctctgaaactgtttttttgcattcagctacctcgctattataatcagctgagaaacaccatagcctttcactaacacaggtcaaagatttctcccaggatcaacaaagctagattcaaaattgctcctttgaacacatgcaatttgtgtgcatcagtttcgatcgctggggttcttgaggagactaacaaattgcaaagtgtactttcagaggaagggcctaaccatcctggggggtcctagaattgggtcctttcacaggcagatctggagaagataggagagggcaggaaaggaaagtgaaggatatgaacactatgtgttcagtgtgcaaaggcctgctggcattttgcctatgggaattctgaagtctgggcacataaggttcagctgcagttgcagttttcaacagtcgtccttatttttataaacattgttatgattattcagacacggaacttgtgattacactatttgctcctgttctgaacttgagggagtccacttaagctaacaagtaggtttttgaggacatgtgtggcaaatgcttacccagtgaagggattaaggggctcagtaagcacttgtccattggcacaatggctgccaatctaattctattgattcctctaaatgtttctggagttcagaaatctattcaatccaagggcactttacctggggtcctgggagccaaatgttaacgtagttcttaaccttcctaagcctcttaaccttctgggtacaacctctatatttgtcttctggctaaaatcatttccccacccccagcccagtcctttggactctcccaggccaattcctggcaagatctttgtcgaactgtatttgcaaaccagggtctggggcacggtggcagttccttcgtctgctgttcccttaatttcgtctggtttcactggctccaggacagcacacggtctagagtgggaagagtgaggcattcaccttggtgaaaaacaactcagtaattaagacaaatgatttttcatgtactattttaaaaaaatcagaagcaatgcaaaaatccatgatgaacaaatgatcaacatttgaaatacagacaggatcccaacctgcacttgcatgaccttgtctcgcttgcctcaccctaaacccagccttgacactccaattaaactttatttacaaaacaagggggccggccagtaggatgtagtttgcccatacgacttttttaaagtatcgcattgactactgtttatctcgatgactgaagggttcttttggcatccctgtagcaaatgcgtctcaccctagtcctggtcctgctccaagggtttttgtccaggcacatcgtgacctcacccttcctcccctctccgaggcctctctcagggtccagcgttcaagtcccgggtgttctctggacccgccccttcctctcgccgggtcaggtgccgagggcgagcacgggcggcgcggagagcagtcccggcccgccctccacgactcctcctcctgcgagctgggccactcagcggctctgccgcccagcgcgccggggcccagaccccgccccggccccgcctccgacgcctgccgctccagctccggctccccctatataaatcggccatttgcttcgctccgccccgcagcgccggagtcaaagccggttcccggcccagtcccgtcctgcagcagtctgcctcctctttcaacatgacagatgccgctgtgtccttcgccaaggacttcctggcaggtggagtggccgcagccatctccaagacggcggtagcgcccatcgagcgggtcaagctgctgctgcaggtacgtcctgggatc

SEQ ID NO: 44399 - DNA, 2300 bp, Homo sapien
gaaagagatgcttttaccaaaaagcagagttttactgacttcctttccccacatcccctaaacacgtcatctgtacacaagggttgcattggatgatcttggcttcctttagcaattaaaaaaacaactctttagctcttggactgttaggttggtacaatgctcttttaaactgtctcctaagaacacaacgttaaagcccacagcaaacttaccctttgcagtgtcatagataccgaagtaggcggctcggtagatgataataccctgcacagacacgttaaagccttggtacaggcccttaatcccatcagatttgtagatcttaaccaggcagtcaccgaggcctcggaattccctttcagctccagctttacccacatcagctgctagacgggtacgggcaaaatcaagagggtacacaaaacacagggatgtggcccctgcggcaccacccgatgccagattccctgcaaagtagagccaaaactgggttctcttgtccacaccacccaggaagatctgcttgtatttatctttgaaggcgaagttaagagcctgggtggggaagtatctgatgacattggccaggttaccgcgccagaaggacagaactccctgctccttgggaatacggaccacgcagtctataatgcctttgtattgcttatctgcagtgatctgcttgctggcatgctgcacctaacagacaggaaggaagccaacagggacagttataaccatggggaagggaaagagaagagcttatgccatctcgatcaatgccctttaaggtaggctcccctctctcaaatctagtcttcgtatatcatactggctggaccctcccaaccctctgaggctgtcacaggggaagaggtgatctgcaccagtagcattaagcctccacccctctgagtggagagggggcatcctccagcggacccgtgaccttcagacctaggagaaaggtcattacctcaaacccaggttcagaggcattagggcgagtcccacatagggcgcggtcaccttggggaccgcagcctacgcctcaagtctcctgagctgcttccgtctcgctccgcccccactccgctcccagaggtgacccgagcgccgccgccgccagccctacacgctagcccaggagcgccctctagagccggcactggagagcgcgcggcgcagggaggcaggcggagacgcggcggcagcggccgcggctgcgcgggggcggacgtaaaaggcacacgcgcttcccggcgccggcttccggcccggcgaggtttgagcgcgtccgcgggctgggaggccgctggacccgggcgcatggcctcccccgggcagttatctccttgccgcgaccttgaggtcttcggtaagaactggcgttcctctttctaacgccggctttcggccttcgcccttgacgcccaggcccggggaggccgtcactcagaaactgctccatccgagtccgccgcctcggagatgccgagagcctggtcctgccctctgcccccggccccttcctagactcactacttcaggtcactaaaggcgcctcccaccagtttgacttctgttctgcctctgcgccccgctctggcctctcctaagccgcttccctggccatgtctttagagttcgctccccgccacccctcgggcgcccgccttctgtgcgacccttccccccacttcctggttgggctcctggatcccaggacgtacctgcagcagcagcttgacccgctcgatgggcgctaccgccgtcttggagatggctgcggccactccacctgccaggaagtccttggcgaaggacacagcggcatctgtcatgttgaaagaggaggcagactgctgcaggacgggactgggccgggaaccggctttgactccggcgctgcggggcggagcgaagcaaatggccgatttatatagggggagccggagctggagcggcaggcgtcggaggcggggccggggcggggtctgggccccggcgcgctgggcggcagagccgctgagtggcccagctcgcaggaggaggagtcgtggagggcgggccgggactgctctccgcgccgcccgtgctcgccctcggcacctgacccggcgagaggaaggggcgggtccagagaacacccgggacttgaacgctggaccctgagagaggcctcggagaggggaggaagggtgaggtcacgatgtgcctggacaaaaacccttggagcaggaccaggactagggtgagacgcatttgctacagggatgccaaaagaacccttcagt

SEQ ID NO: 44400 - DNA, 2300 bp, Homo sapien
tgaatattattgcttcccattttcaaccagtaaatagttgccactgagaaactgacagccaggagtctgtcaagaatgctcaagatatgttatataatacaacatgcctgttcacagggggaaaaatcctaggaaataacttatgtgtacttcttgatttcatcatacaagacaagcacaaaagcaccacccatgcctctgagaacattggaccatgcacccttgaaaaaagctttgcctccttcatcacgagcaatcttccgccagcagtcaagcgtgcctgtgtacatgatgtcagctgcaaagaataaagacatggagttagtgactgaaggccgatgaaaaatcctaagattcactaggctaaataaagcagagccccacctctaagaacgtcagctttaaatccaacattcacacattagcatgggcaacactgaaatattaatgctatgaccacaggaatacagactacccattggtcttaacctctaacaccatttaagcaccctcattcataggcatctgaagggccagctcaaaggcagttgtggaacagacacagatgctatcaaccccatcccttgacttggacagacagccattttaaaggtatgtatcaccagtttgtggcagcagattgccccacgactacaactttatcttctgctcaagtggaacttacttcctttgcgccctgactgcatcatcatgcggcggcgaacagtgtcaaatggataggaagtcaacccggcaacagcagtgacagtctgtgcgatcatccagctgatgacgatgtgagtgttcttgggatccggaagcattcctgggaataggaaagagatgcttttaccaaaaagcagagttttactgacttcctttccccacatcccctaaacacgtcatctgtacacaagggttgcattggatgatcttggcttcctttagcaattaaaaaaacaactctttagctcttggactgttaggttggtacaatgctcttttaaactgtctcctaagaacacaacgttaaagcccacagcaaacttaccctttgcagtgtcatagataccgaagtaggcggctcggtagatgataataccctgcacagacacgttaaagccttggtacaggcccttaatcccatcagatttgtagatcttaaccaggcagtcaccgaggcctcggaattccctttcagctccagctttacccacatcagctgctagacgggtacgggcaaaatcaagagggtacacaaaacacagggatgtggcccctgcggcaccacccgatgccagattccctgcaaagtagagccaaaactgggttctcttgtccacaccacccaggaagatctgcttgtatttatctttgaaggcgaagttaagagcctgggtggggaagtatctgatgacattggccaggttaccgcgccagaaggacagaactccctgctccttgggaatacggaccacgcagtctataatgcctttgtattgcttatctgcagtgatctgcttgctggcatgctgcacctaacagacaggaaggaagccaacagggacagttataaccatggggaagggaaagagaagagcttatgccatctcgatcaatgccctttaaggtaggctcccctctctcaaatctagtcttcgtatatcatactggctggaccctcccaaccctctgaggctgtcacaggggaagaggtgatctgcaccagtagcattaagcctccacccctctgagtggagagggggcatcctccagcggacccgtgaccttcagacctaggagaaaggtcattacctcaaacccaggttcagaggcattagggcgagtcccacatagggcgcggtcaccttggggaccgcagcctacgcctcaagtctcctgagctgcttccgtctcgctccgcccccactccgctcccagaggtgacccgagcgccgccgccgccagccctacacgctagcccaggagcgccctctagagccggcactggagagcgcgcggcgcagggaggcaggcggagacgcggcggcagcggccgcggctgcgcgggggcggacgtaaaaggcacacgcgcttcccggcgccggcttccggcccggcgaggtttgagcgcgtccgcgggctgggaggccgctggacccgggcgcatggcctcccccgggcagttatctccttgccgcgaccttgaggtcttcggtaagaactggcgttcctctttctaacgccggctttcggccttcgcccttgacgcccaggcccggggaggccgtcactcagaa

SEQ ID NO: 44401 - DNA, 2300 bp, Homo sapien
caagaccctgtctcaaaaacaaaaacaaaaacaaagcaaatgatttcaagtggttttccttggctcctgatgaatgtttaccaatattactcagttgttgttttttactcaaggagtcaatgttgactttaaagtgactgaagaattggaccgggcgtggtggctcacgcctgtaatctcagcactttgggaggccgatgtgggcagatcacttgaggtgaggagtttgagatcagcctgaccaacatggtgaaaccctgcctctactaaaaatacaaaaaaaaaaaaaaaaaaaaaaattagccaggcatggtggcatgtgcctgtaatcccagttactcaggaggctgaggcaggagagttgattgaacctgggcggtggaggttgcagtgagccaagattgtgccactgcactccagccagcctgggtgacagagccagactctgtctcaaaaaaaaaaaaaaaaaaaaaaattggcctgggtgtatggtcttgtgtggaacaactgcagatgagagtatttcaaagaagtcaggaaaacactaattcaattcagtctaaagcataatttgctaagatgtattacaaatatgtatggagcagaaaaggtttagacaaatgtacaatacttgtcaaaatgtaagttgtttaaaatcctgtagttattaattgtattattaaacagcaggtactttgcaacaaacaaacaaacaaacttgaatctgtcttgtgttattcttgacagtagtgtcaacagtgaagttcagctgggcgcggtggctcacacctgtaatcccagcactttgggagaccaaggtgggtggatcacgaggtcaggagttcaagattttagaaaatttgaatttgaatttgaattcaaaattttagaaaattttctaaatgagaagaaccccacccttgaccactattattgaacatgaatagttttaaaaaatggcttttgccatagacttagtaatgttccttaatgaatttaacctaaaattacaaggcaaaacagtgtttatacctgaaacctgtactgcagtaaagtcattcaatgacatcccacattgtttgaatcacaaacagtgtcaaggtgctttaatcacttctcgtgctgtcaaaagttaaaaatccagatttatattcccacacaaatttgcggtggaagtattcttgtacatgaatgttcatagcagcattatctatataataaccaaaaagtgaaaacatccccgttgtctgccaattgatgaatgaacaaaatgtgatatatccatatgatgaaatattattcaaccataaaaaggaaagaagtactgtaacatggatgaaccttgaaaacattatggtaaatgaaagaagccagacaaatggccacatattgtaggattccatttatatgaaatgtccagaataggcaaatccatagagataaaaagtagattagtggttgccgtgggctgggaaggtgggggatgtgcgggtcgtggtgactactaatgggtataagatttctttttgagatgatggaaatgttctggaattagtggtgatggttacacaactttgtgaatacactaaaaaacacccaattacacattttaaaagggtgaattttatgttacgtgaattatatcaactaaaaaataagatacctaaaaaattatgtactcatctggaatagtcattaaaatcacaatcatatttagaaacacacccaaatcagtatcatatatatatatatatatatataatataaactatataatgcatagtcctttatttagctggtcttatatatacatatgtgtatatatacatataaatgcatgcgttatagaaatgtaaagaatttatataatattaagggtgttgtgagaaagcccaccaatcttcattgagaagtgactcccagatcacaggagtcccagctaacttggccaagacaaagtaggttctgggaggctccaggcgcacccccgtatatcttagcctgataggacagcccggaagtttataagacttctgctaacacgtgaccagcgtagccacaaggaaaaggtgcaaggcgcactcgtgacgtcatttcggggcgaccctcttcttggcgtagagttttcagattgctcttgggaatcatgccgaaagtagtgtctcggtcagtagtctgctctgacactcgggaccgggaggaatatgacgacggcgagaagcccctccatgtttactactgtttgtgcggccagatggtcctagtgctgggtgagtagccgggaactgcgggggcgtctg

SEQ ID NO: 44402 - DNA, 2300 bp, Homo sapien
gtatatacacacactttctcccagttattaaatgaaatactaatctaggttctgcagtgaaaaaatttagcagacataataaaggtcccaacttagatgtttttaacatagggaaattatccatggggtgggcctgacataatctgataagcctttaaagtagactgtgctcttcctgaaaacaagattcaaagagtgagagggatgtggtgggagagaaattctctgttgatgactttgaagatggagtaggccacttggcaaggaatgcaggcggcctctaggagctgagagtagttcccaggtggcagctagtaaggaaatagggaccaaagtcctacaactgcaatgaactgggcttggccaacaacttgtaatttgttaagcagtgatgaaaacgaatatacttgcttttgtagatcttgcttttgttgatttcatatgtgtgtatgtgtgtgttagtagactgcaagttcttagatgagaggaaaaaaagttttttttttttaatttttgtacccccttcctactacagccataatgtgatgctattagggagacttgccttaactgatatgttggagttaatgggagatagaaatccttgaccatgaaagtacctgttgttaagcagcagctagaatcactaccattgtcaagtgcctcctgcttctcatgttagaaacaaattcctgcacatctgatatcttctggacatcttcacggggatgtctcaccagtcccatgaactcagtaagtcccacccaaaatttccttttccaaacttgtccctctctctctattctgtaattctgttaatggcaccttcaaaaccccagttatctcggggcttagagtttcagccactgttgactccttcctctctcttgccccatattcagcctgttgccaagtcctccccattcattcatatcctcgcctttattgtcactgcctgcttcagtatctcgcacctagatactgcaagagtctcctgcctgctctcttgagaccaatctctgataaggacagctctaatgatgtcacttccctgctcaatggacttccaaggaatccattagcttggcattcaaaactcttgatgacttaacccaaatctacctttctcctattttcaataatttttaaatgtgtattatgcctatcttctaagttattttgggttgacctttaaaaattatcctttaaaactgttattgcttttgcaggtccacggactgtgactcttcctgcaacctgcagcttttccacgttccttttacttcagacccactgtccttgcaactccctgcagtcggatagtctcatatcttggactcttctgaacataaatagccgcttggcttgttgaactaccaaggggaaatgtggttccagagccaaattgtgagtgcccaaaacaaaacagaacaaaacaaaaccctactccgcctgccttaagctcccattccctcccacaggacatacaacactatttcattctgccctggggtgatcattggcctaaacgttgagcgcccaatcctgcattcaatcccacagccccgccccgcccccccgtcatagtcaaggccgatttattcttttgattttccgtgattttaaccaatcactcctctccccacccctccgaccccagtctccggtgtccgaaggggttgtgcaccctagagttgccgctttttgagaaccggttttacctccgcccactccttcgtcctctagtttgggacttccaaacttctcccctctcctccccgggcatagtgcgcgctttcatgaatgatctggtcacaaaacaaacaaaaacgaatagaaaaagaaaaaaagagaaaaagaaaaaaagccgaaaacttcccagggtttgccttagaattagcaggtggggatggaccccgttccaccacgagctcctccagcgcccggggctccggcgtaccctacgcctctgcgctcgcggccccgccccgggcctcccgtggggctttaatgacataagcaactttcctcgcgcaccccccgccccgtcttggtacggcctgtccggcgctcgacgttccacccccctctctctgctctcaggttggttcagcccccgtctacactggggtggtgcttagccggcgccagaccgaccctcgacttcggagaggcagcgcggttcctctgggtgcttccgcctccccttctcctgcttctccagcctcttcggcctcctcgcccgccgcgggaacccgagaccccagtgtatgccccacccctgaccccgctcgcgacat

SEQ ID NO: 44403 - DNA, 2300 bp, Homo sapien
taccaaaacattggggagaaatgcttcctcatcagaatatcttggtatacatgctaaatacaaaggttatggaatataatcttcatcacataatctaaaaattgttaatagacatggtaaggtactggtatttgcttttcataatagatgtgttctttagaattggggtataaatcgtttttatttttttttaatttttggaaatgtttctgagtcataaaatctttttcaaaatgaatctctaaagtccactaagagtgttttaaatataaataaatcctatgatgaagagttttggatattacttgaaaaatcgattttcagtcatcaaaaataattttgaagttatatgtattttgctttcttctcaggggtcacaaactggtggccaaatggcagaaaacacctgcaggtgtgttttctttggccaacacagtattttccaaaacttgactttgtgagtgtctttaggcagaacatataccccctctagttcaaccatatcactccttattgccatacaccagtcacttaacacgtttatgtaattttggtggtctccctgtatagatggattaattgatactttccttacgatgtcttagcctcctcgggaagatgaacaaaattagtatacattatgtacaacaatggtgaggcttaaattttcagttattttaaagcctagccttctaaatattcagagggtaagctgtagtctcaagactgcataatactaattctgggattttaaattcccttaacatttgttttagagcttagaaattacattgaaggttatactaaacaggttctgattagtgtgactaaaagtgtgaagtttttaccctctttttaatgtgtaccttgaataagatttgggttgtcttaatttatattcaagtagacataaataggttgcttcacttctcaagatattaagtgaactgttttaaaagacttgcgattaacttctttggtagctaggtaatcacttagttgaacttctgggcaagtgtatgcagaaagctcaagtcaaggaacttgtgagccaccaatataggtactcaacttgctttgaactgtgagtgtttgatgtagacctaaaagtactgtttaatatctgaatgccttaattgtatatttcttactgatagttctgatttttgggttttgcctccttcagctgagtctagagatgtgaaactttagaattattatagcaaaaatagttgctcatggttttggagcacttaactttgtggaactatgcatattcctctcatttaaacctcacaacaatgctatatggtgggtactatgattaatctcattttacaaatgaggaacttaaggtttagtcaaggagaacaccttccccaaagtctcacagctagtaagtaccaaagcaaggacttgggcccagacctgtctgactgcagagctcatgctcttagcagtgtgttttactgtttttgcttatggcttccctatgtcttgctttactacctttagataccatatttagtgatggttttgaagtagctgggatctccatgtgctattacatctgcccagttttagagcagtgtctcttacccataatttagtcagattgcaacattgatccaaatgtgtttacacttgagatcataatacataaggaaactcaaagttttgaactctaacacattcccactttttcttgcatattatagtgtcaataaatactgaaaaggaagaactgtgctttcttcctcagaaagaggaagatttatgaccaggtggtgataaaggtgaagtatgttctgatggacatacttccatacttctaatgggcatatgtttgtccattccataagattttactttcttagttataatacatagtatcttcaggtctggctttgaaaagaaaatagggagtaacaataatttgaggaatataatgtctctgtatgttgcattttatattattttgaagctttgagacacttgttcatagtaagggcagctttgttagcaaattgtttccaatgagcttgctaaaaacaaactttttgatactgttttgtcacagatctagtcctagaatgattatagtcttctctctttcttaagcagtgataaaccttttaatgagaacaaaaaggaaataaattgctaactctgaaggaaccagtaagaaatacactgaagtatggtctgttgttttagaataatttgttaaatggaccagagtaatatagtggaacatgcatcaccttataccatatagtaactgattcttctaagtttac

SEQ ID NO: 44404 - DNA, 2300 bp, Homo sapien
ctgtagagatagttgttggcaatgatgagatgagaatttaggtcacctgactcctcatctagtgttcccccagtcatttgcctttgcactgctctgttttctttctttcttttttttttgaaacagagtctcactctgttgcccaggctggagtgtagtggcgcgatattggctcactgcaacctctgcctcccgggttcaagcgattctcctgcctcagcctccggagtagctgggattacaggcgcctgccaccacgcccggctaatttttgtatttttagtggagacaggggtttcaccatgttggccaggctggtctcgaactcctgacctcaagtaatcctcctgcctcggcctcccaaagtgctgggattacaggcgtgagccaccgcacccagcctgttttattttcttcacagcatgtatcaccttgtgaactttttaaaaacatttcgattgttaccccaataaacatgaatgcccaccacggagaaagacagacgtggaaataaattatgaaagtgtgtaaagtgctgttatcttctgctcctctcagtctaatacacccctaacataaagtgtcatataattagaaatacgtcattaaagagttaaagatggtagtgtgttaaagccacctcatccaatggtccggctcctggtggaacatttagttttatgcagggctatttctccccaccaagattgtagtcaattccaggacaacagagaaaacccactttctttccttcttttttgtactcttgctgtattgagcacacagtaggtgctgtgtaaattcccgccgacagacactcattgattaactgctttcgtgacacaggttggcagatagggactgaagttattgagtgaagctgactccgggtggagtgatacatttggctacagtgattgagcggctctaccttgcagtaccctcttctgtgggccccttttgtatcttgtaatcttttgcacttaagttgatacgtgaaatacagacttgcaatcgtgatcagaactgtgtaaacagtatctgtgttcgtaattgggatacagtatggacttgaaactggctaacttgagaagcggcgctgtggatgattttcttggcaagtgtttcatttttactacgtttccgcagtaagctattacacaaagctaatgatgcacgatgcacagagcatttcaagctactctctgaagaaaaggcacctcggggagctgactgttttgttttgttttaatgtaaagtccagtgcagacctaaatcccttacaaggaacatggtctcactgtcgcgccgcttaaaaatccagggaaaagcgtcagacgagccgtgggctaccaacattcatctgagggcaccttctaaccatattctcgaacctcagagaaccttcctaaattccctttctggagtccccgccctccgcttgtcaccgtagtgcgtcaaaggcccgtagtcgtcactggagggaaaaaagtacgtcgcgcgagattctgcgacgggatttggaagttagggaacagccgcggcgcaagcgcactggcctcacaaccccggacggcacgcgggtaggtaggctagaacctagaggaggggagcagagcgtgctggggtcttttatcgctctccgcgcagtgcgtgggtctgcggatccgtggaggtgcggagcctgactcggcctccccggctcgcgcgtgagtgcggcggaagcccttctgctcctccacgagttagaggagtgtaggggacgtgcatcccagtgtcgggacgcgagctcgtgctcctcttttcctcctaacggtggcccccacgcacacactccagtccccccgagagttgatcttctcccctcagcgcgcccctccttacccggcccctcccaccggccccccgtttccgcccgcttgctagctgcctagctcgcggtccgtagtcggcttcgtccctggggtccctgcttgggggcggagaagatggctggaggacgtctgctgttggggggcgacttcctgtcgcgccgccgctgccccccctcccgccgccgccgctgccgcccctcccgccgcccccgcccgagccagtgctggagcagtggcgctatagccacgaaagtgactggcagtgggctctgcggcgcagcttcatctgtcggcacctgcacagctatcccggggctgccctcgaccagctcctcgcgctctccgccgcctggaccaaccacgtcttcctgggctgcaggtgaggaaggtgtgggtgtcgggttagggacgggggtgagagatcgg

SEQ ID NO: 44405 - DNA, 2300 bp, Homo sapien
tgggggattctcccgggagacccgcagccctccagtcccctcccgttccggcagcagctttctgctctggcttccaaattctccccttttgtcccaccaccacccaaaccccaagtccagatcggggctagtgacctcggggcctttcagtccaccacgccctagcctttgccagggaagagccctgtcccagacacccagcctggaagccgccagtcacctctgactccccgcccccatgcggttggggcccaagcctcaccgtggttcctcagatatagcactggtcccccgtgtcactgccaacccagtccagggctcaggccctgccccaaagctccagagagtctgaaagactccagctgcccctcttccttgccaccgccatccgccctatggcctgcgccttctgtctcgcggagctcctctgcgctgatccctgattttgccaggctcttctctttaggccgctcctgggtctccagcacaatgaaggcgcacagtggcgctccctgaatacttggctcttcatgactgtccttactgctattccctcactgtgtctcttctttcttctccccgcccccctcgcacgcatccaagttctctgccctcagcttaatagagtgcctcctgactgcgaggccctgcactcggccctgggatgcgtttgctgagtccttgttctccaggcgcacagggtacatacataaagggcttcccgagagagtgtgagaagctccatccagcaggtggaaccaagtgccaggcatgctcttctttggctactccattttcttgtcttccctgacttctccgagaccagggcctctggatcgagtcccttcttcctctctctccctggttccttcttttctttttccctctctcctgcctcctcctcagctgctccagccttgggcctttacggggtcatcttccatgctccattggggccccctcttgggcccgggtttcctccatagccttgtcatcccctcccccatctggggtccctctggcgggcccaggtctctctcccacaccagggaacctgcccttttgaggagtggaatgtactgtccctcccgctggggcctcgggcatgccaaatctgccagcgtgctccagtgacagggagctagcaagaggccagtcccaagagagaggggagggcgccaaggccggagaagtggagaggtgcccacgagagaggacccgcggaggtgggccacggggataaggagggcgggcgggcgcacccctgccttcggaagttctctcctctgcgccctattggccgccttgtcccgggctgaatgagggtcaaggagaaatcagggggcgggacagagtgactggaggccgctccccgtcacccgcccctccatttcgctccatagagctgagaaccttcatctccagcccttcctctggtactagaaggggtgggtggtcttgctgagcgtctagggctgggtcggagagaggaggcgtgggttccgtctgtactaggtacccaaaggtggtgagcttggctccacgaaattacagcccacagcacccaaggcttggaaaccccagggcagaagcagcgtctcaagacctctagcctcggaccccacatgccacagctcagctcagttgccgggctgcagtgcggctccccccacgggccccctttctaagctctactgtggagcggcaggtgccgcaggcctccccggtacctcggccgcagctgcgctcccgggccatggagggagggagacacgacagtggggcatcgagactccagcggccaaggcgcacccatctaagcaccttgggatctcggtggaaaggaaggggggtaacgggggccgggaggagaactgcagagctcggccgctgagcagagtatgggaggggggaggggcgggggctcccttccagccttcggggtctggggacttagggatgtaaaggagagcaggggggtgtgacaattcagcagaggtcgggacgtaccacggagccaagtggcggggggggcagaggacgtggtcaccgaggggagcccccgccccccttcgtagaagcctatggctggggttgcaggaagaactggaactggtctggccatagggggaagcggcgcgttaaatccgccccctctccataccctactttcaaggggtgggcggtagaggggaggttggggttggagcagcggcgagggggcccctcccttgcacctccccccaccggacttggtcgcgcccgaagtgtaacactttctctttgtcggaggagctcct

SEQ ID NO: 44406 - DNA, 2300 bp, Homo sapien
tacttaccttgtagtgttctggtgaagattcaaaaggtcactggtaaaacatggtaagctcacagtgaggcttgaattaatacatgcagctacatagtaactatcaagccccataagcagcagccactgttactttcatccttttgcattgcaacagaacagatagtgctaggagccataagaaaggtacaaataaactattacaacagtgttgaaggggtgatgatttccagctaaggggaagagacagcatttgaattcggccttagaaggtgactggtggtgtcatgagctaaattatgttcccccaaaattcatgtgttgaagctctaatccccaggacctcagaatgtgactttaggccgggcacggtagcgcactccagtaatcccagcactttgggaggccgaggcgggcggattacttgaggtcaggagttcgagaccggcttagccaacatggcgaaactccgtctctactaaaaatacaaaaattagctgggtgtggtagtgcgtgcctgtagtcccagctactcgggaggctgaggcatgagaatcacttgaacccgggaggcggaggttgcagtgagccaagattgtgccattgcactctagcctgggcaataaagggagactcagtcttgaaaaaaaaaaaaaggaaatatgtgctatagtaatacatgggcttcttaacatagttctatttgtgaacttataactaatgtaatttaaagggagtgtgtaaataatatatggagacatctgcatcaactgtaatgtaacatgaagccatctatggtttctattagtgaccaagtcacgagtactgctaatgccactgtggtctgttgcctacattcctaaataaagaaagcattacatttcattaaatttggtgaaaataaagttgtattttcccattcaagttcatgggatcctctgaattctatacatggactcttgtggactccaggttaaaaacccttgctgtaatccgttggtgtaaaaatgcttgaggtgactgcaaatatacatggaggtttttgcgtttatttatttactttttcttttttgagatggagttttgctcttgttgcccaggctggagtgcagtggcgcaatctcggctcgctgcaacctccgccttcagggttcaagagattctcttgtctcagcccccgcagtagctgagattacaggcgcccgccaccacgcctggttagtttttttgtatttttagtagggacggggtttcaccatgttggccaggctggtctcgaactcctcgtttcaagtaatccgcccgcctaggcctcccaaagtgctgggattacaagcgtgagccaccacgcccagcttatttttatgtttattttatttactcatcaaaaaggaaaggtttttgcttttaaatggggaaaaggatgaaaatggggaacactagcatcccaaacgcatgttattaattattgtacatcttgccaaaggcgggctacaatgtcaggctggacttctagcagccaaggaagaggttctgtccctaactttctgagttgaaaactttgattggcaaccttccgcctagtcgaaaacccctaggcttacataagcgtccacgtggtccaaccccctccaacttctccggcttcctccgacacgactgtcccttcccacacctcccagccaggccgaaatgactcgtaaccctctgggaaaatggcacttactctccgcctgccgagctccgacccggcgttccgagtccccggcgcccggaggtgacggtcgcttcccctgccctcccttagggttagtcccgcccaatcggctccttaatttttcggaggggcttctactttggcatttatcacgggctgtctgcctcacttacgaagcagggtgcccctagcacactgccgggcccctgggggaacgcacttagggaagcgaagcaaagctaactgcatttggcagaaaccagcgcgctttcccacggcgccacgggagcgcaccgctagacagagaaggcactagaagaggcggtcggtgcatagcgtcacctcctaaactccgcccatcggaagcgccttctaagctcgttcttccgccagcttccctcctcttcctttctccgccatcgtggtgtgttcttgactccgctgctcgccatggtaagtccatcggcccccatcggccccggggtggcttcccaaaacccgaggccgctgccaggaaatgcctgggccgcgcggagcgttgaggggcgggagccttttaaaggctttttcaagaaaatatcca

SEQ ID NO: 44407 - DNA, 2300 bp, Homo sapien
gctggtctcgaactcccgacctcaggtgatccacccgcctcggcctcccaaagtgctgagattacagctgtgagccaccacgcccggcctggacatgtaaattctagagtagagttgtcagcaaagacagaaaagccaaaagaatgaatgagattaataaaggagtgagtgtacatagaaaagaggtctaaggactgagccctgggacactttattctggcaactgacaaacagctggtggtttaaagctagtgaggacaccaaaacagaggcatacactaccaacatgcaagtgcagagctaagcagtaggtcagaggcagatgcataaacaaggctcataagaacggccaggtactgaaagcaagagtaacagatgtcaaatacagggaaaccgttttagccacaggaataggaatccaagaataggctggacaattggagtgagaaaatttaagtgcagagtcaggggaatatattctagaggtcggcaaaaatgggagttggcccttaggcagctttctgccttgggctcctattgcatctttaatttggtttctgtcctctatgggtgtctgtgtctctctctctttttgagatggagtctcactctgtcacccaggttggagtgcggtggcacaacctcggctcactgcaacctccgcctcccaggttcaagtgactctcctgcctcagcctcccaaatagctgggactacaggcgcctgccaccatgcccagataatttttgtattttagtagagacagggtttcaccaagttggccaggctggtgtcgaactcctgatctcaggtgatccgccggcctcggcctctcaaagtgctgggattacaggaatgtgccaccacgccctgctaattttttttgtttttagtagagacagggtttcgccaagttagccaggctggtctcgaactcctgacctcaggtgatccacccaccttggcctcctaaagtgctgggattacaggcgtgagccaccacgcctggccgactgatctgctttctatcactgtggttttatttttctaaaatttcatataaatggaattgtacaacatgtactctgtgtctagattctgtcactcaacataatcactgttagattcacatttggattgtttccagtttggagttattataaataatgtaaaattggccctttttaagtgaagatggtgatcgcaactaaatcaagttgggttttatttttattcccctccctgtgggacatcagtacctggggagaaggatccttttgctaaaataaggtgatgaaaacaaatcttgtatattttagtcatattactcctttaaatatcagtatcttgtgtttatttattattatccttcttttttatatacagggtctcgctctgtcgcccaagctggagtgcagcggcgcgatcatggctcactgcagcctcgaattcctgggctcaagatcctctcttctcaaccttcccgagcagctgggactacaggcgtgcgccactgaactcggctaatattgtagtatttactaagtatctgtaaatcctaatcaatataaggaaaataaagttttttaaatgttaggctttttcttttagttgtaggaaaataaatgctaaagcctctgaattcaatgataaaaaatacaagtcgctcccctagtgaggcaaaatttggacggcattgagtttatctgatggaaactaagcgtgaagaacctatctttcgacctggaaaactctgaagatgaaaggattcgatttactcacaaacagggaccctgagatagctctggcccctgaacgcccaacaaaagcgggtagctgctttgtatgccgggatttgtagtccccgacagagtcacttcaagatggcggaattgctaatgacgcgcgaaggggcgggccccgagggagtctgggccgcgaggggattgggtggcgcaggaacttggcgggcgggaagtaaaaaccaggtgttaaaacctttgcactgggaaaggcccaagtctcgcgagagcttggcaggacccaatggaacgtggggcccgacttatcacaaggggcatttgttgggggcggagctttgacgggagcttcccgggagccgtttgtgcccggggtaaccccgttccggccaagccgcttcagcgggggacgtagccatgaaggaagagaaggagcacaggcctaaggagaagcgagtaaccctgttaacccccgccggggccacaggcagcggtggtgggacctcgggggacagctccaagggggaagataagcaggat

SEQ ID NO: 44408 - DNA, 2300 bp, Homo sapien
ttcaagtgctcaatagccacctggggctagtgtctgtcacactggatagctgagcacagatacttttatcacccatggacgtgggggttaactatagctgcttccaagacagcaagggagccgggctcggtggctcacacctgtaatcccagcactttgggaggccaaggcaggtggatcacgaggccaggcgatcgagaccatcctggctagtatggtgaaaccccgtctctactaaaaatacaaaaaaaaaaaaaaaaaatagccgggtgtggtggcatgcgcctgtagtctcagctacgcgggaggctgaggcaggggaatcgcttgaaccggggaggcggaggttgcagtgagctgagatcgcgccactgcactctagcctgggcaagagagcgagactccgtctcaaaaacaaataaataaataaataaccaagacagcaaggaacatttcccatatgtgaagcctgtggtgctagctaccagttccccaaacacaacccctctccccaacaccttggctcgggtatattttgtagtacaggctcccaagagaaagaatgcatgaaagtactttgtaaactattaagtgatacagaaatgtgatataataaacaggctcagaggtcttgctttcatcatggctttggttacttcgagcaaattatagctcttttctcaaactactcccacccctataatttatgccaaagtgttctgaaaagaaacacaggcaaaatggttatcctagggctaaaaatcctgattatacctaccttgaagcttttaatccaggaccctacttcaccacccgcctgctctgtcactttctctacaaaggaaggacacgaagtaagacttccaaaagaacaaaacgtttattttttaaatttaagaattatgggaaacctaagtaatgggaattgcatcctcatcggggtcttctggcaagtcggaagcaccaccctctcctgtagctcgatgcttctctagtttagcaatcaattctttcgctggattgaagacgccattggtctgctggtcacagacatagcagcgcggggtggtgcggaaatgctgcagtgcacagctctcgcagaaataatgcctgcacttggtgacaactgggttttggaagctctggcgacagatgaaacacttgaatggtatttcctcatcatcgcttcccacttcatagttttcatcctcatagacaccatagcgaccctcatcaagctcacgttcgatctgccacccatgcttgtaatctgaacggtcatggaggaatttgcagctgtctccgaagccgcagaagccagtctctttgtagtccttacagatgtcgggctggtaatcccagcgcacggtggcacgtagatgctcgggcgctcggatggggcccttcctcaccatcccggaagaggcattgcccatagacgtatccttgggcttcatgtatttctgataattgttgattccccgatagatcttgtcatcctccttgcccctcagctcctcctggatcttctggctgcgctcaaagatggcttgtgcatcgcgctctttctctgtgtccagctcatagacagctgtcgctcccatatcctctggtcccacgggtttcgccgaacgggtggatttataaaccacgccgagactctcgggctcattttcctcttcctcttcgctgctcaagtcgccgtaagccgccttctgtttaccactgtcacgggtcttctgtatcattggattgtgggtcacccgcttcttttccggtcgaaccacagtgcagccttcgtcgctactgctgccgctttctccgggctctgggtcgcaggccgggcgctttctgcgtccagcagcccctttccgcccaggctttttgaaaaggaaggtgcacacctgatccaccgcctttcctggagaaagctgctctgccattttagagtcctgagctccgaaacagccgtggctgcctgggttgcacttggcccctgcacgtcactccacgttgcgcgctccgccgggagtcgaagcaaaagacactgacggaagaggactgcgagagcccgagcgcccgtctctcttgtgccctagcagattccgtcgcttcttccggagccgtacgtggcaccgccccgctcgcgggcggccgcggggcttgctgggaagagaggcgaagccaggtcacctttcaaggacccagaagtagggttttggcctaggtaacggggcagagatgtggttcgagattctccccggactctccgtcatgggcgtgtgcttgttgattccagg

SEQ ID NO: 44409 - DNA, 2300 bp, Homo sapien
atcacttgagcctatgagtttgagggccagcctgggcaacacagcaagactgtctctattttattttttgaaagtatttttataatcttagatagaaaaggcctttgtacgggagacataaaaacctagaatccagaacaacaaaacatgatacattgaatatcaaaatttagaactacctgatgaaaaacatcataaagtaaaaaagacaaacagcagactgggaaaaatgtcatatataaaatagacaaaaaaattaaagtctagaatatataaagaaccatagctcaaaaagaaaaagacaatggaacaggcaaaggatataggcaacaatccacagaataagaaatatatgacagaagaaaaactaaaaaaaaaaaagaaatataaaagattaaatatgtaaaaagatgccaacctcactagtagataagaaaatgctagttatatattagcactgtatgacccttggcaaggcattaccagaacccacctcaaccctggcaaaaggctggcatcagagtggcatcttacctttgacacatagtaacgatcaactccagagatgcgcctatctctttccatcagactccagtgatacccaaaatgagcaacccttttttccttcaaataagagacaattattgttgcagtttataaaagtgagtgacccaattgatagatactacaatttttaaaagggacattccagagaaatggaatcatcgtttaaataaaaatgcaaattagtagtacaaagaacagaatctcctaaataaaatcagaccactaaactttaggattaagttggtacctgtgactttttacactattttaaccaacatgaattttttttcctttttttttaaaaaaaaaaaaaaagaaatatctagttgttgtcttttgggacactaagaaacaacagctgtagatcacacgtgaagaacaataacaaaatcaaaaagtaaataaatttatatcctgtactcttgagatgatgtgaaggactaggaagaggggaaaatgaatcctgatgtaaaaaaacaagatctcgcagtaaattcctaaaggcttgcaagagaaagtggggaataaaaaagtcaagggtggccggtcgcggcggctcacgcctgtaatcccagcactttgggagatcaaggcgggtggatcaaccgaggtcagaagttcgagaccagcctcgccaacatgatgaaaccccgcctctacaaaaaaaaaaaaaaagccaggcgtggtcccggctactcgggaggctgaagcaggaaaatttctttctttatttatttttttttgagacggagtttcgctcttgttgcccaggctggagtgcagtggcgcgatctcggctcatcgcaacctccgcctcctgggttcaagtgattctcctgcctcagcctcccgagtagctgggattacaggcatgcgccaccacgcccagctaattttgtatttttaggagagacggggtttctccatgttggtcaggctggtatcgaactcccgacctcaggtgatccgctcgcctcggtctcccaaagtgctgggattacaggcgtgatccaccgcgcccaaccaggagaatctcttgaacccagaaggcggaggttgcagtgagcgattctcaggcttgagccaccttttctaatctaccttcccggcccccgcgtcgctactctgccctaaggcccactctgatacacccagaaacgctgtttttcactagagcaggatgtagtttctatcgggcttcgtttcgcaagcctcggcttctaggcaaccggaagcaagtagagggccgacctcggagagagggttcgcaggctgacggtctccctgcccaccacccttttcggaaatcagcccgtggagtcggcccccgggccgaagccggcttaccttgcccccgttagtgaacctgtggatgtacgcagtagccagtcctggaatcaacaagcacacgcccatgacggagagtccggggagaatctcgaaccacatctctgccccgttacctaggccaaaaccctacttctgggtccttgaaaggtgacctggcttcgcctctcttcccagcaagccccgcggccgcccgcgagcggggcggtgccacgtacggctccggaagaagcgacggaatctgctagggcacaagagagacgggcgctcgggctctcgcagtcctcttccgtcagtgtcttttgcttcgactcccggcggagcgcgcaacgtggagtgacgtgcaggggccaagtgcaacccaggcagccacggctgtttcggag

SEQ ID NO: 44410 - DNA, 2300 bp, Homo sapien
aaagaaaaagaaaggctgggcacagtggctcacacctgtaatcccagcagtttgggaggccaaggtgggcggatcacctgaggtcaggagtttgagaccaaaaattatttgggcgtggtggcaggtgcctgtaatcccagctactcaggaggctgaggcaggagaatcgcttgaacctgggaggcggaggttgcggtgagccgagatagtgccactgcactccagcctgggcaacaagagcaaaactctgtctcaaaaaaaaaaaaaaaaaaaaaaaaaaaaaaaaaaaagagagagagagagagagagaaagaaaggctatctaatcattatagagagagattatgatgtaccaggcattgttcttggtcttcacatgaattgcctggtttgatccccataaaatccctattctgtaggcattgttattaaccccattttatagacaagggaactgagaaagaaaaatgttaaattgttcctgagtgtaagctgataagcactatatctctttcatctttgattcataaaagacatctttgaaagctgtaaaaggaaaataaaaacttgggaccccaattcactctgccaaaaggaaaaaaaattaaactgaaagctgagtcatgcaagaagctgcctttccttttgttcctaagcagacagctacaaataacaggttaaatatctccacctgtagctactctatgtttaccttatcttatgtaaagtgctgatttactgagcaggagacggatacataattgattcttcctctacctgctctttttctcttgcaacatgtggattcaatcatgtgaccataccttccctctcttccctcaagctcgcatttcccctttattattattatttattattattattattgttattatttgagacggagtctagctcttgttgcccaggttggagtgcagtggtgcaatcttggctcactgcaacctctacttcccgggttcaagcgattctcctgcctcagcctcccaagtagctgggattacaggtgccccccaccatgcccagctaatttttgtatttttggtagagacagggtttcaccatattggccaggctggtctccaactcctgatctcaggtgatctgcctgccttggtctcccaaagtgctgggattacaagcgtgagccactgcacctgcccttgcatttctcctttaaatactgaagcctaggccgggcgtgatggctcaggcctgtaatcccagcaccatcagaggccgaggtgcatggatcgcctaaggtcaagagttcgagaccagcctgaccaacatggtgaaatcccgtctctattaaaaatacaaacactagctgggtgtggtggcaggagcctgtaatcccagctacttgggaggctgaggcagcagaatcgcttgaacccgggaggcagaggtggcagtgagccaagatcgtgccattgcactccagcctgggcaacaagagtgaaactccatctcaaacaaacaaactaaaacctgaagcctggccaggtggggtggctcatggctgtaatcccagcactttgggaggctggggcaggaggatagcttgagctcaggagttcgagaccagcctgggcaacagagcgagaccttgtctctacaaataatttaaaaattggccaggtgtggtggtggcacacctatagtcccagctacctgggaggctgaggtgggagaatcacttgagcccaggcagtggaggctggggtgagccatgactgtgccactgcatttcagcctgggtgacagtgagaccctgtctttaaataaataaataaatactgaagccctcaaagtcatctttggagaaaggcacagacctgtctcccagacacatccttaaccttggcaaaataaactggtaaattgagacctgtttcagatactttttggtttgcaaagcaatgaagtacacatgggaagtcctaacctcagaatttggaaatgaaaaagtaaaagctcagccaaagaagtcagctttgggtgtgagtttgggacagtactttctgtacctcagtctgttcaactgcaatatgcaaatactaatacctcataatgctattgtgaggagtaaatgacttcagacactgaaggcttaacacagtgactggcatatcatagggatgcccaatacataccagctgtgaggcttatcaccactgttcttcctggcatggccctgtaagctcatcttcggctgaagagaagctaggtatagctactacagtttggtcctattattgcggtcagacagttgctgt

SEQ ID NO: 44411 - DNA, 2300 bp, Homo sapien
ttttagtagagacagggttttaccatgttggccaggctgatcttgaactcctgacctcaggtgatccacctgcctcggcctcccaaagtgttgggattacaggcgtgagccaccacgcccagccccaagtatattttttgttaaatgaaactttttgactaggtgcagtggctcatgcctgtgatcccaacgctttgggaggctgaggcaagaggattgctcgaggccaggagttcaagatcagcctggacaacaaagcaagacctcttttttttttttgagacggagtctcgctctgtctcccaggttagagtgcagtggtgcgatcttggctcactgaaacttccacctcctgggtttaagcgattctcctgcctcagcctccctagtagccaggattacaggcatgcgccaccacgcctggctaatttttgtatttttactagagacggggtttcaccatgttggccaggctggtcttgacctcctgatctcaagcaatccgcccgcctcagcctcccaaagtgctgggattacaggcatgtgccaccgcacctggcggcaagacctcatctctacaaaaaaataaaaaacttttatttcgggcccggtgcagtggctcacgcctgtaatcccagcaactgaggtggatctcctgaggtcaggagtttgagaccagcctggccaacacgatgaaaccccatctctactaagaatacaaaaattagccaggcgtgatggcgcatgcctgtaatcccggctactaaggaggctgaggcaggagaattacttgaacccaggaggcggaggttgcagtgagccaagatcgtgctactgcactccagcctgggcgacagagcgagactccatctaaaaaaataaataataaaataaaataaaaacttttctttcattttcagaacttcagttgttttctacgtctaatgcatcatttttattttcttcattaattcctcgatttctgaaaactgaaggtttgaccatatcaaaagagacttctcttcacctttcataaatctgtaaacaaatgaagttacttacaaatgtgaagctgtttctgtcacatattacagatgatgaaatgagcagttaagagctgtgtcatgcattcagcagaatggatgcacttgacagtctcccaggccatcatttctatagtctgtaccatttgatagtatcatcagaacatcagaccttaagtgatgagtttacatttaaaccaagtttttatccatgtttaaaatataaagggaaaaaaggcttaactagactcctattgaatttgattatatatttaggaaacaactcagccattgagttataatttacatgtctttatctgctaggagattaagtgagagagagagaattggagaattgggagctcctgaagtatggggactttctccaaagaatcctgaaccagagtaagtggttaaaaaatatatttttaaaatgttataatatgtgtttaaatcctgaatctattgtgaaaatgtttaagtgaagaactttaaatatatctcacatttttctttcttgtgatttatgttcttctaccccttaagttttaaaaacatagaacatatctaaagattaaaacatgttgctagtaggttttagcataatctaaaataattcctggaatataattttcctattaatagaagggttcattgttaaataatacacattattttgaattattttttctcaactaaactcagtggcagattgcatgccagatattaacattacaaagagatttttttttttgagatggagtcttgctctgtcgcccaggctggagtgcaatggtgcggtctcagctcactgcaacctccgcctcctgggttcaagcgattctcctgcctcagcctcccgagtagctgggattacaggtgcctgccaccatgcccggctaatttttgtatttttagtagagacggcggtttcaccatgttggccaggctggtctcgagctcctgacctcgtgatccgcttgcctcagcctcccaaagtgctgggattacaggcgtgagccactgcgcccagcctacaaagagattttttaaaacgaatataccagtatggttttgttaatattcctatatccaatactatctgcagacttaatgctttttctttttgcttatttcttttctctttgatgctactcataagtttcttcttccctctctgtttctgtgccaactttaggttgagttgagacaatgtgcttgacaggtaaacctgtaatttgtgattggataataaag

SEQ ID NO: 44412 - DNA, 2300 bp, Homo sapien
cacgccactgcactccagcctgcttacagagcgagactccatgtaaaaaaaaaaaaaaaaaaaaaaaaagaataggaatactgatccttaactctatattgctgggctggcatacaatgagactagtttaaggagctggacaaagaggggattacaaattccttttgctggatagataatagaggctgggtagggtatgtgggaggaagcagaaggatgaagagaaataggttaaagggtacaaacatacagtaagatagaagaaataaattcaatggtttttgttgttgttttaagacagtgtctcactctgtcgcccatggagtgcagtggatcaatcacggctcactgcaacttcgatttccgggctcaagtaagtgttcctcccacctcagtctcctgagtagctggcatgcaccaccacactcgccaaatttttaaattttttgtagagacagggtctccctatgtttcccaggctggtctccaactcctgggctcaagtgattggcccgcctcggcctcccaaatttctggagttacaggtgtaagtcaccatgcccagccccaaattcaatgtttgatattgacagcatggtagagtgagagtacactatttttttttggaaacacagtctcactctgttgcccaggctggagtgcagtggtgcaatctcactctcggctcactgcaacctcagcctcccgggttcaagcgattctcgtgcctcagccaccctagtagctgagattacaggcacgtgccaccaggcccagctaatttttgtatttttagtggagacagggtttcgccatgttggccaggctggtctcaaactcctgacctcaagtgatccacccgcctctgcctcccaaagtgctgggattacagacgtgagccaccataccaggccgagagtacacttaacaaaaatgtattgtgctcagataatggacaccttaaataccctgacgtcatcactacacattatatacatgtaacaaaatttcacatgtatcccatagatttgtacaaatttaaaaaataataaaaaattagctgtgcatgatggcacatgtctgtaatcccagctactcaggaggctgaggcaggagaatcacttgaacctgggaggcggaggttgcagtgagccaggatagccactgcactccagcctggatgacagagggagcccttgtctcaaaaataaaaaaataaaaaataaaatgacactttttggggaaaaaaatacaagccagacgcagtggctcacacctataatcctagcactttgggaggccgaggctggcggatcgcttgagcccaggagttcaagaccacctgggcaacaaggtgaaaccctgtttcccccgacccccctcaaaaaaaaaactacccaggcttggtgtcgcatgcgcctgtaatcccagctattcaggaggctgaggtgggaggatagcttgagcccggggaggcggaggtttgcagggagctgagatcttgccactgtactccatcctgggcgacagagtgagcagagtgagttccagtctcaaaaaaaaaaaacctccttttgctggggcatattggtggagacggtggctaggggataagtatgcagtttttctctaggcgggaaacttaattgaagtttatcaggcgcgagtcattaacaaaatttgcgccctctaagctaacacggcaatatggggcttagacaccatagctaatccccagtcgcgaaaaaccctcccgatttgcttgggattggaaagaaaaagaaaatacacattcatactttcatacatgacatacacacacacacacacatttatatataaatacacacagaaagcacaggaaacacaagcagaattaactgtcttgttcatacggccactcagtgaaatgtatactgtatattgtgtttgaaatatatacttcccttcaagtgtttcaagttcaaggctgagaaagaacttggtctcttgcttagacttgaggagcctcactcggaactggaaggatgcacgcaatctagttgccccaccggcttatttatattgatgcacacatcgcttcctgtcggtgacgaccgcctagatccggggaagggttttgcagaagtacccagaactgtgtccaaggtttcctcagatttgggctgttccgcagcggcaggtcccgggaaccaaggcaacagacatcttcctaggctcgcgagagcgcccccttgtcccacggctgctggggccccccagtagccatggctccggtgtccggctcacgcagcccggat

SEQ ID NO: 44413 - DNA, 2300 bp, Homo sapien
tcagaggatgagttaggacgtatttcctatgcttctattttttagaacagattgtagagaattagtataatttcttccttaaatgtttggtagaattccccagtgaaactatcttggccaggtgctttctgttctggaagattattgattcaattaaaaatacatatagatgttgagattgtctgtttctccttgtgtgagttttagtagattgtatctgttgggagaaaagctgagtgtagggagaaaagctgagtgtagggagagaagctgaggcagggcttgcatgtctgctagacttgctggctccttacttctagcactcccattatcccaagtagccatatgtttttcattcacttgatacactgtttcctttcaacccccacatcctcaccacctgtttctttgagcactaataaatagcgtgggctcccagagctcagggcctttgcagcctccacacttgtgatggcccccggtcccactttctctcaaactgtctttttctcaatcctttgactccactggacttcatcgtccccacaacctggtgttgggtctgatcatcccaacagtatctttcaaggaattggtccattgcatctaagttattaaatttgtggccataaagttttgcaaaatattcctttctcatcattttaatgtccatgagatcggtagtaatgacctctctttcatttctgatattagaaatttgtttctgggcatggtgtctcatgtctgtaatcccagcactttgggaggctgaggcagaagatcccttgagcacaagagtacaagtttacagtcagcctatgattgcatcactgcactctagcctgggtgacagagcaagacttttgtcttccgccaaaagaggaaaaaaaattatgttttgtctcttttttcccttggttaccctgacttgatatttaccgattttgtgatcttttcaaagagccaacttttggttttgttgcttttcttgttttctgttttaaatttccttgatttttgctctgagtttttattccattttttcttctgctttcttttcattcaatttactcttctttctctagtttcttaaggttgaagtttagattatgaattttagttcctattttttttttttttttggcagagtttcgctctgtttcccaggatggagtgcagtggcacaatctcggctcactgcaacctctgcctcctgggttcaagcaattctccagcctcagcctcccgagtagctgggactacaggcacgtgccactatgcccggctaattttttgtatttttagtggagatggggtttcaccatgttagccaggatggtctcgatctcctgacctcatgatccacctgcctcagcctcctaaagtgctgggattacaggcgtgtgcccggccctgtttttctaatgcatgcactaagtgctaatgaattttcctctatgcattgctttcattgattaccacacattttgaaaagttgtattttcattttcacgtagttcaaaatatttttcaaattcccctgaaatgtcttctttgatccatgtgttctttagaagtgtgtcttatggcaaagaagtggtctaccttgctgaatgtcccatgcgagtttgagaagaatgtgtattctattgtaggataaaatgctctataaatgtcaactagatccagtttattgatggttcaaccatatccttactgattttctgcctgctggatttgtcaattactgatgttgacgtgttgatgtctccaagtataatagcgggtttagctcattctccttgcagttatgtcagttttcgccgcacatatttggatactctctcattagacacatacacattaaggattgttctgttttctggagaattgactcctttatccttatgaagggcccctctttatccctaataattttccttactctaaggtttgctttgtctgaaattaatatagctactccggctttctttttctttttcttttttgttttttgagacaagagtcttactctgtcacccagattggagtgcagtggcatgaccttggctcactgcaatctccgcattccaggtttaagcgattctcgtgcctcagcctcccaagtatctgggactacaggtgcatgcaactgtgcccggctaatttttgtatttttagtagagatgggaggtttcactatgttggttttcactatgttggccaggctggtctcaaactcctggcctcaagtgatctagccgcctcagcctcccaaagtgctggtgtgtctggaattt

SEQ ID NO: 44414 - DNA, 2300 bp, Homo sapien
tttattgtcgcaaaagcatactctgaagagaaggccaacagtatggctggacaatcttgctaaagagattatatatgtgattcatggatccaatcaaccatatcagctgaaggcaggaatagagatgggtttatccaggaaggatcttgtctaatgacatggactcccataacacacacgagactgataaggattttgagaatgttatatcaacagaaatactggcatcttggagtaaaggagatagatatgggatgaaatgaaggaagactgttggacttctggaaatctataggcaggatatgagctgacagggctactagactgcaaagacacattagccttcaagaaaaaggaagagtgaattatgagggtggcacagaagctggtggatcactgcaagaccagatggcagaacattgagctaaagaggattgttcctaggccttgaaatctaatggaattagctatgctaattatttatttatttacttttttgagatgaaatctcattctgtcacgcaggctggagtgcagtggtacaatctcagctcactgcaacctccacctgccaggttcaagcaattctcctgcctcagcttcctgagtagctgggatgacaggaactcaccacaatgcccctctaatttttgtattttagtagagacgaggaggggggtttcaccatgttacccaggctggtctcgaactcctgacctcaagtgatccactcacctcagcatcacaaagtgctgggattataggcgtgagccaccacacctggccctgccatgctaaattttgaacttacttgggacaagaaaccactttatgcctcccatattcattcttttggaatggtaatgtcttgtaaaaggaaaataaatctcaggactccaaaatcattaagccaaagggaaaagtcaagctgggaactgcatcaggcaaacctacctcccattttattcttaaataagatagctacaaacaaaaaaaaaagctacatacatgtctcacaatttgtccactgggacattccttttgagccccaagatgtttaccttaaaatggttctgttgaattttaccctgacaatgtaaattgatagcttatcttcacaggttctagacaaagaacagaactcaaagtcatccttctgttcatctgagacagatgcatatctgattgctttcctaatgtaaaaatgcagattcactgagctgacaaaggcataagtaactattcctctacccttctctcacatgtaaactgtgtattcagtgaaaggtttatcaaacactcaaaataatgcaaccatttgtctgttatctacccacacctttaattttttttccttttcccccaatatctgcccttttgcctttaaatactgaagtccacaaaatcttctttggaaaaaggcatagacctgccttccagatgcatgttcttaaccttggtaaaataaaatttccaagttaattgagacctagctcagatactttttggtttacaaattggtaaccaccaagggattctgagtggaggtgcccctgacctttgacaaatcttctattactgcttggtaccagcttgagatatctttattgctcaaatcaataggcagatttgctgaggcctgggaacttcccccctccagacaatcccttgtagcaggacgagctgcagacaaaatctttcagacactgagttgtagaaggaagggctttattcagctgggagcatcggcaagctactgtcttaaaatccgagctcctcgagtgcacagtttctgtcctttttaagggctcataacactaaagatttcacatgaaagggtcgtgattgattgagcaatctagggggtatgtgacaggggcttcatgcaccggtagtcagagtgaaacagaacagagcagggagtttcacagcgttcttccatacaatgtctggaatctatggataacatcggttgctaagtcatgagttgatttttaactactaggtttaggccaggcaggcccaggcctggtttcagttctggttttgggtctggtgcctggctgcctgcccttggtttcacttccttgtttttttcttaaaacaggtactgagtataaaacaatataaaacaatatgagagggtccgtctcttccctcaccctgatctccccaaatttggtcgatatctaaggtttttttttgctgtacaactccttttctggagttttactcactttcaacaaggaaggtgagttttcctgcttccatgatgatggagggcaggcaactcctttctg

SEQ ID NO: 44415 - DNA, 2300 bp, Homo sapien
ccctgtcaacacagcagccaacaaaggtttactgagtgaagtacatataggtacaaaaagacttatagaaccattattttcacaataaaacatcttacccctgttgcccactgccagagaatagccatcatctctctcctttcaaggacccttgtaaataaacacatacaaactgacagaagcaggaaatgtgaggcagcatgtttaatcatctccatctattcgaaaaccccatgagatagttatcattgttattcccattttacagatgacaaaactaacacaaacggagagtgatcaagtgagattagccagctagcaacaggaagcaaagcaaaatttcagattccagcagtttagctccaggaagagccagcctgacgaggagacatcttagttaaaatcagaaagaggctgttagatcgtcatcccttcccatctctttgaacgtgaattggtcaaatattttccagctgttttcttacccatcctctgggaacatgaggtatgatgcgtgcactcatccattaggatcagtcgttggggtgactggaacccacagtacatgtaggggcccacaaactagtttaatttcttatataaaataaggttgatgaaaagggtcattgtgcaagcaaaaatagaatgagtcactcaaacgatggaggataggttctatggttaaaacctactctctatattcaggacattaacaagtcctgaagtatctacaaaacacttcttaaaggaagaatcttagagcactcaatctgtcctggctgtgattatttgacaataaataaaatgtatttattcctaaacaagagctcagaaagatatctgtagaaaagggcaggagtagaggaaaagagggctatgcagcagcaggaaagaagggaaatcactgcaggtccacagcaccagctcagcacagaaggtaagtgcgcatttgtaatgggtctgtagccagagacatagcagaagctgcgctatccacagtcacaaccaaaggcaaaggaaggatgccctgcaattttagaaatcttggctgcagctgggaacggtggctcacgcctgtaatcccggcactttgggaggccgaggtgggtggatcacttggggccagcagttccagaccagcccagcaaacatggtgaaaccctgtctctactaaaaatacaataattacccaggtgtgctggtgcgcacctgtagttccaggtactcgggaggctgaggcactcctgagtacctgcacaatacatgcaaacacccaccccatcctactccccggcccccccgccctagtccccccctccaccctacgcccccccgccctactccctcccccgccctactccccccaccccgtcctactgcccccactccaacacgtgctctcccgtgcccaaggcaaggccaagcccctgaggcatgcgcacctcagcaggcccaacccacagcaaatagtgggaagaggaaaggcaagagaggaggtctctaagtggatacactgttactgaatctaggtacccagaagatggaggttgtagtgagcccagatagtgccactgcattccagagacagagcgagactgtctcaaaaaaaaaagaaaagaaagaaagaaagaaagaaaagaaaagcaatctcggatgctctaagcatcattgtgcatgtttccacccttgcactttgatgtggattcattactaagaattaatagtggactttctcaaggagtgtgctgcatttttacatagtgcatttgcgcagcccacaagctttgcaaatccaggcccaagctcctgctcctggagacctaggaagcatggggctagtgcaaaatctcccttatcgccataaaatgggcttgcacaattcagcacagcagcttcccccaagttccacactcacgcatgcctgtctacaggacaacgcatgcaagcacgcaccccatcctactccccctcccacgccctactcccccctcccccacaccctactacaccacttacccctccccccccacaccaccaacgcgtgctctccctcatccgggcaaggccaagcccctgacgcatgcgcacctcagcaggcccaacccacagcaaatagcgggaagcagaaaagcaagagaggaggtctctaagtggatacactgttgctgagtctagacaccagaagaacgttgcaggcggcgactcacagttctagcactgcctaggagagcgtggtggccccagctcagaatctgcagaagtgcacagctccatccacaccactcagggtatggagcctc

SEQ ID NO: 44416 - DNA, 2300 bp, Homo sapien
tcttgttcactggactttgcaactggtgagcagtcggagctgtgttcagttacatgtatgccttgcctcattgaactctcatgaaaaccctatgatcgagacactgttgttatctccattttataggtgaggaagctgagaaccagatagattcatccagtgtcctaggacacacagtgagtcatgcttcggatctgtgctcctagctgatgcctcccattactggtagtcctttcctgctccccacaatgtacatttattcatttctttttctattttcttattatctttctatttttcttcttcttcctctctcttctctcactagggatagaacgcaaggatctcacttagcccagtggatggcagtcaattaatggagcgagtggcttagtccttgtcatgctgccaagtgcaagggcctttccatgctcagaatcaccatgaagacgagagctatctctcttggtaggctacagactcaaagggtctgcatatttatatatgctgccaaaaaatcctcaaataaccaatagatataaatagatacagaaagtttttaaaagaacatttaaaaataaaatttttaaaaatatttttaaaaaacaaaataaagtatataacatcacttaagagcacacacacaatctctagaaaaattaaggattcatgagttgtccaccctcaaaagacatctccatgcccttcctcatgacagactctcttagcgctttcctttctttcattttcattttatttcttattttattatttattttaaagaaaaggggcctctgtctgttgcccaggctggagtgctgccatgtgattctagctcaccacagcctcaaactcctgggttcaagtgatcctcccatctcagcctcctgagtagctgggactagtgcaggagccactgcaccaggctcttcagggtttttcttcgtaattgggcttattggggtcagtggtaggaaggctgtgtagttacaaggctctgtggagcagaagtggccccacatccagtaagctgcatatccataaatcccaaatctccatcccaagattggagatttttggcaggtatgcccttactggtgctcttcctataccatccccgattttatttatttatttattttttgcttgtccttatagcactccattttgccatgagtacaggtttctcttgcatagccaaagatattcagtctcaggctaacagattcagcctcgtgtttattctgtgttgactttctcaaagggtgcgttagatttcttgcagagcacatcttaccacccagaatgctctgcatgcccatctccaagatcccgatcccagcactgaagagagcatggcagctctgctttcagtgcctttgctggaactctgaacaagcagcccccagtcaatcatttctgcttaattaatagcccgcgccctgtgcatgctgccaaatatggagggtcaggccatgagatattctccaaacttttactcaaggcgtcctatggtcaccgtgagatctcacctcccctctgagcccccaaatcagctttcctcagggtaataactaggcccgagtagggtgtagtcagcaaagctgcaagctggggccccatgttgcatacatatatgcctcctattggcccttttcttctccacactgcccctgtgttttggccaccccactccaccctcaactgccacccccacccacgacccataccacacccctcacccccacccacaacccctacccccaccacgcaccctccacccacacctcccatctccacccgctacccccacccccaccatgtacccccaccggcaacccccaccccaacccacaacccctaccctcacccgcaacccccaccctcactgtgcaccccccaccctccacccacacccccatccccacctgcaccccaccccacactcacaaccccccactcccacctgcaacacccccactccccacccgcaccccccaacttcccatccccccactcctctccattccctctcttgcttgtgcgcataagcaagtcccactcattgcaactgtaaccaataccaagcatgagaacaggaactagctccaccctctaacccccactccagctgcagacgccacggagtttgtgcaggggcgcagcgctccagccatggcgcgttcgctcgtccacgacaccgtgttctactgcctgagtgtataccaggtaaaaataagccccacacctcagctgggggcagcatcaagcgcagaaggccatgttggccaaggagctcc

SEQ ID NO: 44417 - DNA, 2300 bp, Homo sapien
caacacagcagccaacaaaggtttactgagtgaagtacatataggtacaaaaagacttatagaaccattattttcacaataaaacatcttacccctgttgcccactgccagagaatagccatcatctctctcctttcaaggacccttgtaaataaacacatacaaactgacagaagcaggaaatgtgaggcagcatgtttaatcatctccatctattcgaaaaccccatgagatagttatcattgttattcccattttacagatgacaaaactaacacaaacggagagtgatcaagtgagattagccagctagcaacaggaagcaaagcaaaatttcagattccagcagtttagctccaggaagagccagcctgacgaggagacatcttagttaaaatcagaaagaggctgttagatcgtcatcccttcccatctctttgaacgtgaattggtcaaatattttccagctgttttcttacccatcctctgggaacatgaggtatgatgcgtgcactcatccattaggatcagtcgttggggtgactggaacccacagtacatgtaggggcccacaaactagtttaatttcttatataaaataaggttgatgaaaagggtcattgtgcaagcaaaaatagaatgagtcactcaaacgatggaggataggttctatggttaaaacctactctctatattcaggacattaacaagtcctgaagtatctacaaaacacttcttaaaggaagaatcttagagcactcaatctgtcctggctgtgattatttgacaataaataaaatgtatttattcctaaacaagagctcagaaagatatctgtagaaaagggcaggagtagaggaaaagagggctatgcagcagcaggaaagaagggaaatcactgcaggtccacagcaccagctcagcacagaaggtaagtgcgcatttgtaatgggtctgtagccagagacatagcagaagctgcgctatccacagtcacaaccaaaggcaaaggaaggatgccctgcaattttagaaatcttggctgcagctgggaacggtggctcacgcctgtaatcccggcactttgggaggccgaggtgggtggatcacttggggccagcagttccagaccagcccagcaaacatggtgaaaccctgtctctactaaaaatacaataattacccaggtgtgctggtgcgcacctgtagttccaggtactcgggaggctgaggcactcctgagtacctgcacaatacatgcaaacacccaccccatcctactccccggcccccccgccctactccccccctccaccctacgcccccccgccctactccctcccccgccctactccccccaccccgtcctactgcccccactccaacacgtgctctcccgtgcccaaggcaaggccaagcccctgaggcatgcgcacctcagcaggcccaacccacagcaaatagtgggaagaggaaaggcaagagaggaggtctctaagtggatacactgttactgaatctaggtacccagaagatggaggttgtagtgagcccagatagtgccactgcattccagagacagagcgagactgtctcaaaaaaaaaaaaaaaaaaaaaaaaagaaagaaagaaagaaaagaaaagcaatctcggatgctctaagcatcattgtgcatgtttccacccttgcactttgatgtggattcattactaagaattaatagtggactttctcaaggagtgtgctgcatttttacatagtgcatttgcgcagcccacaagctttgcaaatccaggcccaagctcctgctcctggagacctaggaagcatggggctagtgcaaaatctcccttatcgccataaaatgggcttgcacaattcagcacagcagcttcccccaagttccacactcacgcatgcctgtctacaggacaacgcatgcaagcacgcaccccatcctactccccctcccacgccctactcccccctcccccacaccctactacaccacttacccctccccccccacaccaccaacgcgtgctctccctcatccgggcaaggccaagcccctgacgcatgcgcacctcagcaggcccaacccacagcaaatagcgggaagcagaaaagcaagagaggaggtctctaagtggatacactgttgctgagtctagacaccagaagaacgttgcaggcggcgactcacagttctagcactgcctaggagagcgtggtggccccagctcagaatctgcagaagtgcacagctccatccacaccactcagggtatggagcctc

SEQ ID NO: 44418 - DNA, 2300 bp, Homo sapien
taagaatggagattttgcagtaagccaatctatttaagtggaagactaagtccaaacaacagattgattatgactatgtgacaatgaaacttataaagcccgacactgtaaacttcattcattttttcaatacatattaaacatatatcatttagtatttactctgtgccaggcagtgttgtaggcagtgttgtaggcactgtggatataattatcatcaagttgagatattggtcttcatggaacttacattataatggaagagacatacaatcaacatttgtatatatataatataaatatataatacaaaaacagaaagtagtaagtgctatgaagaaaaatagagcaaagggatagagaatgatgagggtgttattgtaaattgtgtggtcaagcacagcctctctgaaaagatgatgtatggccaaagaatggaatgaactaagggaaagggccatataaatatctggggaagaacattttaggcagtggaatgtgtcattgcccttcaaccaaagactaccagaaacatacccatagttgacagattgagtttattactcttactccagggagggacaacacacactataggtaactatgatgtgtttcaataagaagttgttagaatgaacctattataggatttggacaatttgggggaaggtctaggaatcaggagttccgtctcagatacatcagaaagcaggggcaattgtatgattgcacatttcaataaatcttatttatagggagggcagactagagggaggataaagctgtacattaactggcaaagtagcagtgacctatcttggccaagaaggggtgtttggtgttttctgggtgtcacagtgagcttgtttttgtctgtgcttagacaagcttatgaagtggtcttgttttgtctcacttgatcaggctcccagtgatcttgtcttgggttggtgttctgtgagtttatgttcaacaagagaagaacatgcctaattgtgagtgcgaggtcagtttgtggatatcaggggctgctcccacttccctttctcaaacagcaagcgaaaagccttagaatataaggaacaaggccgggcacggtggctcatgcctgtaatcccagcactttgggaggccgaggtgggaggatcacttgaggtcaggaattcgagaccagcctggccaacgtgaccaaaccccgtctctactaaaaatacacaaattagccgagtgtggtggcgggcacctataatcccagctacttgggaggctgaggcaggagaatcacttgaacccaggaggtggaggttgcagtgagctgagatcgcgccattgcattccagcctgggtgacagagtgagactccatctcaaaacaaaacaaaacaagcaaacaaaaaaagaatataagaaacaaattttagaagtagtaggagaggaagaagtacaaccgtggctatcacctcatctttaatagaaagtagtcactttctactgtattattgtatggaacatacttatactaaaacattattctttatttgaaattcaaagataagtggcctactgtatatttctttttgctattaataaatctgacaacactgaaataaacactttcagttgtgtacgaaatactttgaatactttgtcccttttcttcccatctcagatttttcttttaattcaaatagactccgaaaaaatatgtgaatctgtttgagccagtcctatttattatatatgtacatatatacacacataaccaaatgtacatattttatacacacacacacgacacagagtgcgcccaatattatagaacatgtaatacacacattcacggaaagcacccgtacacgaacagaattgtctatgttgttgatatggccattctgtgaaatgtctccagtggactctcgtcctgcccttcagttatttcaagtagaagcctaaggaagacctagtctctgtgcggatttagaccctggcgagcctcaatgcggaaccaaaggatgagcgaaatcggttgcagtagcggtttatttacaccaagacacacacctcttcaccttggccggaggccacacagacctggggaaatgttttgccaacgtactcgcaatagttcccatggtttcctttgctcccagcggttgcgcgggctgggtttttggagcaaaggcaacggatactgctgaggctcctgagaatgtcccgttttcgaggctgcagtagctccggtgtccggttctgcagtgccgagagggaggcctcgggctccgggcgggggaatgtgttgca

SEQ ID NO: 44419 - DNA, 2300 bp, Homo sapien
cctacaaataaaattcctttcctgaccattggaccccctttcattataggtagcttttaaacttgtttagtttttgcttggttagggggtgagagatacagcaagaagggaagagaaggtttactgtgctttgaatgaacaggtttcatcatatgttagttggtactccaaacttttaaaatactttcaggaaagtgacaatggcatggcaattctgttgccagcctcagtgatgtaaatgctggtacaaaataaattgcattgtgccttccagtttactgagagctgaccaacaaacatgatatctagagtggcatctattgccactgtgatctgtatttcaaagatatgtctcattttagttttcatcaattaagccactgaaagataaatagatcctaaactttcaagatatactttgttctaattactaagatttttttttttactactaagttttggggaggataactcagaaaaatggttattaagtactcagttgccaggaaaaatactaatctgccttagtttattttacaacagcatacttctatttgccatgaaatatctttatagtaaacaatgaaacttttcataatgctaagtcctaatcaaaaatcaataatgcaataattcccacatagtttgttttcccacaatacaaaatcttggagaagagcttaaggaattgcatatttccatgtgaaatacagctatattataccactttgatgttttattataccatgtggctttactttattgaggaggatgaagaatagattagggataggtagatgagatgatgacatccatgtctgatttcctgtcagagaaaattagatatagttacatctgttttcagtctaatatcctgatggacattttcagcaagattttttaggaaagaagcacaggaattccactgcaaggtattaataggtacaaatttaagattttggaaatgaatgcagtattatcctatatatatctttttaaaaagataatgaaggtagtgaatggccttaattatggcagaaaaaaagttactatttggttccttagttgaatacgatcaataaccagcctaaaagggaaacattttgctctccaaacacccatcctgttgcttcatttattatggtactcagttggaagggtattaccagaggattttaaaaaattatgtaactcacaatgtattttttcggtcattaaacaatcactgaacacatactatgtgtcagacactaaagccctctgaagatgaaatgttatggaaatagtaataataaaaaattaaaatagtaacaataaaaaattaaaaatgcaagtgttaatattattaatctttcaagatacaggtcaaatgacagcattcaatttgctattctcttctctctgcttctacaccttgtacaaatatttttgtccatgtttgtgtacctacctactgagctccctaaagaggtagagacctttgggttattcatttttgtattcccgagagcctaacatagggtttttgctacagatcaagcagggggtcagtaaatgctagttggaatgagggaattaacatagtactgcaccatttagtattcaattaagaagatagttgtccaaacactaaatttctttcttaaaagtagttactgtaatgtagttgctctcttgttatcccagaacttgaattaccataagaagttgtgaatttctatttgattgtatgtattttgattatatttcaagatggtttatcatctagcaaacagtctaatagagcagattcaaacttgcaaaataaatgaaacctgtatagtctctaaaagtttgtatgccctagaagttcacattgaatttcgatgaaaacgactcgcttcccttccatccaattgcttgcgactgtcttacccgatctttccctttccttttttcccacccgttagccctccggaaagagccgaacacacaagagcttcccagtcttcctccgcccccttgcggaaagaaccgaaggcagagcacggcgccgaagtggagccgcctcaagctcgggcccttccggaccaccccggcctgcgctcggaagaggagggcgcctttggcttcagcgcttcgcccccgcgctgtgccctctgtcggcggcgtggggcagctgtagcagcgttggcggcaggaggcggcggccgcgtcgacgtcgacccagactggagcgacgtttaaagaaggggcagaatcgctggggagtgcggcttcttcttgttgggggactcccagccttccgcgcgtccggagga

SEQ ID NO: 44420 - DNA, 2300 bp, Homo sapien
cccacccaaaatatgtaaagtctcacccatggaatctatcatttacaaggatttatacataaagatacatttggtggctttcagattcaaaatttgaaaattttcatgttcatgggaatatttttaaccttaagaagccaaaaggaaatcttcattccattctctactatgtggtagccagagaattaaaaatccatgcaacagaacttttcatctcctcctatctgccattacagagattgttttcattagttttttgcccccagagaccacactgcgaaggtataaagtggtctagccaccaaagtcttttacagactatggcaatgaaagccaggattaattctaattagctaaatctaatttgttcttcagatgagagacttgtctgcatggctattttcatagagggagggtagcaggaggttgctgttcgcttggactagcagattacacaacccaagtactgacttattctgacattttccagaacaactctaaaacttatttactctttatgccatatacaagacaaaacacacatttattgtctcaatgttaagaaaattgagaattcagcagtaaagtgctaacatggaaggggaaagctgtaagatgtactagggtatgctaataactccagttattttcaaagaacattcagactgcttcaaattctattcaggaaactatctctccaagcttttaatttttgcctcttttaaatgagctgaaaactaactatataaacagatacttggggagggggtctcacctctactcaaaactttcaggaaaatttgcttctaaaaattatcaacaaaaatcccactacacttccttcagataatgtggcagatcaaattaacttgttcgcaccttaatttgttttacagatcttctgaaacccctgccccatcatccaaaacaaaactttctagtatttcaaaggagtttagtaagactctggtattataaattcaaactcagtactgccatctgttacattttgtttaaaaattgaatcattttcctgctgaataaaaatatcttcccaggtcattggcttgttctgagtagatgtagtggtccctactggaggttcttttccagtgtcaaccttatacccaataccatcatccttcattgcaggaatagtgcttgatctatcggaaagatatgcatattgtctgatttgtaaagacctgcatggatgtaaacgataaagctttgagtccccagaaggatcttgactatgaactgactttatatgtgaagacataaactgatagttgatgaaagatttgccacaggccaaacactgataccttcgctcccctgtgtgatgaatttcatgctttgtgcgatattctgcaagaggaaataccttctcacagtaacggcacggatacttcttctcccaagaatgaatgttaaaatgtctccgcaagcttgtcagacagacatatgaccttttgcatacaatacagatataatagacccttccatctactattaactcatagtgatcatcatgttttactttcatacgtttgtttgccatctcgctgccagacgtttttggtatttcattctcaagtctggcctccccttcatcagggtcatctttgacagggatcactatatcataagtatcttcaccgatatttgcataaaccttgcaaccagtcgataagccttcaatttcagtagctgtatctaaagtaatgatcttctgaccctccattagatgttttgatcctacgcctggatcattagtatttctagtaattatatctgaaatttttaaggaattggaaagtggttcttgaagaagtgtaggaatctgcatcttctgtattaatgatccatcaaaactggtattttgggaggtatcagcctgtgggaccaaagatgtattactgacggccgagtcaggactggagctaatagtgtcatcatcatcatctattatttcctcctcctcctcttcattggccttgtttcctgttaaaatagcactgtttggtgtctgctgattctgcacaagtaaattgattgaagagggcatatgatttggaagtgaagaactgacatttggtggtgtagaaagtggtgtctgatttaacaaaataatattgggagtcagatgtgttggagctgaagataccaacaatttttcacttccttgtgtttggctcaaagttgcctgattcacaggagtaggaagtttctgagtaggtgtgatatttgttaaagggggcgagttattgctagcactaggtgcaacatctgaaata

SEQ ID NO: 44421 - DNA, 2300 bp, Homo sapien
tcaatttgcataagttgtttgtcctgtcctaaggtgcctttggaagaagccccctaccactcaggggaggtttagcatcagtccggaaagtgaacagcagctcctgcctgcaagcttccaggcagccctggcttgtgtctattggttctaccccaacccccatgcatgagagctctctctcatcaggaagctggccaagccagcagagtaaatcgactgtccttgagccccatgttagttttctgagacttgaacagtgtttttggagttcactgattttatctaatctatgcagttgggtgaaaatggctcacagttcaattgagttaaaatctacagcagcctcaggagctgcccctcctcctgaggcttgcttcctgagctcttccttctgaaaatgatgcggaaatgacagcaagaggtacaagtcagccaaccatagtcctgtccccaggtgataatgaaacctcattgttggacttgagctctctctgcttgaaagtgtcatttcataataacctggagttttgcatcttgttccctgaggactgtttacaagaagacaaaggccagaagtaaaagaaaaccagagaggaaatttcaagaagcccatttctcaatcagtttcataatttctcattaaccaagtagtctaatagaaagtaatttttaaagtatttttgtctaatcttcactcagtctccctagacaggtgactttcagaaattaacccaatctactgcctgcctgcttctgtgtgtgtgtgtgtgtgtgtgtgtgtgtattcaaaccttttattaccaagtacaacacttgctgttttattttccaaagtcaaaacccctttgttttggtgtttcccttttcaggatctgaaaccactctacgctaaccggtgccattatgttcccaagacatcacagaaggaagctgaggaggtgagccagaatgaggctgcatgtctttacctcctgggaaagtcccctgttctgcctgaaacaccctttcttttactccttttcatgggcctaagttttatttctaggtatgtatagctgatttgttcagtgggtcagagcacattgctaatgaggccatggtcataggttggagcctcatgaggcctaatcagttttactttgttctgtggccacaggctgaccctctgaccccagccgggagcctccccatatgtggctttgatcctcagggggacaaatgagagtacagaggccacaggacatgaccctcccccatctctgtggatgatggttcagttgcctgaactcagtgctcagttggaataaaagtggaagccccaccagggcactaggcctgaactacggaggcagagcctgagttccacacataggatgggtctggaagccaaatgagggtaactgagaagccagatccacctttatgctctggggaggctgggactgtcagcctggcccctctcataacacctccaagaggccagcctaataatgcttgagcatgcacagatgagtctctcttctgccccaaacagctctccttatgttccatgttgcctcaagcagagctagatgcaatgcgtagtgaggcaaagtatgactccaggtcatttttggagagctttcatttcagtatacaataatcccttcccaacccagggatttctccatatgaaactgtacctaggcttccaggaatcttgacaattttgtactctattaacctcacattgaaagtcaatcattcccaaatagttagaaaaatggtaaactttcagttgggaagagaaaaggaaggcaattggatgtaaaatggccactgcattgcacagcttcaggggaagccattttacataaaatacaatgtgaatgggtgcccttggagtaaggcaaagcagtcctgctccaaaggcaccatggcaaatactttgattatgtctctgccatccacttgactcctttttcttttaacaaccataaatttactatttctctcactgttctcaggttagataggaggaatagaaatgcatatatgataacagcttatctgaaaggcagtaagcatttggatgaaggacccaatatagaaaaaaatgcccatttgctatgaatattctctataacaaagcaagacaaatttagcagcacttcattgcatctggatgggggagagagctggacaatttcttgctaacaagagatggtaaatgaaattcttttccgtttttaaaacctttttgctaactcaaaatgtgtaaaatgtcattgctgttctctagattttgttgtgatagcttt

SEQ ID NO: 44422 - DNA, 2300 bp, Homo sapien
agtttctatttggcttctttagggatctcttgctgtgtgattgctataggggagccaagaatctctaaagaaggtgtcatatagtctttagagcctgtataaaaacctcttttctttcaggctactttcacagaaacgaaatatgttaattagcaagcactcctgagaaatcagtgctggttgcaggagtcctccacattaagtatgagatatttagaatgagaggagaaagagataagtaaacaggactcaaagacaatcattgcagaagtataaatacaggatttctctctgcctttgtggagcttatagagaccctgacacaagctaagcaggcttaagacacacacatctacaatagtaggcatcttgtctctatctaggacatatatcacagatttctaaaccacatgtatagtgtagggttgctaataatacctgacacagcattcaacgtggcccctggggtgcccaagttctttacaaagggcttcctttttaatcttcaagaaacatattttcttccttcagaagatgggaaagggcaagggccttcagtcccatttcctggataagaaaaacaaagctttacagtagattagcaaggcagatctggaaagagccaagtactcttcttcatcccattgactcttagaatagttttatacttgatttggtttgggtttttcggggaacatggagaaaggattgcagcaaccatcagaaggaggtggttggaaggagacctggcaagcagagcctgggagctcctcaatgggacagtatgggcacctccaaataggtatattctcttagctatgttaggcttccagggctgttcccagagggaggtggagtccactgttacccgcttcctcaccctccacctcccctggccaccagatagatgtcttgggggcactccaaggaggcctcatcctgatctgcagttgttttgagaacattcaaaccaccttttggtccaaccacaaggtgcttcaagcccaatatcctaatggggtccaaaaggataggttcgagaaggatttggctgtcttccaagatcaatgacattcccacctcatccccagtttcccttagtaatccacagtggatctgtcagccatgactttactttcactctttccaaagctacttgcattttcatcttgctgcatcttttggagctaatgaattccttaggttttccatttgctatagagaataatagttcttttcagtcgccatagcaagaacactcaccttggagtccaacagatctaggttctagctctcacttctgccacttactagctgagtgggcacaggatattttcttcccttctctgagattcagtttcctcctctgcataatggggttattgataactcctcttcctcccttgcatggctgctatgatgataaaatgagatccttgttataaaagcacttgaacagtacaaactggggttctggtgcagagttatactttagctgaattttctagctaaagattgggggctgttggttctagaattctcaggtctggtgaataaggctgtgctccttctctccgtctctgcataattttatacactctggtcacatcacttcccagccttcatcgttctagactaaagagtctgcgtttgtttaatctatcttcatatgtcagccaccaccctccccccgccccacacacaccatccctttgattatagagtggcccttctctggatcatctccagctccattatgtcattctggaagcactaagaccagacctgctcaagtgtgtgtgtgtgtgtgtgtgtgtgtgtgtgtgttcctcagctctgaacctctgactctgaccccctccccagttataaatcctagaacaggataattacccaagaccctgtccaactatagagaaggttggttggcttcatactgaagcctccccctctttctctgcgcagccctggccccaaggggctaaaactgctccctgtctggcttggaaggctgggaggtggataactaggatggggagactgagggggagggaggagggggggggtcttgcgcaagcgcacgcggctgcacggaccgccaatgctgctgcctcccagagcagagggaggcagaagaggagggagggagaagagtggaagggagggggaggcggcacttgggctgcagctcgcaaccagaggcagtgtctctcagctctcggaaggaccgagagaggcaaccgcggagtaggatgctctgcggggcgcccagagccgggggcgcttgaagcagcttcggg

SEQ ID NO: 44423 - DNA, 2300 bp, Homo sapien
gtggtaaaggcaaagattatctgaagggtgctaccatatcttccttcctttgggaacagggggacccagcccataagattgtttctgttcccagttagttgccattgtcagccaactctgtggtttcaccacagcaggcactcaggacaaggggcttatagaagcatttgctaatacctgtgcccaagaaatgagcatgtagttttctagactttaataatgtgcccccgaatctgctgttatattcaaagtctctcctttctccctccccttgtccctttgtagccactgcttcatttgcatccgcattagccacttgtggctccattctgctgcactgttaggcatattgcttttttttttttttttcaaatttggcaggaatcatttcccttctaactagtgttttgagtgtaaattcatacagatttctgtcttcaacatcctatgggatttggttattttaccccacccaacagctgacattccagaacacagcctgggctatagctgaaatacatggcaaatgtcttaagtatacatcaaacctccaattacccagaatgcttaggaatggaagattctagagaatggagtattttgttacctaaggtcatgtcactcctaactcccttttgtccccctactctcagtttttgaaatgttttaaagtgagtgtactctcttttcagccttagaccagttagcctagccattgtttggttttaaggcttccaagggcctggggattctcatacttaatgtaaggaatcacacaaaagactggcttggagaaggtgtagaagatagagatcaacatctactgagaccagagaccagattatcccctagaatatattttgcttttaataaaattcaaagagaagaataagtttctcttttttgtaagtggcctttttcccttcaaagaagcatatgggaagagacactgttaaagaagaggtctgattagtaacattacagtgaaaggaattcttatttaaaattaactgcaattgaagccattttcatcagaatagccttgaattggagttatgattaaatctttctaagctattgtgctgtttttctcagtaatgaatgtgcccagaatgtcagtatctgcaacattctcagccacttgagtataatggggtttgatttgtgaaggaaggatcacaaactccatccaggccttttagccacccaggctccagtagggtggaccccaaacagaccaaaaatgctatacaatattcttaactgtttcttctaatttttcctttcattggatcccatgttggtttcaggagttacatatgtctgggaaactgacactgcaaagttctggcttgttccctgccctgatgctaagggataaatatagatctcaaccactacagaaatttggccaggatttggaggggtgtgtgtatgaggggcagtgactgatggggccactctgacatgtgggctagaaaaaggcttccttatgtccaagaccctctttggggcagggaggaatgaagtaggagcctggcttctaaaatcagaaagaataatccacattttaagaagctcatggattgacacaaataagaaatattgtaggtggcttacagtgtgtgtgggggtggggggagagagcaaagggaatctttcctgacatcctagatccttttgcatgagatcagccttatgaaaaaagcaagttattcttggccatctcccctcacccccaactcccacccacacccaccccctgcatgcactgatatccaactctcaattgagaagaacatgacttaagatttccattggggccatcatatctcaagcgctggagaaagacaaggggtggaaagacatataaagggggcgggagggtgagttgctcatcctcgtgacccagaatatctccccctccttgtaatgatgagcttgcttttccataagggctttcccttgattcagggaaggagccaaccaatgacagagggacatgttagattattctggggaagggctcatgccaggagggttcacttttaccaggcgccaagtgtccccagcaaccagtgtctcctgtaccagcagaagctccagaactctcacccgattgcctgcctctgctgcgtctttgcccactgaacagccatgagaaggcaactccggtccagaagggctccatcctttccttacagttatcgctacagactcgtgagtgccagagagcagaatattttgctgccccctccccttttattttaatggggtgggttgggggctgtgtagacctt

SEQ ID NO: 44424 - DNA, 2300 bp, Homo sapien
tccagattaaaatctcctggactagatgattttgaagctctctttcagtgtttttctcaaagtgtggtccatggaccacagaatcagaatcacttggggtgtttgttaaagaagtgattaataagactgccacagacctactgtttcagaatctctggggaatgaggtacaggaatctgtatgttaaaaaaaaaaaacccaaaaccagatggttcttttggaaactaacacttgagaatcagtgctttattccaactcaagatttttaaatgctttcatctgttgaatattttaggttttgtctgttcatctatcaagtatagcaaacagtatgcttagtatgaactcattacagaatatttgtgtgtatgtacataggaaaaatatctggaagtatagatgtgggtgtgtgtatatatgtgtgtaaatatatataataatgttaatagtaggaatacagatgatctctatttttccgctttatccttctgttttatttctctcatttttttcttcctgtgtttaaaaaagatgcttcttgtttctgagctcaattcccccacctgagaacagggtgctgtaactaggtgaatttcaagatcatgtcttgttccgatggtccgtgactccatactaccccctaggttccctcgtccatctcacagcatgaactgcataggtaacaacagtgtttggagaataagcatgtattatttttgtatgtattacgtttgagatgcctagcaaccgtttttgtgcccgcaaaatttttctcttctttgtcaaggagccaaaacggaaatagtctactatctacggccctcaaaagttcctcctctctccttagccttagaaaataccgtccgccataggcatgggcaaagacctcatggctaaaacaccaaaagcaatcgcaacaaaagtcaaaattgacaaatgggatctaattaaaagaacttctgcacagcaaaagaaattagcattagcgtgaacaggcaacctgcagaatgggagaaaatttttgcaatctacccatctgacaaaggtctaatatccagaatctacaaggaccttaaacaaatttacaagaaaaaaacaaccccatcaaaaagtgggcaaaggatatgaccagacacttctcaaaaaaagacatttatgcagcaacaaacatgaaaaaaagctcattatcactgatcattagagaaaggcaaatcaaaaccacaatgagataccatctcacgccagtcagaatggtgattattaaaaaatcaggaaacaatagatgctggcgaggctgaggaaaaataggaatgcttttacactgttggtgggagtgtaaattagttcaactattgtggcagacagtgtggcgattcctcaaaaatctagaaccagaaataccatttgacgcatgcacacgtatgtttattgcagcactatttacaatagcaaagacttggaaccaacccaaatgcccatcaatgatagactagataaagaaaacgtggcacatatatgccatggaatactatgcagccataaaaaaatgagatcatgtcctttgcagggacatggatgaagctggaagccatcatccttagcaaactaacacaggaacagaaaacaaaacactgcatgttctcactcataagtgggagttgaacaatgagaacacatggacacagggaggggaacaacacacacgggggcctgtcaaggggtgggggccaaggggagggagagcattaggagaaatacctaatgcatgtggggcttaaaacctagatgacgggttgataggtgcagtaaaccaccatggcacatgtatacctatgtaacaaagctgcacattctgcacatgtatcccagaacttaaagtaaaattaaaaaaaaaaaaaaaaaagaaagaaaaagaaaaagaaaatgccgtccgcgcatatctctcaggagcataggaagggctgtgaaccaaaaagccagggcgtggtcgccccgcccaccggccgctacatcaccacccctctcgccgctttcaagcgcggagattggctgtaagcaagaaagagccccgcccctagtcttatgactcgcactgaagcgccgattcctggcttttgcaaggctgtggtcggtggtcatcagtgctcttgacccaggtccagcgagccttttccctggtgttgcagctgttgttgtaccgccgccgtcgccgccgtcgccgcctgctctgcggggtcatggtgtgcttccgcctcttcccggttccgggctcagggctcgttctggtctgcctagtcctg

SEQ ID NO: 44425 - DNA, 2300 bp, Homo sapien
tctgcttgctggattgtctccctgctatctatgatcgcctacagagtagactccaaattcttggcttggtgtgccaggcacttttgagcctcatcttccttactcccagccagacatcctacttcccagcctcactgcactttccatgtttccataaacaggcctggccctttcactccttgctttgcccttgtttccgttccccagaatgcctttcatcctgttccctcttctctttttggcaactcccactttgagacacagcataaacataatctctgtagaactcttcctattccagatttctcccaaatttcttgttttgcctcttctgacagcactttgtatatatgtcatattattgttatggaaattagttttgaaactatcttcccctactggcttctcaagggcagagaccttgcatagtcttaccatacatgctaactgaatgcttttgcagttagaatgatcaacaggttggcaaatttagtttttgatattgtgttacctccctctgagaatgccccaaggttaagtaaaaactcccaacagggaatttacaaggtttattgttgctaatttaaccaaacttaaagattttttaaatcaataatcaattgtaaagcatggggtcatgaaacacattagtagaaaacactgacttttgccgatatggttctaaaatgtctcctttgggacagcgtgtaaactgagatttggcaaaagaaggaagtgggtcttagctttgttgggtctataaattactgagttaaggactgatagagtgggggttaggacgatcctgggcatagtgctgggtgggtgaggggttagttacctttccatttcttcgccttagaatacacacttaatttggccagccagcttagaaaatgctcctggtagtaagataaaaggatttacagctacatgaaagagaaaggcatcaaaattcaggccttattcagccttgggtctgtggtgccttgagataaaagagaaacaatttataccggcaccgaattaaaaagtccttttcttcctatcttagctcgttttcttctcctttcctatcttaacatagggacattcctctccagcagcgggcataatggcatgattatgttttcctctatttagggttactcccctagccttgcaaccactccttattctttcatctctttcaaagtttctattctcccggacccttacgttttattccgtccctccctctctcctcctcttcctcctcctccgttttcccagctagctcactccgcccctcgccgtcactaccttccctcccccgaggctccttcccgctcctcccgccaccccccccaccccctcgccttcagaaagctccaatcaggagctccgaaggtgtctcgaaggcccgccccctcctcctatccacttttcttccccccaatttctccctccccccttcccccccccactcaagtcctgcggacctgggggcttcgggatctgggcgctatgaaaagtgtctgcccagtcacttccggtaagggcgctgcggcgcgaagcttcccgcgggaccgttaaggagggagtgggagttcccggtgggccagggaaggaaggcgctgccaggaaaggggatcgcgaaggggagcgggagcaggagcgaactagcgcgagcgtctggggcactttagccgcccctttccagccgccccctcacgcgcgagctcccccgccccccgggcggctgcagcgcttccctcacccccactccctgaggttgacaccgcccctccctcggcgccgcgtgaccggaaatggcgccatctttagcctcttgtgctattgacaataacaagccctggttctttccccctccccctttcccccaaccacagcctctcccctcccagggagagggagaaaaggaggaggagctgcagcctcacagactcgctgagtcgctcctgcagaaagggggggagagagatcgaaaagcaggggagggggacggcacggccgtttacctgtctgcctcctcattcgctctcccccctcgttctgctcactcctggtgtcagcctatccgccttcccaaaccctcccattcccccggtgtagccccccccttcactttccttctcgtcctctgtgtttctcctctcttctttcttcccttccccctctagcattgctaccttctctcctacacgcacgcaggcatataaacgtaggtttttgatgctcctctgcctgttgaccccgctattttcatgtttccaacaggtttttcttcccccagtccc

SEQ ID NO: 44426 - DNA, 2300 bp, Homo sapien
ggattataggcttgagtcactacacccagctctaagcagtgttttcatgtagcatttaccactcctagtttcacggaaggtaaagtctacattccagtttctccattttcttgttttcaggtgatttctgtactttactatcttccttacaaaatttttaattttgatgtagtcttacctgttaatggatggccaaaaggcactggataaaaatcagcagctattccttataaatgagtgcaatgagtatagaaagtacaatgagaatagaaaaaaaactttttttttttttttttggccatggtctcgctctgttgcccaggttagagtacagtggcgtgatctctgctcactgcaacctctgcctccccaggctcaggtgatcctcccacttcagcctttggagtagctgggactacagacatgcaccaccatacccagctaattttttgtattctttgtagagactggttttaccatattgcccatgctgctgtcgcactccagggctcaatccacctacctcggcctcccaaagcgctggaattacagacatgagccaccacacccagctagaaaagagctttctaaacacagtaaagagtatcgaaaagccaatagaaagcatcataatcaagtcacgtcccctgaaattcaggaataaagcatagatgtccactacagtgttttgaaggctctggaatgtgacaaaacaagaaaacaaaataagctgtataaatctaaaagaaagagaaaagaggaaaaagtatatttatagatatgattatacacattgagaatccaagaaatgtaacttaaaaacattaaaactaataagcctatgtagtggatatctgctattttgctttgcccagcattccttcctctctgcttctagcaacagcattcttcttcctttgggtacctgctcctactttatcctttcaatatagtcctggtaggacaggcaatcacaatagtcccctccgctgcctgtggctgggcacctaacccaggatggactaatcataacatcataatcataatatccaaccccattggactcagtggtagctccaagtggtaggcatgagacctggcccagagatacaagatctcccttggaattttccaaatcaaaggtaaagaagtaattttctcttttccttggatattgaactgtaaggatgtgacccagagaaattagtagccatgtcgggtctctaccatgtaagagtcttagagaattaggcgatacagagagaagcagagatgaaagatgagacggagtgagagcctagataccatttgagtccctcgatctagttggttctgagatctgccctattcttcccagttacgttaaccaataaactcaattttcctcttaagattattcaagttgggtttctgtcacttgcaaacaagagtcctaatacaagccagatgcaaaataaatatatagaatcccatcatttccatttttttccttttcaaagtattattaaatagctcccttttattttccaatatttgttataaaaatgttcaaacatgcagaaaagtttaaagaatttttacaatgaacatcaatacacccaccacctagattttaaaattaacattcttttgttatattccaataattttctcttattctagtaataacagaactagacattatgtgtgcatatatatatcccattcacaacagtgtgaaacaccaacagacacagactaaagccttaacaaaacttgtctctcaagacaaagaacccaaaaaggagcaatctagcaatcgagaaaattttagatagctaatctagtcaagccaaatgccatgggaaaaaagaaaaaatgcagactcacccttacccaagccagcaatggcggaacaggagcctagacttcggctcttagaaggctccagttcccatctcccatcccccaccttttcccgctcagcagagaccacgtggagaacctgatgcccctcaccctccccatggaggagacgtcagcactaccctgatgcaccacccctccccatgagggtgacgtcagcactacccaattgtgaagacacaatccctccccagcagttcagtttagaaactgccagtcttggtatagaacaacctaggcttatctgtttaagtcccataggtagtattattagagaataacccaggctttgggaactgtataactctgagatcgtttgaaattttcgttttgtttttcttttggctccaaccaggcctctgttgttagactaatggggtttcccctgcagagat

SEQ ID NO: 44427 - DNA, 2300 bp, Homo sapien
gcttccccttctgccatgattgtaagtttcctgagccctctccagccatgcagaactgtgagtcaattaaacttctttactttataaattacacagactcaggtattctagcagtgtgagaatgaactagtactgtgactatagtcaataataacctaattgtatattttaaaataagttaaagagcataattgaattgtttgtaactcaaaggataaatacttgaggggatggacgccccgttttctatgatgtgcttatttcacattgcatgcctgtacatctcatataccccataaatttatacacctactaggtacccataaaaattaaaaaaaaataatcctgccagtgtggcagtcaccacagcttggggtctggacatcagtttcacatgttcataatgtcaatattctaaatgttgcagagttgatggatgctgggaatgtggattctcactaaggatgttcacaagagagtgttgtataaaccagaatgccaatttattaatttacaaatgcaaacataattgttcatgcagatttgattggaacgtagctaattctttccctgtgggcagatcttcatgggaagccaaattataatcagaatattgttcataccatagaattaagacaaggtgttagttggatcatttaaatgcatagtactgtttgctataattgctctaatggcccgtctcctcaatatggactagagtatttactccctggggagactggtgtatttgttttggatgtcagtgcctacccaccccacctcctgcgtagggccttttcaggtttttaaatttttccatgatttcttggctgatcaaaacccttgattaggccaggcacagtagctcatggctgtaatcccaacacttcgggaggctgagttcggggaattgctcgaggccaggagttcaagatcagtctgggcaacttagtgagaccctgcctgtctctacaaaaaattaaaattcgccaggtgtggtagtgcatgcctgtagtaccaactactccggaggctgaggcgggagggtcacttgagcctgggaagttgcaactccaatgaaccgtgatcatgccactgcactccagcctaggtgacagagtgagatgctgtctctaaaacaaaaaacaaagtgaaactcttgattggcataattttgtttctctatcagctttatttttaaaaaaattacataagtaaaacatgtctctttagctattatctcttaaatcagattaccttctgtaataattctatgggaattattctacgggagcacagtcattcacgcttgtaaccccagcactttgggatgccaaggtgggaggactgcttgagcccaggactttgcaaccagcctgagcaacatagaccccgtctctacaataataataataataataaaaataaaaaaattaaccgggcatgatggtgtgtgcctgtagtccatgctacttgggaggctgaagtgggaagatcccttgagccaaggaggtagaggctgcaagtgagccatgatagcaccaccgcattcaagcctgggcaagagtgaggccctgtctcaataaaaacccgcaaaaaactttgggagcatcgtacggttgccagtgaataaggttataagataaaaaacaggatgctcaattaaattcagctaaacaagcgctgtatatttttagtgtaagtatatccaaaatattaatgaggtatacttacactaaaacaaatattcattgtttacctgaaatgcaaatttaaataggcatcctgtattttcatttgctaaacctggcaatcctaccagcactttaacatgaagccatgagggttgcctggattcatgctggtaggtaagcaccaatccattcggttgcctcagacaggacagaaaccattccctctaaaaaaatcgtttactttgacgataggtagcaacgaagcacggaagaatcttgaccctttgaggaacccgtaactgacgcaagtgccataaatgctactttgattgattctccgccccctccattcttctcttcctgcaattgctctatcacttcttccctctcaagtcccgccctttcagctacctccaactgctgaggaaccggttgcctaaaaggagccggcaaaagcgcctacgtggagtccagaggagcggaagtagtcagatttgactgagagccgtaaagcgcggctggctctcgttttccggataacgactacagctccgactgtcagtgccggccttcctcgtgtgaggggatctgccggacccctgcaaa

SEQ ID NO: 44428 - DNA, 2300 bp, Homo sapien
atagattgtatccaatgtgagggtaaaaaaaaaatcccagatgtcttggagttgccgtgattcagcatcccaactcagatgattgtcctgttgtccggtgacataatggcctgatcagttctcttctagcagactgtctgttatggtggtttggtagtggtctgttgggaagctgcatttttccttttctgtttttatgctctggaccccaaacaaaaacagctggatttatcccatgggtagtcatgaacatttccaatttgagggattttatattccccaaacagaaggttatatggcatatatcaaataataatgatatccagccaggttccctgtcgtacccaaatcagtaactgaagatacgtatttctaagtataatacttcagaggaagagataagaattacaattcactaaattcgtggaggtgtttcattataataaatatgtcacttattaataatgtagcaattatatattaatggaaatatgaatgtatgcccaagcaaaatgtcataaatattttaactttgtttgtctaggttccttaattttgagactataattatcaaggctcttcaagaaactcaaaatgattctaatttctaagtagtatgcattaaaactgatatataatgaaagaaaaacagtgaaaatgtatgcatcagtttctaaagaaatcatacttgtcattgtagagatgcatgtaaattaaatgtattatacatttttatacttgtatgtattttatactttgtatgaatacttttattacactttttaaggcaggtaaaagaatgagtagatgttatcaactataacaacaatttgttgaatactgtgttaaaaccaagtaaaggaccacaactccacgagatcaggaatgaatgaagaaaattgagggccagtttttaaatcattgttgagactattaggttcatctgtctgtttaagagtctggccttagggaatataatttatgcatgtaaaaaaatacaggagatgattcactggaatgtctcttaataataccatgttcattaagaataggtcattgggaggaaaaataaataaaaacatctgaactcattagtataattaatacttgcctcttagaatgaaaattaaagaactccaaattttagccttgaatactttgagaaataaaagatgaattagtgaaataatttctacttaaaatcttagttgttacagagaatgacatgcctcactattaatgtccaattctaattaatggattgttttagaaatgtatttgtgaaatatagcaaacatagctagtaatactaacaggtgaaaactgatatttcaaatgactaaatagacttaagattagaggaaggtaggaaaaggtgtgcaactaacagaagcagttaaccaaaaaatgagcttcaggcatcagtcttatttggaagactgtaaatcaacaggctaacgttcaaaatatggcagacatcttaatatcaatatatgctaaattggtttatctttaggcagaaacagaaagcaaaaaattaaactcatccaactcatacatttgttgttgttgttgttgttgttgtttttgagatggagtcttgcttcattgcccaggctggagtgcaatggcacgatctcggctcactgcaacctctgtcttccgggttcaagcgattctcctgcctcagcctcccgagtagctgggatcccatgcgtgtgccaccacacctagctaatttttgtatttttagtagagacagggtttcaccatgttggccaggctggtctcaaactcctgacctcaggtgatgcacccgccttggcctcccaaagtgctgggattacaggtgtgaaccaccacacccgacccaactaatacatttttaaaatcccattttaaaagtaaaaccacagttttcatataacaaatgttattgctcttcatttcattctccaattttaaaatgctttactttcagccaatatgtgaatataggagacttcaaaagcataatcaattactcccttaaagttcattgtaagtgttctcagaactctaccacctagaatttaaagacgggaagatttactttataattttaatttcttatcacaagactcgattgtcaataactgttaacgtccatttaataatctatggtgaaataggtaatttcttcttattttcacaagcgtgtgagtaaaagactgggttttaagcaataaatcatttgttctaactaagcacatgcttggaaaaagtgctatttttccaaacgtatgccttgaaaacaaata

SEQ ID NO: 44429 - DNA, 2300 bp, Homo sapien
cccaggttcaagcaattcttctgcctcagcctcccgagtagctgggattacaagcatgagccaccacgcccgactaatttttattttattttattttattttattttattttattttattttttttttttgagatggagtctcgttctgtcgcccaggctggagtgcagtggcgctatctgggctcactgcaggctctgccccggggttcacgccattctcctgcctcagcctcccgagtagctgggactacaggcgcccgccacctcgcccggctaattttttgtatttttagtagagacggggtttcactgtgttagccaggatggtctcgatctcctgacctcgtgatccgcccgcctcggagtctcgctctttcgcccaggccagactgcagtggcgctatctcggctcactgcaagctccgcctcccgggttcacggcattctcctgcctcagcctcccgagtagctgggactacaggcgcatgccaccgcgcccggctaattttttgtatttttagtagagacagggtttcaccgtgttagccaggatggtcttgatctcctgacctcaggtgatccacctgcctcggcctcccacagttttgggattacaggcgtgagccactgcgcctggccaaaaatgaattttaaaagacagatcggtggctcacacctgtaatcccagcactgtggaaggccgaggcgggtggaacacctgaggtcaggagttcgagaccagcctggccaacacggcgaaaccccgtctctactaaaaaaaaaaataataataaccagacgtggtggcgcacacctgtaatcctagccactagggaggctgaggcaggagaatcacttgaacccgggaggcagaggctgcagtgaaccgagatcccgccattgcactccagcctgggcaaaaagaacgaaactcggtctcaaaaaaaaaaaaaaaaaaaagagacacatcaaatatttcgtggaaagagagctctgcactcttaattagaagacctgggggccgtgcgcagtggctcaagcctgtaatcccagcactttgggaggccgaggcgggtggatcacctgaggtcaggaattcaagaccagcctggccaaccccgtctctactaataatacaaaaattagccgggcgtggtggcgggcgtctgtaatcccagctgctagggaggctgaggtagaagaatcgcttgaacccgggaggcagaggttgcagtgagccgagatcgtgccattgcactccagcctgggcaacaagagtgaaactccgtctcaaaaaaaaaaaaaaaagagacctggattccagtcccacctctgccattaacttgctgtgtggacttttgaaatttccttatcctttttaggcctggttcctcagctgtagttctaatattcattaattccactaatatttactgtccactgcgtgctggcactgtggttaagtactagaaatactggggtgaataataacagccagtactttttagtaaatgcttactctaggcttgaaattttgctaagggagtcatatgcactatctcatctaattttctatgaaataggcactactgtgacattttctgtactttacaaatgagggaactgaggcacagcgaggtgaaataactttcctgggatatcaaaaggtgtggtgaagacaggattggattccaggcagtggggcttcagatctcattccagtaataataggaaaccgttggtgtcataattacgtgactatttcagtggcttgcgttttggtctcagcccaggagtactgggggggtgggcaatatgagggttcaaggacgcaggggtacatcagagaaaccatcaagaggtctgataaaaagcgacaccgggagcaagaatctctcgctctcgcaatttccatgccaggaaggtgaaatgggaggtgtcagcgagtcgtacgcacggcctcttctctggacgcccgttgggtaaaggagagcgtccgggtcacgcaggcctatagcaagtctctgaactcggcagggggcggggagaaagggcacgcagtgtgcgcgcagcgggcgcgccggcccttccgacgcctgcgcgggcgggcaaacggacggctccgcccagccgccggctcctttaccccgccccactacccccgccttcgcggcgctcgtttcctggcgctccccacctttagcgagaccaacgagagaacaccgcctgcagctagaacagcctggtcaggagcgtaacggagtggtgcgccaacgtgagaggaaacccgtgcgcggct

SEQ ID NO: 44430 - DNA, 2300 bp, Homo sapien
aaaccaagggtctgggagggtaagggagtattatttgtggaaccagcacaggctgttgaagcttgagagatttatttaaatcccagaatggcccctcatgtaaaaacaaaagcaacaagcttttctagtgctaggcagacaaggttggtgtgatcatttgactgaaaccttcagttccacaagcaccctgatatccaagctcgtgagttacaaaaggaaaagatgggcttctctacttgtttaagatatagcacacaaatgttgcagatatacacagagctggccattttcttctatttagaaagtcactggtgctggttaatgttgtactattgtttatcatctctcatttcatcccacagtcgggaggaaaagaaagaagactctgttgttcattgtttttatctttttctccagatgcctgtgggaattgtaacacatatcattccaaagttcgttacatcaaaagtgatatccagtgacatctaactttcatggatgtatgtgacagtgttcaagttaaaaaataaaagtttgttttaaatgaataaactgaaacgtgggaagatttttcaataagtaatcttaactcaaatctctcctttacgtctttgttttggcccaccataccttcattgaaagatattactttccgccatttggtaagactctttgaaattctttcactgcagccaaaaatcaagtaaaatgacaagtttaaaacaatttttgaaaagagagagatggggctcatctttagagctgtgtgttgtgactactgagcacttgtaatacggctagtctgatttaatatgtgatgcaagtgtgaaaataatattgcatatattactaattttttttttttttttttgaaactgagtctcgctctgtcacccaggctggagtgcagtggggccatcttggctcactgcaacctccacctcccaggctccagcaaatttcctgcctcacccttccgagtagctgggactacaggcgcgcaccaccatgtccagctaattttttgtatttttagtacagacagggttttaccatattggtcatgctggtctcgaactactgacctcaggtgatctgcctgcctcggcctcccaaagtgcggcctcccaaagtgctggattacaggcgtgagccaccacccccaggcacttttggtgtttttgatgcttagctcttatgagatgacctggtccttttaaaaaaagtatctctttttttccccattatttggaggtttgaagtgaatttggcaggattcattaaacaccttccagtgtctgtcatttaccacctcaacactcagtgatgactgcatccatttcaactctgcacattcttttctaagtagctttaactacgttaactcagtgaaattcttatgtctcttgggaggttttcactactgcttagctatgaactatataacatttttatgacactatctctactggcatgagccattactaggtggaaataagtgaactctgtgaccgccttgcagttcccatgctccagggtgcctccacatgggactactatagtgttgctaataatcataaaattaaaagggcaggacttgtgtggacctaaaggggtagccttggacactaaggcctcatagaaaaggtagagctcggcctggcacggtggctcatgcctgtaatccaagcactttgggaggctgaggcaggtggatcacaaggtcaggagatcgagaccatcctggccaacatggtgaaaccctgtctctactaaaaatacaaaacctagccaggcgtggtggcatgtacctgtagtcccagctactcaggaggctgaggcaggagaatcactggaacccaggaggcggggattgcagtgagccgagatcttgccactgcactccagcctgggcaacagagcaacactatgaaaagaaaagaaaaagctctggattctggattctcagttctagagcttaagggccttgatcattcattggacatagaacatgtcaatctgaagttttcagcaaatgagcttagggctcactgagagcccctcgttgacccttccggtcccgccccctttcgcctgccaaccagaatctttcccaacttgtctaagtcctctcaggccagccttggtgggaggtttctaggattcgctccctgcccttcccatcttagggtgtcgtctgagacagactcttattccctcaataaagagagagactcttattccctcagcggccagctcctcgcctcccctcggccgtagccacctcagtggtcaccgtc

SEQ ID NO: 44431 - DNA, 2300 bp, Homo sapien
gaatgagactctgttatttgcaggaacatggatggagctgcaggccactattcttagcatatttacccaggaacagaaaaccaaatattgcatgttctcacttataaatgggtgctaaatgatgagaactcatggacacaaagaggggagcaacaaacactgggacctaccagagggaggagggtgggaggaagaagatcagaaaacataacaattggactaggcttagtacctgggtgactaaaaaatctgtacaacaaatttctgtgtcatgagtttacctatataacaaacctacatgtgtacccctgaacataaataaaagattttaaaaatttaactgattatatgtttaatgtttatttttgggctattctatttcatttgtttatgtctgtccttatgctggtaccacgctattttgattacttcaggtttgttgtaagttttgaaatcaggaaatttgaatcatccaacattgttctttttcaaaattattttgagtactctgagccccttgaaattccatatatattttagaatagacttttttatttataccaaaaacatcattgggatcctgatcgggattgctttaaatctatagatcacttttgtgaagtattatccattttaataattgtaagttttctaattcatgaacatagaatgtcttctcattacttatgcctccttcaatttctttcagcaatgttttgtattttgcaatgtacaagtcttttgcctcactggttaaatttattcctaagtactttactcttcttgatagtattgtaaattgaattgttttattagttccctttttagatatttacttcatagcatataggaatgtagctgatatttttgtgtttattttgtattcagcaactttgttgaatttgtatattacctctgtgtatgtgtttgtctccctctctctccctctgtataatatttggcgtttgctacacataaggtcatgccatacgtgaacagaggtaattttactttttttctgtttttttttctttcttgcctaattcctctgattagaacttctaatactatgttgaataaaaatggcaaatgtaggcatctttgccttgttcttcataataagacatcctgtgatttttaacatgcattatgttgtatgttttggcagcattgttgtttttcttgcaaataatttaatagtttaactcaaagcttctaggatgctttcatgttgttaggtgaatcattccatgactgccgaataaggaattttccaagtgaatctcagaaatttgtgttttaataagtgcttcaggtgattctgttgcatactcaagtttgagaaccattgtccaaggggcaaaagctgccattgccaattgctcttttttatctgagagggggcaggatcctcctggtccactgcttgtggatgcaacttattaaatgaaataaggccatgagtactctagggcccaatctctgctttttgttttgttcactcctgtttaaaatttcactcagggctctctttggaagaattgcacttacctttgccatccggggctgaggtttcattttctttggttattccccaggccagtaccatttgctttttactttccagaagttctgtaaagattgttgatggtaccctttcttagcttttttttttttttttggtcttgatatagtcctattcttctaaaaaatcttttcatttgtctccgtcagactttgatggagaggaggggagatattgtttacatttgttaaaaatggcttttaagttaaattctaactaagggtctattaggaaataaaattgccttctgactccttttgatttattttgcagaattgcatatatccaaagctctgggtaattattaaacattagaagtatagaacaaacaggccagccaggcccggcgaggccgcggcgggtccggcgccccggacctccggacccggaggtccggcgccctggttggcgccctgcccccaaagtccgtcctccccgttaggtggcgcccaaggggaggggacagccgggcaggcaggaagctgcggcttaaaagggcaacccgcgccggacccttccttcctagtcgcggggagtctgagaaagcgcacctgttccgcgaccgtcacgcacccctcctccgcctgccgcgatgtaccgctacctggccaaagcgctgctgccgtcccgggccgggcccgctgccctgggctccgcggccaaccactcggccgcgttgctgggccggggccgcggacagcccgccgccgcctcg

SEQ ID NO: 44432 - DNA, 2300 bp, Homo sapien
aaacttgggggacaagagggcacttttactaggtgagaaagagggaagggagtttggaaattaacatttattgatttttctctgaggcaggcactgaattagatgctttcatatcaattatcttacttaattttcacaactgccttataaagaaagatattaatattcccattttgaagatgagagaactggggttcagattaacaaagttgttcaaggtcacacactgcctgtatgtgatgggacttagactcgaacctggacgtgtatgcctcctaagcccatgttcccgaataatgctatgtccctgtctacatttggcaggggatgaccaaccttacctctgctacccgctttgccctaatgcttcttccactgaaaagatgagtctcctcagactctcatgtttctccttcactcctgtccatgaaatatcaaaatggagacaaaagatttctatgagtggtgggtgggaggaaattatgcattatcagaatgaatagaaatttgggaagagcctaggacaatttttctggtttgaagccattttgttccattgttccaggctccagactacgtctcgccaaatccaaagttctgtagcaactgatatactagctgggctccagggtccttctatcccctgtatattcccaattttatccccgatgtatatcagttcgctttacactggcaggagagttcatgttccacttagaccaggaggagaggatatgaaaaggaaaatagcaggtgtggggaggataaaacccatgccttctacagtaactgtaaagtaaaagtgaaaaacgtgagagataaagaggattctttttcctcattgcgggagaaaggggctagggagaggagtctatagcccaggaggttcatccgcagcatgctatggagaaggccaccgtcactgaaatccggtctgtactgtaggacttcataggttctttgctcgccttagagcagaggggaagaagagtcagaaagaattgataacctctgaggtcatcagtcaggggcctaggctgctaagtccagaggcaacaccaagggatcaatgcagctaggtacagttttctccagcctcaactttcaatccccacccccagaccagctcattcccacacctccctcctccttggtcagtgagcctgagcgtccttttcattaaccttttagttactacctctacgcacatactttttcctatgccctccaaagaagtcagccccatactgcccatcactgctcagcaccgcccaccccatgcccccgcaagccggcctcagcactagtttaaggggagggacacgcctcccaaagctgcggggatgggggtgggggttgctcactcgccctcggatctctgctgtaaaagcggagcggcagagaccgggcatgcgcagcatcttcgggcgcattgtgatgggaactgcttctctgagtctctacaaagactccggagtaaccactaatggccctcctaaggccccccttctttaagacagacacacaaacacagaggcaatgcagctatttttttttaaagggtgggaggacgttgcagcttgaaaggttgatccacgttaggagtggtgtatttctattgatcccatctccggtgttgacaaacgccagcgcctaggctttgcagtccggggctgcagtttgcagtagagctaagcggtgtgcggctttaattccacgtcagatcaactttgatcaatatccccctactggcccaattggaagagcccaattcaccggcactgagccttttcgctctttcctttttttccccccctctttagacctaccatcttttgcgggggggggggggcgcggagagagtctcagattgtcttgataatttattctttcgttctctttcttttgcttctctatttttgtttttcagtgttttgcttgttttgttctgttttaggattttattctctctctctctctctctctctctctctctctctctctctatcatagggacagaaatcgctttggcaaacccagcttgcagccaatgaacccgccttccagattggtgtgaagacagaagtgaggtggggggaagggagggggtgtgagagatcctgggagcgagagggagagagagggagcaagaaaggaagagagagcgagcgagagagagcgagcgaataagagagagagtaagagggagagagaagaagaggaagaagaggaggcggcggcagcggaggaggaggaggactagtgtggggtggaaaggaagagtgagcgagagcaagtta

SEQ ID NO: 44433 - DNA, 2300 bp, Homo sapien
cagctactactccagaggccagggtacttggtaaagatggtaaagaaaaaccaaaggaagagcggccaaataaagatgaaaaagcaagagagaccaaggaaagaacgccgaagtctgacaaagagaaagaaaaattcaagaaggaagaaaaagctaaagatgagaaatttaagaccactgtccccaacgcagaatcaaaatcaactcaagaaagggaaagagagaaggagccatccagagaaagagatatagcaaaggaaatgaaatcaaaggaaaatgttaaaggaggagaaaaaacaccagtttctgggtccttgaaatcacctgttcccagatcagatattccagagcctgaaaggggcaagtttacctttctttatacgttcttacgttttgttattttaatgtatagttggttattgtctccttgttttggtaagttatataggggttttgctaggggaacttgtcatacaagttggtgtttttttttaagtgtttggaaaactagaaatgtaccttattctgactatttctttttgtcttaacagaacaaaaacgccgcaaaattgatactcacccttctccatcacattcctccacagtaaaggttagtatagcctgaggaaggcagcgtccatgttaggctcacctgtttggaataccagtgtcctgacttccttcaagtcttatgccaagcattcactggagccactggaggttttatattgcattagaaaatgaatttttctatattggtggactgattttttttcctattgagtatttttattataaaaatgttaaaacttcaaggacttagcactaattttgtagtgtttcaaagtgcaagagaaattttacccagaagtgcctcaactgctttaagcagtcttttttggagtgcaatggtagctacaagcaaacgaatcttttcagcagaatgaagcctatttttcagcatattgaagaatatatagcactgaagacttcctggatgacacaagataaacaagttacctctgaattcaagcttcttgatgagcatcataccgatgtgtgccttctaagaaggagtcttgaaaggagttccattttaaagtctccttggtgatcagttctcctgtagttgtgtatattcagtgagcatgcagcttctgttgtatcttcccttggaggtttgtttatacccattgggttcccaacaagttgaaccttgcgttacgataaaagcagatgtggcatccaatcctaccacccagcaaagagaaaccccaggcattcaactgcagcacaaaatcgtgggtgtagccttcttgaagactcagggtagccattccttgctccatatttaattttaattctaaagtcatctaatttcatggaatctttgaatttgcagtacgttgaacttttaaaaaactgtaagttattaattgttcatcaagagcactgtggtggaatatcgtagttgatttctttttctttctttttttttaatgctttctttgtgtgtgggaggtgtgagattcaccatgataggcactttgcagaaaaaaaaagtgattactcttatatattttgttttcttgttaatacaatgccactgaatttttcagctaggatgtgtatattcatattagagttaaaaataaagtaaaatgtgaatcctcccaattaaagaagaactatgaaaaatataaggcaatgttgttcttccacagtgacctccagtattttaaattttttgtggagaaaaaaatgttttgctttcttaaacctcttaactatagcttaagtagagagatatgaacaatgtggcattgacatttatttttaaattctgagcagagaaagatttttatttcttacattgagtacatttaatttagtttttaacattccaattccattacatgtttttttttattgttgatattcatattgataatgacatcatgaaatttatcctcacaagaagtagctggtttatttccaggttacagccatacttcccaaagttcctctgggttctgagaactatgccagctcacctgtcatctccattcattttctacaggacagtctcatcgaactcaaggaatcttcagcaaaggtttgagtcttttaaaatcatcatgcctaagtaaaccaaatgttctttacttattttatttagtagatgtcctcaccctagtacattcagtaagctgagatcagtgggataaagtactctgcttacattgaataaccttcaaaaatattaaatgttaaaactgaaacaacagatgacagtggtc

SEQ ID NO: 44434 - DNA, 2300 bp, Homo sapien
ccgggtgcggtggctcatgcctgtaatcccagtacttcgggaggccgaggcgggtggatcacaaggtcaggagatcgagaccatcctggctaacatggtgaaaccccgtctctactaaaaaaaaaaatacaaaaaaattagccgggtgtggtggtgggtgcctgtagtcccagctactcaggaggctgaggcaggagaatggtgtgaacctgagacgcggagcttgcagtgagcctagatcacaccacggccctccagcctgggtgacagagtaagactcagtctcaaaacaaaacaaaacaaaacaaaaaacataatgtatgttccagtatgtcagctgcatatttttaatttctatcagcatttcctctgcttactctccccgtaaacccagtaatatgtatggctaagtggttaagaaactattatgtaataaaaaaaaaacaacttattatgtaataataatgataaatttttttttccttgtcactgtaaatcagctttctttataaaagttcttgttttgggtggttgttttatgaatgcattatttccccacaaaagccaaaatctccaaagttctctgcagtgtcattatataaagggaatatacattttgactaggcttacctgtttattatgacttgctgtaagagaatcttctaatatttttaactgattttgaccttgatttgtttatattttttaaacatttttctcctgtaggttttctctgacataatttacacagttgcaagctgtactgaaaatgaagccagtcgatacggaaggtttctttgctgcatgttagagactgtgaccaggtggcatagtgatagagccacatatgaaaaggtatgactaataaaaacccttatattttacccatgtatataatgaccacatccattaatatctagatagttgagttttaaaagagaagctgagtttaagattcagttgtaaaactgtgtttataagcacaattaatttgttattaaaatgtgctatgtacttttttattctatctcaaactgacattccaaattagtatctttgtataagttgaactttttgtgactacctatccaaatacgcatgatgtttttacacggaaacattgatctagtctacttaagtttcaatttctgctattttgtggatcataatttttctttaaaagtgacaaacattgtttccttaggaatgtggaaactatccaggattccttaccatattacgggcaactggatttgatggtggaaataaggctgatcaattagactatgaaaattttcgacatgttgtacataaatggcattacaaactaaccaaggtaaaaaaaaaattggatttttcaaaggcaaatttttctctgtatacttgtgcttttataataatggatctgaaaatgtttgttgtaggcatcggtacattgccttgaaacaggcgaatatactcacatcaggaatatcttgattgtgctaacaaaaatacttccttggtacccaaaagttttgaatctgggtcaagctttggaaagaagagtacacaaaatctgccaagaagaaaaagagaagaggccagatctatatgcattggctatggggtaacaaaattatattttaatgtgatttacaagactagatgacagaaggattctgaagactttaaaatgttttacagtgttgaagtttatcttctgccttcaggagattatgggagattatgcgatcatgtttccacaggctggtgagagttaccacttctgattatcaacttccggtctatactggatgatagtttttttaaagtcatgtataatatttcttgattgggaggaaatataattttatcatcatagttaacagatcttcaagagtaaaaaaaaaaagccatcttagtttaaggattagtttatagtgaaattgtaatttttaagaaagctgggcgttctataaaaaccttcaagaacttattaaaaattggtattttttaattctctagaaccacatagtagaatgaataacttgctaattttattcttaaaaacctcatgtttatgttttttgatttgtgtttgtatatttaaacactttgtgcgactttcagctactctgggcagttgaaaagtagaaagtcatacatgatacctgaaaatgagtttcatcacaaagacccccctccgaggaatgcagttgccagtgtgcaaaatgggcctggtggtgggccttcttcatcatcaataggaagtgcatctaaatcggatgaaagcagtactgaggagactggtatgctta

SEQ ID NO: 44435 - DNA, 2300 bp, Homo sapien
tttatgtttggaaaaacatctgtatgttttaggaaagaatgtttttactttgtttagattaattaaagaagatcttagaggacataaggtattatttccattggtagtcctaaactttgcagattaaaaagcataactgttggcacattactgaaatgtgctctgggctggccactaaattgtcatctttggctcagataccacaacttagaacttctttttttccttccttccctgcctcgcttccaagtgtatgtgaccatgctacatctttgtccctgtttagtaaatggattatttagaaatggctctataccatcaaaaacattttggccatcctgtattggaggagaaaaaatgctatgaaggactttattgggtcaactgataaaatgaaatatgaatggtagattaaagtattgtatcagcgttacatgtactaaaattgataactgtgctgtggttatttaagagaatagctctcttaggaaattcagtcttagaaattttaggggtagaaggccatgatgtaaataattttccctcaaatgattaaaaaattgagtgtgtgactatgtatgtagagaggggctccagagagggagagaaaatgcaaataatcaagcaggagtaaaaatgttaccaggtgaagttgaggtaaaggatatatgggtgagctttgtactattgttatttttccatcctatctgtaaatttgcaattatttccaagtaaaagttaaaataaacttacgcaccaagtatttgtcaatatagttctaggaatgcagttaaaaactgcttcagccccttcccccatatttatatacaaataattaagggtttctcagtatattaattacaatacattgttacttttatatttgaagttctaactatagactgtttcttttttctttttgaatagttttgacctgcttatattgaaagaagtggtacaaaaaatggcaggaatagaaattacagaggaaatgacaatggagcaactagaggctatgactggtggagagcagctaaaagctgaggtaagaattgctatttttgttcatcaacttttaaaattcataatgtatgcacggtcatagtaaagaatccaaacaatatgtaagtttataaaaccaaatgtcaaagccatacataccttcctttcacaaccacccctgccccccttttgaaattgagatacagtaattactttaactttttaaaaaagctgaaacaaagtataaaaggcagtaagtaatgcatccgtaaggaaaataattaccaaataaggccgggcgtggtggctcacgcttataatcccaacattttgggaggctgaggtgggtggatcacctgaggtcaggagttcgagaccaacctggccaacatggcaaaaccctgcctctactaaaaatacaaaaaattagccaggtgtagtggtgggtgcctgtaatcccagctacttgggaggctgaggcaggagaattgcttgaacccaggaggcggaggttgcagtgagccaagatctcgccatcgtactccattctgggcaagacagtgagatgctgtctcaaaaaataaataataaataaataaataaaataatcaccaaataattactatatcttctatgatccttgatatcctcactcccttaagtcttagttgctctgttgaatctgtgccatactgaataatgaataatcctttatgaggggactgcaaggtggaaaatggaaaatatgcagaaatttaaattcagttgacatttgtctttaagccagtgactgtagtcagtaatagtcactgaaataaatttgtgtaagggaaggaatgtggaatgtaggagttttttatattaagcattttaactcaacttttttctgtgtctttttcaaattagcatgggttatgtactgtacactggtaaatttgtgtcttcccttgtgcagggtggttattttggtcagatcagaaacactaaaaaatcctctcagagattaaaggatgctctattggaccatgatcttgcccttcctctctgtctgcttatggctcagcagagaaatggggtaatctttcaggaaggtggagagaaacatttgaaacttgtgggaaagctctatgaccaggcaagttaaagtggcttttatgtttatgtacatgtttttaatcctgttaaaggaggataatgtgttataatttgaaaaatgtcatttttgcacatcatttgaatatgagacatcctaatgtgaaagacattctggaaatagggcctatttctatgtaaattgt

SEQ ID NO: 44436 - DNA, 2300 bp, Homo sapien
gacctcactatgttgcccaggctggtcttgaactcctggcctcaagtgatcctcccaccttgacctcccagcgctggagttacagacgtgagctaccacaccccagccaccttttatattatcaatagcatataagtactgttctgttgattgctcttttttagaatattgaaatttaataaatgaatttaaatctgtctccttcactggaccaggcttgagagcaggaactgttactctgttattcatccttgtatttcttatttttttttttttttttgggagatggagttttgcaccgttgcccgggctggagtgctgcagtggcacgatcttggctcactgcaacctccgcctcctgtgttcaagcgattatcctgcctcagcctcccaagtagttgggattacaggcgcctgccaccaagtccagctaattctttgtatttttagtagagacggggtttcaccatgttggccaggctggtctcgaactcctgaccttgtgattcacccgccttggcctcccaaagtggtgggattacaggcgtgagccactgcacgcggcttcatccttatatttctacactgaccttagctaaaaggctgagacacaatcttccttgtatttctaatgcttagtactttgactgtcatcgtaggcattaatatgaatgaatgaataaaaatacaatttactacagaatagtatgtgcagaatttttaatatacttggatttttgttatatttgtaagctataactattttaccaggcttaaacaatatgattttgttactgtttgaagtttttacattgagcatataatgtattaacttattacttgtagaatttcatgagttttgaatactatttaaaacatgagcttgctatagggcatttagtaattctttctacaaatgtttattatgttccatatgctagacactggtagtttgaggggaagacaaagacaagaaaatatttctttaatttttgtttgtttgtccctccagggtgatggaggcagaagggaatggaatgaaaaacagagaaaggaggggttggccttggcaagtagagggaggcacctgaaatattggggttagaaatagggacaggtagtggtaagttggaaatttgaacaaaatactgtatagctaacttttaaaactaatggtctctcttttctatgaaaccaaaactgggatatggagaattggaaagggaagcagttgatgaaacagttttgattgatggggccagttttgtcatgagaaattaattaaagcaagttcgtcacttggagaatggtcacatctcctgaattataaactgaattcataatttacttcattatattttcatcctagaaagcttccttcctgtcacttgtagccttttgaagtctctagatttattatgtaatcatctcaggagaggcatttaagattctgtgtaataattgttttgaactgtaagaattcatagataaaatttgcagaatgctggcaaaaggataatgagcaaaggaagaaataaagaggaaggaaaggagtagaatttagtttcaaaatattgtttaccttgaatatgaaaagcagataactttacatattgagggagtaaagttacataagtttacagataacacagtaactctgttagagtcactgagacagatggcacgagacatttcattgcatgacaccaaatttgatatcttaatccctaaactgatgagtcctcctaaatctgaaataattttgattctttgtaagaagagttttatgtacttgtagagtacattaagagttttactgattattagactattactataaagtggaaatgtgtattttataaatgttaagcatttaatataaaatgttaatatcctctgagagaatccctaaccaaaatagcccaaatcctaccataaaggatgtgatgaatgtagttgtttacatgaatccattttggatatttggggaataattgctttttcccccacgatgatgtaacaaagctatcaacattacaaggaatgttacttaagatgatccgtgccacctttttcttcctccgtaggcgcctaaccaaggaaaatgtgaagccttctggaagacaaattgggaagttgagccacagcaatccaaccattttgtttgattatgtatgttttgaggttaatattattttaagggatttttctttctgttgcctttaaatcagtgcaagtggaaatagaatgatgttagaaaatgaaacattgtaaggttatgctaaaaacaaaattactac

SEQ ID NO: 44437 - DNA, 2300 bp, Homo sapien
ataatttctatttactgactagaattataattcaagataagatgttaattttttttttttttgagacagagtcttactctgtcacccaggctggagtgcagtggcgtgatctcggctcactgcaacttctgcctcccaggttcaagtgattctcctgcctcagcctccctagtagctgtacttacagatgtgtgccactgagcccagctgatttttgtatttttagtagagacggggtttcatcatgttgcccaggatggtcttgaacccctgacctcaggtgatccacccgcttcggcctcccaaagtgctaggattacaggtgtgagccactgtacccggccaaaaatatttaatactgtcttttcataaggttggtggccaggtagcttggttagaacatggtaatttgaccagggtggcgaaagtcatgggtttgatcttcatgagtattaggatctttttttttttttttttttgagacagagtctcgctctgttgcccaggctggagtgcagtggcacgatctcggctcactgcaagctccgcctcccgggttcaagcgattctcctgcctcagtctcctgagtagctgcaattacaggcgtgtgccaccaccccaggctaatttttgcatttttagtagagacagggtttcaccatgttggtcaggctggtcttgaactcctgacctcatgatccgcccgccttggcctcccaaagtgctgggattgcaggcgtgagccactgcgcccagcctgagtattaggctctttagagttagaagaaatctttgttataaccctgttcaactttccacctaaaataatcttttttttttttttttagcatctctgacaagtggtcatttaaactttgtttgaatgtttcattttttgcgaacaatagtttttgaagctttgttgcttccagtgccatagcaggtagctccagtgtagttgatgtactgttttatggatctgtcataggtcacagggtcaatctccagttttaggagaaattaaagcattcatataacatctcatgttaccatagttttgaatttttccaaattcagattgaggcattttaaaattagttagtttcaaataaaataagtatcttactttagtgctggggagtctagacaaatcaatcaaacttttttcttcttcatcattatagacattgagacaaattgtttagaagaaaaaagcaagagagactattttacacagttggtattagcatgtttggtaagtttttaaaaatatttttcccttttaaaaatctgcattaaacagttgtaatagaagttaatcatgttaatgaaggaggatattgacattcagttgacttttctcataaggtgagatttgggttttgaaatggaatgttttgtgaaataagacatgctgtttctgtgaaataagcatgtaaccatatccatatcacttaaactatctatacatttaaaacctttggtgatattcctgacctagtaagttcctaagaaaaaggtaagcatttataaagtaagtagaaatgattgtagacagcttttaaatggatttttttcctcataaactgttaagcaaagagtaaaagaatagaggtagtttaaaaatgataaattctagaacttgccatgattgttgtctggtaaaccatttgtgttcataaatttagaaccagggagaactgccgtggttgagacctggaagaaggtgcttgtctttgctatactagaatttaacttaaagtaggaggctattaagtgctgtattaggtgaaagtccagataagccaaatgcagtcatattgaaaatttcatctgtagttcttgtcatttataggcagtatacaacatgcatataattttatagtgaattttttgaaagccgtttattaaatatttcaatatttggagtcaatatttgttaaattgaacttctaagcctttttataaattgtaggttgttatgtagagaatgttatttttgtattcttatttaggaagctttagtttgaatatatttaacattgtggatgcaatgctaaggaataaatgacctttaatattttttaatacagtatttagtttcagacacagttctaaaggaacgcctggatccagaaacactggaatcattagggcttatcaaacaatcacagcaattcaatcaaaagtcagttaaaatcaagacaaaactcttgtaagtacacgtatcttatgttgcagatcaagtatctgagtatgttttttcgttcatattttgaatcctagtagcttctaaggg

SEQ ID NO: 44438 - DNA, 2300 bp, Homo sapien
tatcagttttgggggattaccctaatatcgatgaagatgatggtctggctgggtaacttcccatcttgccttccccaaacttgatggctatttgtcaactagctatcaaacttgacagctatttgttaactagcacatacgaggatttgtaaaatgttcattatagttaaaaacgaagatttatcaaatagccttctctgacaattaataaaccaataagcattctaagcataggctgggggggcggggcatgtgttaaaccaaaagaaatatgagacatagtccctatatttcaaaggcctcccaattcattacagtgcaagaataaacacacatgaataagtcagagaccaattaattgctaacctgagtggtacagactttaagtgcatgagctgtcctgagaagtttaaatatctaaaggttggaataatattacttttaatagctatcacttgagcacttactataagccaagtgctttacaggcattatttagtcttcacaacaatcctttgagtagagtacttattattcccaatttactcaaggggaaacagtccaagtggttaaggaacttacccaaggtcactcagctacttaagtggctaagacagccgcttatttagggaattctagagctcacactgttaagacttcatacagcagtgcggggggtgcgggggaggaagccacataggctggcactattacaagcgcgggatccggcaacgcgttcctcgtgtttcgttccaagtaacgaagttacaaagatttgaatctttagcatgagccacggtaaactggctactagaaatggagaggggtgggcaaggacgacaaaaatggctaacgagggttaatttcatccagggttgagctttagcatctaaaagcgacccagagaaggaaatgagatgttattaatatttgttcttatatctgaggtttgctttgctgcttaaacgactccttccaggggaaggggaggagggagcgctctaacgtgggggcgagaagactaggggtatggcaaattactgttttcggtgttacgggggaaagtttcacgactaaaggaaacgcgttatcctaggtactggagaagcttggagagctgccagaattagttgcagtcccaggataaaatggggtttagggaacatttaatgacgaaagttgaatccaacccgaaatagctctaaggtgaaaagacggagcaaagaaatgtcggtggttcttcagggaaagcggcaatccctgccacacttccccacggcgctacgcgaggccgggacagtcgagagaccgctccccgggagggcgagaggtgccaaaccgggttcttcgcggcgccccgggcttcgcggcagcgggcgaagaggaggggaggggaatccgggacggttcgccctccttggacttcaggcagaggaggcgccaagctccaaactgcggagtccaacgggtgcagagtgaagaaatggcacagagagagatggaaagtccgaattgccccggctcagccccataaagataaaggagccaagtgagatcaagcgaagagggggacacaaaaagagaccaagagggagcgcggagacctgcaggggcggaataagagttctactaagaggctaaaggaagccgagctaccgcaggcagtagcgatttctgggaggccagggaaggaaggaggtccgcggcggtaaacagcacctctccccgagttcgaaactcctagacgaccatccacgcccgccgcccgggtgggggagggggtacatctttccccctcaacctcccactacaggtgagagtgcagctgacgccctggcccggcccggcagtgcgcctgcctccggcccgaacactcacaattcgcctctccctgatttctcccagttctttatccactctgcgggaaccaccacagccgcggccgccatcttcctctcactagtagcagaagcccggatgtgtagcacgcgagcgaagggtcaaaggggagcaccgcccacgaggaatgccgggagctgagagttcgtttttcgatttcccgccccactttcctctccacccagcggaaacccgaggcaaggcagccaacgacgtggagactcgcgggcccctttgcgaggttactacacgggttgcgccctccgaagtcttcggccttacttcccattagaacagagaaatgccatccacaggccaacaagtagacttcatcttcttccgtaatatctacccctaaccactaatacaaacacgcatttttcaagcacctaatatgtgct

SEQ ID NO: 44439 - DNA, 2300 bp, Homo sapien
aattctcctgcattaggaactgccctgtgagattcctgcaaaataatcctccaggctcaggactattcctcttctcttgtgctagacacatctctcttctggaaagttttccttccttttttttttttttttttctgttgacttttttttttttttttattgatcattcttgggtgtttctcgcagagggggatttggcagggtcataggacaatagtggagggaaggtcagcagataaacaagtgaacaaagatctctggttttcctaggcagaggaccctgcggccttctgcagtgtttgtgtccctgggtacttgagactagggagtggtaatgactcttaacgagcctgccgccttcaagcatctgtttaacaaagcccatcttgcaccgcccttaatccatttaaccctgagtggacacagcacatgtttcagagagcgcagggttgggggtaaggtcatagatcaacaggatcccaaggcagaagaatttttcttagtacagaacaaaatgaaaagtctcccatgtctacctctttctacacagacacagcaaccatccgatttctcaatcttttccccacctttcccccttttctattccacaaaaccgccattgtcatcatggcccgttctcaatgagctgttgggtacacctcccagaccgggtggtggccgggcagaggggctcctcacttcccagtagcggcggccgggcagaggcgcccgtcacctcccggacggggcggccggccgggcggggggccgacccccccacctccctcccggacggggcggccggccgggcggagacgctcttcacctctcagacggggcggctgccgggcggagggtctcctcacttctcagacggggcggccgggcagagacgctcttcacctcccagacggggtcgcggccgggcagaggcgctcctcacatcccagacggggcggcggggcagaggcactccccacatctcagacgatgggcggccaggcagagacgctcctcacttcatcccagacgatgggcagccgggcagagacgctcctcacttcctagacaggatggcggccgggcagagacgctcctcactttccagactgggcagccaggcagaggggctcctcacatcccagacgatgggcggccaggcagagaggctcctcacttcccagacggggtggcggccgggcaaaggctgcaatctcggcactttgggaggccaaggcaggcggctgggaggtggaggttgcagcgagccgagatcacgccactgcaccccagcctgggcaccattgagcactgagtgaacgagactccgtctgcaatcccggcacctcgggaggccgaggctggcggatcactcgcggttaggagctggagaccagcccggccaacacagcgaaaccccgtctccaccaaaaaaatacgaaaaacagtcaggcgtggcggcgcgcacctgcaatcgcaggcactcggcaggctgaggcaggagaatcaggcagggaggttgcagtgagccgagatggcagtacagtccagctttggctcggcatcagagggagactgtggaaagagagggagagggagaccgtggggagagggagacgggagagggagacgggagagggagagggagaaggagagggacccgattattttcttttatctcagcagtcagcagggcgtaatgtaatttatttgcttatatttatggctttcccaaagactattatttctctattcccagtgtctagcacatattaggtgcttgaaaaatgcgtgtttgtattagtggttaggggtagatattacggaagaagatgaagtctacttgttggcctgtggatggcatttctctgttctaatgggaagtaaggccgaagacttcggagggcgcaacccgtgtagtaacctcgcaaaggggcccgcgagtctccacgtcgttggctgccttgcctcgggtttccgctgggtggagaggaaagtggggcgggaaatcgaaaaacgaactctcagctcccggcattcctcgtgggcggtgctcccctttgacccttcgctcgcgtgctacacatccgggcttctgctactagtgagaggaagatggcggccgcggctgtggtggttcccgcagagtggataaagaactgggagaaatcagggagaggcgaattgtgagtgttcgggccggaggcaggcgcactgccgggccgggccagggcgtcagctgcactctcacctgtagtgggaggttgagggggaaagatgtaccccctcccccacccggg

SEQ ID NO: 44440 - DNA, 2300 bp, Homo sapien
gtggcaggatctcggttcactgcaagttctgcctcccaggttcacgccattctcctgcctcaggctcccgagtagctgggactacaggtgcctgccaccacgcccggctaattttttgtatttttagtagagactggggtttcaccgtgttagccaggatggtctcgatctcctgacctcgtgatccgcccgcctcagcctcccaaagtgctgggattacaggcgtgagccacggcgcccggcctatttatttttatttacttatttattttgagacggagtctcgctctgtcacccagggtggagtgcagtggtgcgatctcggcttactgcagcctccaactcccgggttccagagattctccagcctcagcctaccaagtagctgggattacaggcactcaccaccacactcggctaatttttgtatttttagtagagacgggttttcaccatgttggccaggctggtctcgaactactgacttctggtgatccacccgcctcggcctcccaaagtgttaggattacaggcgtgagccaccatgcccagccaaaacagtaaattttatgttatgtacattttaccacaagaaaacaacggtgcttaaaaaaagcaaaaacaaatattagagaagtgccactagagttcagagcatggagagatgaacttcagctaagaaaatcagagaaggctttgtgtacgggcagtcttttttttttttttttttttgagacggagtctcgctgccttccacgggcagtcttttcacataggcagagggagtagtttgaacaaattagcggaaggcaggaaaactgaggataggcggggcacaaggagtagttctgatttgttagaagatagggtagggcacccaaggggagaataaacatgcaactacgagttttaagaaaattctttcctctcctccctccaagttcccttgttgtgaagggaggatcatatcttgtatcacttgatttcatttgaaatgaaatattcagaatccatcatctcaccacattaccctgtaagatcccattttcctgaaacaaaaattcctatgttgatctgacaatcctacaacgcatttgaaataaatccagggtatgaccagcattttatgtacacagacttcctttgtttccggtccatctgctttctttttcctctattaattttcccttcacctcccaatcttaacccccgccattcccccagggtctccctttcttgtcatccctttcatccttcccttcttggaaacagatccgattctaacctcagttaccttattagccgcgtgatactgggatagttatcccctgtgggcctcagtttcctttgtaaaatgggcttattaaacccccaaagacagtgcttatcttacagggttgtcaacattacaacaaagaacacgttatatgcctaacacagtacctgatctatagtaagaactcaacattttcgccccttctcctcctcttttctgtccttgtgcctttcttccactattcctcaaccccagggcccaacaggtaaaaaccgtgggaaaaaccatccttaaggctgaaagaagaaacactggagctgggggcggagactacgaggtgctcactgcgcatgtgcgcgcgctaggtcagcttctcggttccagccgggcgggggggtcgggtgggggtgggggtaggggttgcaagggcctcattttttcttactgcccccatccggttcggggaggtggcgggaccttggcggcgcccggagccggcgtggcgctcatcgagggacgcccggcccaagtggtaagttgaaaaatggcggaggggggaagaaggaggggctttgcagggcaggaggctgacctcccggccgggggtgggagggacacgccggggcccagtggcgcagcccgggctgggagactgacggaccgcgcccggtgtctctttgaggccctgacgtggacacacttcgggtttcacgactccgggtttctccaggggatgggccggccggtagaggcgcgtgagggagacgaagggacttccgtttccttcacctaggctggggccaagccgcagagcggagttggcatttccagattggggctcgggccgcgcctcctccgggaccctccccttggaccgagccgatcgccgcggggcagttcgggccggctgtcctggcgcggtgggtacagcttgtgtaggctttcccctcccccgctttccctccttcccctctcctccctcccctcttcttttcccctccacttccctcgggccggcgctgct

SEQ ID NO: 44441 - DNA, 2300 bp, Homo sapien
caattgagattaaattggcacaattgaactaaattaatgtaaaaatgacttggtacacggcccaatttttctattacttcaagtggaattttgcattaacttatataactctgtaaattttccactactctctatttaatgttctagctgcatcattctgtaacttgaatctattaaaaactgtatagcattctaccaaagatggtctataaaagaaatggaaatttattttgaatagtattccactctccagagctttagaggtaagtaaaaatgtctcagattttacttcttgttattgatattcagatgtttctgtttaacttttattgtccagttgattaaatatactataactctttttgtaaagttgcagaaaaaacaataagcacagaggatgggagagaaactaacaagagatatggaaggaatataatttaaggactgaaaataatcgttatattacattaggaatgtttcagaagtgatatcggggtgaaagcttcatgatttacacggggctcaccctatttctcagttggaaaatttgttttgttattaatacgttttatttcttttcttctaattgaaatgtaatttaatatttaagaaatattttaaccaaaatttcaaaaatggaacagaaacgaagacttcttaagcaaacactattttatgaatctacgaacttctataacagcaatggagacactgcaataggtcacttcttcctgtccaaggaaaaagcggcgctttggaggggataggccctcctcgagtttttctcccccgagtaaagagctcttggcggtcaaaggtccaatacactggattcgaaacaaacaaaaaaaaagggtgacaaagattttagttaacaggggtcggaggagcagaaagggtcttttcgcacttcaaacatcttgggggagggatgggaaggcaggatgcgaagtaacctaaattcccaaccatttcgcgtggttgcacccgcccaggaaggcagtggatgcgcgggggaggcggggtaggtccccctccactccttttgcccaaatttcgatttccctccacttcgctcggtcctatctcttcccccgccccgagagtggcgaacaaattggtcgagcgcccggcctagcctagtagtccagttctttaggactcctagaacctggagatacagaccacgttttctcggagacgggaccagtgggctgtaaagcaaaacaatttttctttcttttccagggctaggtcttactggtagagaatcagctcgctctctctccacacccgaagcaaaaagcaaaacaaaaccaacccgtattccgcccccgatctagcccaagtagctccattaaaccatttaggatcaggtgccagagttaagcgacttgggttcttttggtgggaaggggtagggacaagggggcatcgaaggtacgggaactagggccacaggcccctcacaggggtgtgtcagaagaggggacttcgaagggtgatgcccgactgggctgccaccttagcgcctcgcgaggggcggaggggcccggggaacgagtcccggagcgaacccagccagcctctggattcccacggcccagggctccgccggacattcctaccgccctcccctcgacaccccactaaagacagaagaaccgcggctcgatcgggtccgcggcggaagcgcggccaaacgaatgagtaagtcaggcgcgggcacggcaccttgtttaccccactcggcggcgcgcccctgcgggcgcctggtttgcgggcggcgtcggagacgctgaacccgggagtcagtcggccacgattggtcggtgactgggaggaggacgctgggtgggagggctgggagccaggcgttgcagtggcaactctctgccgctagatgccgctccctcccaacgggagccgggcgcgggttcgtggccgacagatggcgcctgcgcgttccattcgcctccaagtcgccgaagagcgaacaccccaaacaatcccgaagcgccaccaaaaaaaaaaaaaaaaaaaaaaaaaaaaaaaaaaaaaaaaagaaaaaaaaccccgccggatccgaccgccactttcaaaaccccccaccgctctagaaccgcgggagcttccgtccctgagtagaattcgagggtgtaaagaagaggaaggggaaaaatatcttgtaccagcccaggggtgaagaagcccccggcctgagaaagaaggaggagtgggggaggcgaacagtctcgttgctgcctctgtgtacgctgaggggggaggtaagttataaa

SEQ ID NO: 44442 - DNA, 2300 bp, Homo sapien
atggaacagaaacgaagacttcttaagcaaacactattttatgaatctacgaacttctataacagcaatggagacactgcaataggtcacttcttcctgtccaaggaaaaagcggcgctttggaggggataggccctcctcgagtttttctcccccgagtaaagagctcttggcggtcaaaggtccaatacactggattcgaaacaaacaaaaaaaaagggtgacaaagattttagttaacaggggtcggaggagcagaaagggtcttttcgcacttcaaacatcttgggggagggatgggaaggcaggatgcgaagtaacctaaattcccaaccatttcgcgtggttgcacccgcccaggaaggcagtggatgcgcgggggaggcggggtaggtccccctccactccttttgcccaaatttcgatttccctccacttcgctcggtcctatctcttcccccgccccgagagtggcgaacaaattggtcgagcgcccggcctagcctagtagtccagttctttaggactcctagaacctggagatacagaccacgttttctcggagacgggaccagtgggctgtaaagcaaaacaatttttctttcttttccagggctaggtcttactggtagagaatcagctcgctctctctccacacccgaagcaaaaagcaaaacaaaaccaacccgtattccgcccccgatctagcccaagtagctccattaaaccatttaggatcaggtgccagagttaagcgacttgggttcttttggtgggaaggggtagggacaagggggcatcgaaggtacgggaactagggccacaggcccctcacaggggtgtgtcagaagaggggacttcgaagggtgatgcccgactgggctgccaccttagcgcctcgcgaggggcggaggggcccggggaacgagtcccggagcgaacccagccagcctctggattcccacggcccagggctccgccggacattcctaccgccctcccctcgacaccccactaaagacagaagaaccgcggctcgatcgggtccgcggcggaagcgcggccaaacgaatgagtaagtcaggcgcgggcacggcaccttgtttaccccactcggcggcgcgcccctgcgggcgcctggtttgcgggcggcgtcggagacgctgaacccgggagtcagtcggccacgattggtcggtgactgggaggaggacgctgggtgggagggctgggagccaggcgttgcagtggcaactctctgccgctagatgccgctccctcccaacgggagccgggcgcgggttcgtggccgacagatggcgcctgcgcgttccattcgcctccaagtcgccgaagagcgaacaccccaaacaatcccgaagcgccaccaaaaaaaaaaaaaaaaaaaaaaaaaaaaaaaaaaaaaaaaagaaaaaaaaccccgccggatccgaccgccactttcaaaaccccccaccgctctagaaccgcgggagcttccgtccctgagtagaattcgagggtgtaaagaagaggaaggggaaaaatatcttgtaccagcccaggggtgaagaagcccccggcctgagaaagaaggaggagtgggggaggcgaacagtctcgttgctgcctctgtgtacgctgaggggggaggtaagttataaaatggcggaggcgaagcttctagaagtttggaggggcacccggagggcgcttggcccaccgtgaggtgtgtatgattgaaacagggcgagagagaggagttgggagggaaagaggttgggcactctgttgccattgaatttcccctctgctttcttcgcccccatggggggcagccatggaacggggggcagagtccaggcgggaggatctttctcgcccccgcggcgccccccgccctcctttctcccttctccccccaagtcgctaccccaacacttccaaggaacttccagccccccttcctccctacctcctactcctagagtggctttctaccgcagggctcttcttttcgactaccctcgctgaagattttctcttccttccctcgcccaactctccctcggggcctctacggagaccccccccccccatgggtggcccaaaatggagaacgcggagcagcgcaagatggaggctccgcttctctgtgtagcagtagatttaggttccttttctccggcaggctcctaagcctaggagagcccgaactggaggtggggtggggtgcgagccgtagtcgggggaggaaagccgggaggctgtggttggggtgggggagagcgcggtgtcgc

SEQ ID NO: 44443 - DNA, 2300 bp, Homo sapien
cctctactatctccattgctctcctctttcattttctcccatttcctctcgtgtgtatggggagagaaggaagagagtcatttcaattcctcttttctctacgcttcaagctcagtgtgaagttttgaatttgctaaagtcaggtttagtactggtgtaggattagagtgaagatgtcagtatttttcatcaacactgcactagtgggctggctcggctggctcagctgtcagcttgcttgtaagatgacaatgaggtactggatgtgaaagttgtactattaccttataatttatctgttttttagtgcaattttagttgtgctgaaccccgtcatacctggctgctttgacaggtgtgctattttagcaacatggaacaaaacagagaaagaaaaaaagagtgcatggtacgcttgtgctgtcagatccaggttgctctgttcctaagtttatggatgatttgttcagagttgttaagagacaaaaaaaggttaggttttgttttcacttatgtgacactgaatgttctcacagttcacctcacaggtcagctgttgctcatatggactgatataaagggatccctttccctgtctcctttctatttgaaattccaccattttgattaattcctctgggctaaccatttgcctgctcaatatatggagagcccaaggtggacaacctttcaaatccttaatgttggagtatgcattcatatatcagattaatttcttccttgatccaaagcatgaaaaggggtaagaggtggagttggtcaaaaacatgtgaggaaggaagatgataaaataatattggtcccattccccagagccatccccaaatgtcaccttgaatgctttaaaaaaaaattcttaatgctgaaaatgactagtaggagacttatgtttatactttgcatactaaggctggacactcttcaatcaagaagaaaagttgctaccagctaccactgaaatcttagaggattgttcttaatcctagtagatgaagagcaaatatctgcctttggtgcaagtcagctctgtacatccaatccattggtaagacatgtgaggaattaagtgtcgttctcgctattgagttcccagccttgccatattctcaaagaactacacactgaagttgcagaaagcatataatagacgacatagcttcagttatttaaattcaaattttaaaagtactttacataatctaaaggtacatgtacaagaccattcagcttcagcaataaataaagtcttactctagtgaaaatgcaggaagctttgcggaaatattacctagcacattttgaaatagaagcaatgttttatttcagagaagaaaatgaaggttgaaaggttttaaaatattaaagacagtttagcctcaatcgaagaaataacattttctagaaacaacagagaataaaagttacaacaaaattatcaacaacttgcaaatgattcaaaacagattttatggacaaaatgctgaaaggtgggccctgtacaccaaagggcacatacaaatccacataaaggcaaagcaccagttaaatgattcacagtctcatctaaagcccatcaaatagatacatctggaacatctttggatgtacattgtgacttttgtatctcaactagcactttgggaccttggacaaggtgttaggaaagaaatcaatatttgctcaggatcaagacttctcaagatgactgcgtgaggtagaaggaagagggagaagaagaacttgcccagagttcactgttcatctactatgtctgattctgtaggagtcttcatggccatgttcagtaatgattgcatactgacagtactgataaaactatcagtgttttgttctcagagctcttggtcctttcattttgtcagtgtgtttttgccctacgtagtgggtccacataccaacagagacatgtacaacttgcctctatcatcaactccttatgggctagttgagctaagttattcctggtggcctctgagtaaaccgcaagaacagaagcattactaagcatccccgtctgagtgcaagggtgtgtgttggcagtacagccccaatcttgcaaaatccttcttccaatgttcctcccctctctgtatgaaccctgtgttggggggcagaagatggaagcccttggcaagctcgatcgaaccaagctactaaattgctgagctcgttttaactgaagtgtgagaaggaggtttaaggcaagtagacaacatcctgttgttggggtgcttctctcttttttgcacatctggctg

SEQ ID NO: 44444 - DNA, 2300 bp, Homo sapien
aagagctcacttttgaacatactgtgtttgacgtatcttttagatacccaagtacagatattgagtaggcagttggatattcaaagttgtggctcagggtcaagacccatgctgaagctataaactgagaagttatgggtgtgtagacagtatatgaagccaatatactggcgtgagattagattgttgttgaatcattggtgtgtgtatatatatatatatgtatatgttcatatctgctgctttctctttaagcatgctcatctctcatattagttcaaaccaaactaggtgtctccatacacagtttgtaggttcaggagttaaatagtttctactacgtgtgtgcctaaagtaatacttagcggtgtgggggatataaagagacattaagactcacatcctgccttcaagaccttcacatttgattaggaaaagaagaccttgacttgtgaaactgttcataccacaaaagaagaaccatttaaaacatatatcagtcaaatgtgtaagccttttttaaaaaatcagcctacataggccgggcgtggtgcctcacgcctgtaatcccagcactttgggaggccgaggcgggtggatcacgaggtgaggagatcgagaccatcctggctaacttggtgaaatcccgtctctactaaaaatacaaaaaaaattagccgggcatggtggcgggtgcctgtagtcctagctactcgggaggctgaggcagaagaatggcgtgaacccgggagacggagcttgcagtgagccgagatcgcaccactgaactccagcctgggcgactgagcaagactccgtctctaaatcaatcaatcaatcaatcaatcaaattgatcaataaaaatcagcctacatcatactttgaaaagctaaaagccttttttgaatgatttctgtgttctatgtgcttggcataaatgcaataagaattccaaaatatgagatagtgtacatgatagaggagccaccatttggatgtctatagatttctttgaaaatacatatggtgaagagctgaagaaaaataaaagagtcagtttcactgcaaaataaaatcataaagttaattggtttctaactacatttttaaacattgtatgaaaagaccaagttgcaaagttgcaacagtggactgaaatggtgatgacaaaataatgtaaagaatgaaaataagaacatttttacagggcttttaaatttacagaggactttgacatctcagatgacacttgatcgtctcgaaactctccgtgctaagtagagcagttaatgcctctactggccctaagaccttcagtggctcctagctcagcattctatggggaaagggggttctttcggtgatttatcatgaagtttaaaattgctatttccaaaactgatttagatcctgctgttgctgtaccagtatactcaccagaagtgtttacatcctctcagtactatgaagaacaaaaatttaccaccacctaactcattaagaatgctctgcaggcctgaggctcaaaagccacaatatgagcacaaagagttcagtccccctcaaggatactttattccatgagctctctcactcagaatccttcccttactcagagcccctgtcttaaatgtaatattaaaccagaagcaagaatgtgttctttctgaatgtagttctcttaccagttttcatttcaaatgtggaatgtgcagggttaatctttgtactcctcaccactttcaaatctgataacgttttttaatctaaccactgattttaacattaaaaacacgcacacaccatagaacaacgttgtcctctatttgaattccaatacaaatatttttgaaggctgtctctcttttaccttgagtattttctgatgctgcaacctccagcttaatccttaatgcttgacaatgtatgcatgtaacacagagtgttattattgcctccggctagcttcatgtcatctagtttgtcttttacttctctcctttgatggtattatcaggaccaattgtgaatctgccagatgcatttcctcacaaaaagataaatctaagaaggcttgtgtttttccctttctcttccaggactgcttgcattaaaggacttcctcatcctttttttcatgaaactgagcttgcttaatcagagatggagcaaactgactgcaaaccctaccagcctctaccaaaagtcaagcatgaaatggatctagcttacaccagttcttctgatgagagtgaagatggaagaaaaccaagacagtcatacaactccagggagaccc

SEQ ID NO: 44445 - DNA, 2300 bp, Homo sapien
tggtttcttagactatctgcaaggacaggatgtgtgatggactaacaatttgtttctggctaatcaaaactgacagtagtgatttgcaccctcagggctggaagtgtgttaattataacttaagtgtgttcaccttgagtgtaaagtgtttgtatattaggcaaaattttacaagggaagacatatcttgtaaacaacatttctgaattttataattttgaaaacatattaataagaataatatattaattgcaatataaccatttaataagatttttttctgaagaaaagtacaaataagattaaatatacttgggtctggaaagagaacagtatgtaacagaataggaattcatttctgagtaaaaaataatttatttagaatgtatgcagaattttgtttcagacaagatgttccattgaattgagtttttatataaaatttatttgaaatataatataacacaatcagggaaatatcagtcatagtgtaagttattattaaattttcaagtgttattatttaaaaaatagagttaaaaatccaatgccattataaatagaaaataactgcaaagtgaaaatggaacaagttactgaataatgcatcagttaaagaggttttcgatggaatgttcactgcccataaagagtgcagactgtataaataaataaactcctaggtgtgattgttccctttacttagtggcatgaaaagtgaacgcaccctgactcaccctggtgaaagggtatgaaagcagtaaggcatgtctcttcagaaaaaaatcacatagggagtgcaaatatttcagatgagcagggatatttttgaccggttttcagtatctttgtcaaatatccaaaaaagggtatttagtagcataagtattacaaggatagaaattaacaaaagcaagtgtcatttacttccaaactttatttctagtttggggtaatttggcataatgaacttcaatcatttaggtaagctttcccatctcatatatatagcatgtttacccaactgctattaagatgttgtaagcatatttacagttacatgctctctggagcacaattagccaccggtaatctgcaattaaaatgagaaaattttcttcagtgtccctgatatggtttatttttatttatttttaaactaaaattattttaaattgacaaatcatagttgtatacattcataggtatgatgtgatgttttcatatatgtatgtaatgtgaaatgattaaatcaagctaaataacatatccaatgcctcacttacttattttttgtggtgaggcatttgagatttactccttgttttgaaatatacatttttattgacaatagttgctctgttgtgcaatacatctcaaaacttattcctccggtataactgaaactttataccctttggcctacaatcccccaatttattccctcaccctagcctctggtaaccaccatcctactctccactcttatgagttcaacttttttagatttcacatataaatgagagaacatggtatttgtctttcatttcatattcatattttctttatccactcattggttgatgagcatttaggctaatttcatatttttcatattttgcaattgtgaattttgctgctataaacatgcacgtgcaagtgtctttttcatataatgacttcttttcctctggatagatacccagtaatgggattgctggatcaaatggtagttctacttttagctccttgtggggaaaagcaagagagatcagattgttactgtgtctgtgtagaaagaagtagacataggagactccattttgttatgtactaagaaaaattcttctgccttgagattctgttaatctataaccttacccccaaccctgtgctctctgaaacatgtgctctgtcaactcagagttaaatggattaagggcggtgcaagatgtgctttgttaaacagatgcttgaaggcagcatgctccttaagagtcatcaccactccctaatctcaagtacccagggacacaaaaactgcggaaggccgcagggacctctgcctaggaaagccaggtattgtccaaggtttctccccatgtgatagtctgaaatatggcctcgtgggaagggaaagacctgaccgtcccccagcccgacacccgtaaagggtctgtgctgaggaggattagtaaaagaggaaggaacgcctcttgcagttgagacaagaggaaggcatctgtctcctgcctgtccctgggcaatggaatgtctcggtataaaacccgattgtatgc

SEQ ID NO: 44446 - DNA, 2300 bp, Homo sapien
tcaattcctgggtatccttgttgactttctgtctcgttgatctgtctaatgttgacagtggggtgttaaagtctcccattattaatgtgtgggagtctaagtctctttgtaggtcactcaggacttgctttatgaatctgggtgctcctgtattgggtgcatatatatttaggatagttagctcttcttcttgaattgatccctttaccattatgtaatggccttctttgtctcttttgatctttgttggtttaaagtctgtcttatcagagactaggattgcaacccctgcctttttttgttttccatttgcttggtagatcttcctccatccttttattttgagcctatgtgtgtctctgtacgtgagatgggtttcctgaatacagcacactgatgggtcttgactctttatccaatttgccagtctgtgtcttttaattggagcacttagtccatttacatttaaagttaatattgttatgtgtgaatttgatcctgtcatgaagatgttagctggttattttgctcgttagttgatgcagtttcttcctagcctcgatggtctttacattttggcatgattttgcagcggctggtaccggttgttcctttccatttttagcacttccttcaggagctcttttagggcaggcgtggtggtgacaaaatctctcagcacttgcttgtctgtaaagtattttatttctccttcacttatgaagcttagtttggctggatatgaaattctgggttgaaaattcttttctttaagaatgttgaatattggcccccactctcttctggcttgtagggtttctgccgagagatccactgttagtctgatgggcttccctttgagggtaacccgacctttctctctggctgcccttaacattttttccttcatttcaactttggtgaatctgacaattatgtgtcttggagttgctcttctcgaggagtatctttgtggcgttctctgtatttcctgaatctgaacgttggcctgccttgctagattggggaagttctcctggataatatcctgcagagtgttttccaacttggttccattctccccatcactttcaggtacaccaatcagacgtagatttggtcttttcacatagtcccacatttcttggaggctttgctcatttctttttattcttttttgtctaaacttcccttctcgcttcatttcattcatttcatcttccattgctgataccctttcttccagttgatcgcatcggctcctgaggcttctgcattcttcacgtagttctcgagccttggttttcagctccatcagctcctttaagcacttctctgtattggttattctagttatatattcttctaaatttttttgaaagttttcaacttctttgcctttggtttgaatgtcctcccgtagctcagagtaatttgatcgtctgaagccttctctcagctcgtcaaagtcgttctccgtccagctttgttccgttgctggtgaggaactgcgttcctttggaggaggagaggtgctctgctttttagagtttccagtttttctgttctgttttttccccatctttgtggttttatctacttttggtctttgatgatggtgatgtacagatgggtttttggtgtggatgtcctttctgtttgttagttttccttctaacagagaggaccctcagctgcaggtctgttggaataccctgccgtgtgaggtgtcagtgtgcccctgctggcgggtgcctcccagttaggctgctcaggggtcaggggtcagggacccacttgaggaggcagtctgcccgttctcagatctccagctgcgtgctgggagaactactgctctcttcaaagctgtcagacagggacatttaagtctgcagaggttactgctgtctttttgtttgtctgtgccctgcccccagaggtggagcctacggaggcaggcaggcctccttgagctgtggtgggctccacccagttcgagcttcctggctgctttgtttacctaagcaagcctgggcaatggcgggcgcccctcccccagcctcgctgccgccttgcagtttgatctcagactgctgtgctagcaatcagcgagactccgtgggcgtaggaccctccgagccaggtgcgggatatattctcccggtgtgccgttttttaagcctgtcggaaaagcgcagtattcgggtgggagtgacccgattttgcggtctgtcacccctttctttgactaggaaagggaactccctgaccccttgcgcttcccgagtgaggcaatgcct

SEQ ID NO: 44447 - DNA, 2300 bp, Homo sapien
ttcttttcagtttaattccaggaagtcagcgtgaaagggccttaggttccctgcctccagaccctattctcctgcctcacttgcagcaatgcctgttaatataacaatatagtaaaggtgtaaggcaatagtaaagaatagttaagttctacatgcataataggtacaattttcctccctgggccactctttgctctgacatctacatcatcataatctttttaattcccaattcttgcacaatattcacctggataaggcccattttcagggtaaccctgaagtacatgaagatatttatctcctcctacctgcaacacatcctgttcccacctgagtgagaggagtgtagaccagtgtttctcaaataattgtccactgatcatttgcatcaaatctttagggatagaatcaaaggatatgcacatctattaagctgctcctgagatgttaatgtacactaaaattcacgaaacaatcctttgcactatctgtgccttttcacatatggttgcctctttctaaaatgtccattcatcccatttgtgtccacgtgtggaaacaaaatgcagcttcctctatgtacctgtccctgatttcatgttcactattaccaccagcagatgcagcctttctattgctataggatgaatgatatggggaggaatcaaaagtgaggtgcaagggagtgttggggtacactggaaggcagctgctggattggagtggtgagaaggacctatggcttttacttggaatttgtgcacttgaggcgaagttgcaaaaagggatgggggaaggggacagaaaaccagaaaaataaagagggggttggggagaagcagcaacaaaataactcttatggttttccctgatcaggaagtaaattaatcaccgcaggtgtcagcaccccacaccctcaggccggcctgcccactcgcctgctcttcccactgcctcagcccctcccgcttggctttcctcgtggatctgtccacacactgactttgttctcactgccctctctccccaatgtatcactgtgtaactgaaatcactgggtaactgagtatgccccgtttgcgcctgccacctgactggctgctctgaagcagcagaactggataagaactttatgaactctgagaagttattcatgcacagaacctctaaacttgcatcattgtatccacgttgttgccttcttctggaacgttatgttctctgcacgtgaaaatcctctgcctctagaccctgtcccaaggtcccagggactctgcttgggcgcctctgggactgacaacagggatattaactttgcttctcaggagtggggaagaggtccccctctcaggatccttccactccctctccttagggctctgaggctcaaaggaagcaaacacctccaaaaagcccctcaggattcctcccccattagtacagcctaccattttctcaaggctgcaccaaaccaagtgttcgctgatatcaccatgggccaaatgtgggtcccagggatttgcatttggattgtactcctcaagggactgtggcagtagctcagagacctcaatttgaggagggaaaaaatatttgtttgaaactgtttaagacatcaactgaggggctgaaacttgaggggttgcaggtctgacatatgggtaaaggtctccctgcgctgccgaatcccccatcccttgccaagtttaatgtctaatcttagcgaagggtgtcccaggattacaccaagtgcacactggtttctccagacagatcgtggcctgggctccttctagccccgtgcttgactatatcgtaggtttcagattttattgaagtagggattttaagaagggtagttagctgttgtcctgagggtagcgaaatgccgcgtgtctgatacttgggatcctggcttgcgggccctcctagactctgcccttgcagctccgctaccccctcccctccctgtccctcccagccttcaccccgcccggcctcagctactcctcaggcaccccacgcgctcacaaccgcctgcccgaccgcctgctcctcccactgcctccgcccctcccactcggccccccgcgtcgatctcgccgcacgctgactttgctctcactgcccggccagacgcacttcccgccttcgcctaggtctgcaccgccaccgccgccctctcccgcgcgtccctcacccggtccgccactgccgcgcctcagaatccgaaggctcggttccagcgcagccatccacgccgccgccacgaccgactccggagccacgcgctgcaa

SEQ ID NO: 44448 - DNA, 2300 bp, Homo sapien
ctcttgcagtaacatggatggagctgaaggccattattctaagtaaactaacaaagaagcagaatatcaaatacagatgctctcacttataagtagaagctaaacaaatgatacacatggacataatgatgggcaaaatatattctggggactccaaagggatgacagtgggagaagagtgaaagataaaatataacctattgaatacagtgtccaatatttggttaatgggtactctagaatcccaactcccaccattatacatgtaatacctatgtaacaaataagcacatgtacccctctgaatcaaagataaaattaggcaggtggatcacctgaggtcgggagttcaacaccagcctgaccaacatgggaaaccccgtctctactaaaaatacaaaattagctgggtgtggtggcacatgcctgttatcccagctactcaggaggctgaggcaggagaattgcttgaacccagtaggcggaggttgtggtgagccaagatagagccattgcactccagcctgggcaacaagagtgaaactccatcacaaaaaacaaaacaaaacaaacaaaaaacaaacaaaaacaaaacaaaacaaaaaaaactccagttataaaagaaaaataaaatacttggaaataaaaatttgacaaaactggtataaaagttttactccaaaaatgacaatattccatgaagaaactaaaataatatgcaagtgaatggcaaaataaaatcacatgttcatgggttggaagagttgacgttattaagatggtaatattccttaaattgatctaatgattcaaggcaatctctatcaaaattccatatgacatttgcgtaggaattggaaagttgatcctaaattgcatactgaattgcaagggacccaaaatggccaaaacaatcttgaaaaggaagaacaaagaagtactcaaacttcttaactacagaatttattacagagtgacagaaatcaatgcagtgtgctaccagcatgatgatagacatatagatcaatggaatagggcagtgagtccagaaataaacccaggtgtctgtctatggtcaattgttgcttgaaaaagatactagtcattctatggggcaaaattatcctcttcagcaaatggtgctggaacagccagatagaaccatattcaaaagaatgaagttgaaaacttaatgcacaccataaataaaaaatgaactcaaaattaacaaaaactaaatgtaatagttaaaagtttaaaattcttacaagaaaacaaaaagataaatttaagaatcttaaattttataatgaatgcttacatatgacacaaaatatgaacaacaaatgataacagagaaactggactcctttaaaatttaaaagttttgtaatttcaagaacactaacaaaaaagtgaaaagacaatacaagaataaaagaacatgtatgcacataatgtatctgataaacaccagactcttgaatgtgtaaagaacagttacaatggaataatcaaaaaacaaccttataaaaaaggaacaaagggtctgcatagacatttctcccaagaaggtattagaatggccaataagcacataataaagattctcaacattgatacttaaagctgcaaatcaaaaccacaataagataacatttcacacacactagaatgcctagaatcataaagtcagaaaatagaatttagaagcatgtggagaagtaggagcattcctacagcgactgtgggaatgcaaaatgtcacagccactttggaacaaagaacttacagaaattaaaatcaaatgatttaacatacagttgtcatataactcagcaattctattctcaaatatatatctaaaaaaatgaaaacataattccaagcaaaagcatgtagaatagtgtttctcatagctctgtaggtatgatttgctttccttggctttgtatctgaccaagtagggagtactattggctcagaggccccacccggcccctctgatgctcactgaggacaattgttgccttggctggattgtgacatagagggcaatcacccctcatgttgcctcagcaggccctgagcctacagaatggagataagattcagaggttgaggatggggtgtcctggtggactgaaggtagcctactagctgtacatgggtgacaacttgaaacttcagaaccctgaagtttaaaaaattctaaaggtgcctgtcatctcagagagtgacgtaagtgttctttctttatttgggggaagtccaggagaacatattacagacatgtttaa

SEQ ID NO: 44449 - DNA, 2300 bp, Homo sapien
tcatgaaatttctcatagtcatttcatagtcacttattcaataaatgagtcattttttattggtaatctagcctttctccttttaacttctagttttagctagtgttctgtttgtgataacttatgttgcgttaggcagtcatgaagcatgagaataaaaaaatggaggctgggcgtggtggctcacgcctgtaatcccagcactttgggaggccaaggtgggtggatcacaagatcaggagatcgagaccatcctggctaacatggtgaaaccctgtctctactaaaaatacaaaaaattagccgggtgtggtggcgggcgcctgtagtcccagctactcgggaggctgaggcaggagaatggtgtgaacccgggagatggagcttgcagtgagccgagatcgtgccactgcactccagcctgggtgacagagtgagactccgtctcaaaaaaaaaaaaaaaaaaaaatggagctggtatctatagagaacatgacatgacctgtgtgataggaaggtaacacccatacttgtccattccttgatgtctttctgtagcgtcttagattatttttctgtctggagtagttattgacaggttaaaaggaatgaaggtatgaactaattacacagtccatttatactcattttgaggtattctacttccctgcttaggaggctgtctcaaaagtattagtttttttttctgaatcacccacatgaaccatgaatatatatctaaagatatctccagtcacaagcaactattacttattgagaataataatagccagaggatatagcttaatgattcacgagtcagctttacataaagactctatttagtctccctagaaaccaacgatcaaatctcatcagggtcaacttagccttttctataataggtaaattgaataacatgctgtttaatttgtatgtgtgttattgaatgaagctatggagaatatttggtctgcatactaaagatatcactattgttttggtaagtaaggaaaatttcagagttattgtttctaaattatttaaccctgggtgattgaagatacacaagaaacttgaacatgccagtgttacattagagtatttttaataggtaaacaataattcattaatgagcaatttttttctggctagactctggttttctgcctccttttgggtttcatttagagcctaaaattcatttgcctggatagttgatcttattttgtatcttacatttcctatgttgtatgccattttttttggattttatttggaaagataaaactgaattttaaacaattttccattcttaaaaagttacagattgcccaacacttaaatgttcattgcagaaaatttggagaattcaggctagtatcaagagaaaaataaaagttatcagtagtcctactcttagggatagccgatgttaaccactagtaacattattgttaatattcttttagctatttctgtgtatatatataataataataatacgtgtctgtgtattctgtttccagattaccaaaattttagttagttcccagtttaacactgctctaaacattgttttgtaaatatttgtatacatcttatttccttacaatacatttctggaaatggaattgctaggtcaaagggtgtgaaaattttaagatccgtcgttgaaatgtcaaatttgctttcaagaaaggtagtgtattagtcagcttgggctgccataacagaatgccacagactgagtggcttaagcaacaggaatttattttctcaccattatggagactgaaagttcaagatcaaggtgccagcagggctggtttctggtgtggcttctcctcctggcttgcagatggccaccttctgcacgtggcattctcatatggcccattgttggagtgcgtgcagagaaagggagagctttgatgtctcttccacttcttacaaggacaccagtcctattggattagggctccatccataggacctcatttaaccttaattacctccttaaagtccccatcttcaaatacagtcacaagtccccatcttcaaatacagtcacattgaaggttagggcttcagatgaattttgcggagacatacctcagtccatagcagatagtagcattgacatttcatcatcagtgaatgaaagttcccgtttcagcatcttattgtcaatgtcagatatgtataccatatatgtgcacatgcacacaagcatgtacatattgctaatttgatgaagatggcattgttttactttgcatttctttggtcattagttg

SEQ ID NO: 44450 - DNA, 2300 bp, Homo sapien
aacttggtggaattgtctaccaaataaaaagaaaataggtttctgaatgagagcgctttcatgatgaatacagtagatgagaattagtgaattgacctgtgacatttacctactcaaaggtgtttttgcttactttctggttgttgaatttagttggtttaagtgacggttggattacccaacactgtagacatgaaaacgtcaagaaaaaggtcatggtctttaaaacaagccattttgttgaccttgtgctgcattctcatggcacctagactcagataacaaaatccaaaggaattcattagagtctcttagtcacttttcatcttttcttgtatgaaaaaaatgtagttttgagaatacacacacacacacacacacacacacacacacacgagagaaggtttagaaggtaggtattttaaaatttgttgtggaagatagtgccaattaagtaattacccacagcttttaatagccctgctcaagattaggattttaattagcatataattagattttgatggtagtctaccgcaaggtaagcaaaaaagtaatgggtaaaatgtttttctaggattaaagctttaattttctgtaagtgtacttcccacattattatatatatttgtgcgtatgaggcaaagtaattttcattgttttgatactggaaaactgcacttcatataacctttcaaggaatgaatgataaacgtatggatttgatacccaatttttcttgttgctttgaaaataaatatgatttatattatatatggcagtctgaaagtgtgagtttgaggggctctttagcagttttctattctcatccatccaggattacattcaaaacattccatatagatgtgtacgtatcagatgctgtaaatcaagatggttattatttgggttagtgtaactgaatgatatctgatcagtgctacaaagtaagagtctggacaaggtcaaattccataatctcagtttggatttcctcaaaatagaaattttagtaaatattggaagacataatgggggccatatttttcttatgtttaaggtcacattctgttgatttttgacctaagttttcataaataggttgacaaaagccatgatagttttcacgaacaaatttgtgttttctcttatgcaaagtatgtgttaaaactgaaatgctctcatctttggttctggtgggtagatttgtgtttttattattttatttcttggtttcttatagggaaggaggcttattctatatatgtatttatatttgccagtacaggcttgtctttacaaaggatagggtgcatgagataacccccttccccagataatctctatattaagttattgattgatgttagttttcgctaaattacaatttaaaaatatcaaacattaatagttaagtagccttgacaaattgcttctacaagatgtttatgcaatataaatagtttaaagtagttttcttcccagttagagaaaattaacataagccaaaagtttaaaactgtactattatattaagtatatgtgatcacattgcattacataaaaaattaaatattcttataatactatgaaaacaattttaaaaatatcgttttaggaacagaaaccacagtttttttttctgaaagtgtggcgtatttccatgacataaaggagtgtttcttagaattaatatttactttctttgaattatttggtttgtggttgatattagccttttctagattttaaaatctcttatttaatgtttacacattttcttacactataaattaaagaatggatgagaaagctcagtgtcttgccttttgggttttattccaattaatatttctttggcattcacaatttttcagattttttttattggacctcaggtgtacagaactggattaatcataagccttgttttgtgacatgctctcatcattggtccatacatgtcccacattgatttatatatttagttatgtaattactttccgccttcttctaatgagagcattgaccagtttaagaaccttgctttgcaatttggtgacatttattttctttgaaattctagaaaaacgtttcttcatttcaactcaaacttgctgctaaagcgcctaaatctgaaaaggaaatggacccagaatatgaagagaaaatggtaaatgtagtcttggataggatagtgaatgctgtaattaatttttatagttgagatgttaaagatgaaaaaatacatgtatatatataatgcatagagaatcattgattttagaattggaaaataa

SEQ ID NO: 44451 - DNA, 2300 bp, Homo sapien
agagccagttctttataaaagtttgctctgttctccaaccccaatggaatagagcaatccaagaccatttcaaatgaaaagacataattggggaaagtagtagcagatagagcaaggtgttgagtaggctcagaaatgagatgactcttgttgaacaaagtctacagatcatgaattttaggcagatttacaaataaggatagcacatgctctgtaaatagcagctgttgccacaagccaaagggcaatatttacatgaatcctgtggcaaggtctgttgaccaagcatcgacctttccagccaaattcatatacttggtagcactttcagccgcgtcatcttgaaaaggaaggattgcattatacatgcatggaaaattgccaacgtacaaatatgttctgcccccaaataaatttttaaattctttttttggaacatggaacacatgtccccacaaaaaaaaggtgttataaagggatgtgtttcccagatttcctcacaaaagtgcatttaacccacgatgtaactgaaataatgtacactgacaatgagaaatacagtggaacaaaactgacttgaaagcagggacacaccaatacacaacaaatatttcttgagcttttctcctttgcagccccatgcaaggaaagaggaattctatctttcaatagctgcaacatggtgaaaaataaatcctccactgttgctgtccttaagggtccttctcaagacagggtatttagggtgtccattgcctcaagtatttatcatttctatgtgttgggaacatttcatgtcctctcttctagctatttcgaaatatacattgcattgtttgttcagtagagtcaccctactctactttgaacattataacttattccttccatctaactgtatatttgtactcattaactgacctctcttcattgatccgcctcaaccccacacacccttcccagacttctggtacctatcattctactctctacctccatgagatcaactttttagctcccacatatgagtgagaacatgtgttatttgtctttctgtgcctggcttattttgtgcaacataataaacatcagtttcatttatgttgctgcaaatgacatttcattcttttttatggctacatagtattccattgtgtatacagaccacattttccttaaccattcacctgctgatggacactgattgattctgtatcacgaaatgattttatatccatgatcattcatattatgtgttgtattattaccaaataataatggaggtgcaaatagaacctgtgccaaaaaatcacagtaattcatttcaattgctaatattgagtgcctaccacatgttgccccaggttcggtgggtaaccttgtcccctaggaatttaaaaatgcagtggtgaaggtaagagaagtgttcctgcacattggctacctgagaggtaccagaggtgaaaatagagcaaatatacgtaaaacttgagagtcagactttgccttgtaagtgaatgtgtttgcagctgcaatcaagagattcaaggagtgcttctctttgtgcagaatttaggaaggtggaaacagcaccgctaatcctacctctttagggatccgggaaagggcagtcccagaggggttccgcgctttgcaaatggtgaaaaagaccttctacagtacagttaggagcagaggaaaagttctttgtgcaagaaggggagagcgccccgaggtacaaagagcagatttaagggaaagaggattcgttctgcacgcatctgcgaggggagctcaggctcactgttgggggcgtgtgggaaaggagattttcagggggccgcgagttgtgggttcccgcctccacccctgtccgcgccccacactcaggcaacagttggtcgtgcggggccggcccgggctctgggtggggaaggggagtctcgcgatcgttgagggggggggggtggaggaaggggggagagtgacggggggaggccatgacgtagggtgggtggacggaagtggggcagggttgagggttatttaaagaagggggggcctgagcgaaggggttggaagcggagtgattccccacccctgctccatctagctctttccagtgcagccactgccgccgcccaggagccctcgtcccctgccttgtccccctactcgttcccgctcccacggcatggagcaggacactgccgcagtggcagccaccgtggcagccgcggatgcgaccgccactatcgtggtcatagaggacgagcagcccgggccgtccacctctcagg

SEQ ID NO: 44452 - DNA, 2300 bp, Homo sapien
tttgtcaatttttctattaggtttctttcttatttataggagttcttatatatcctggataccaagtcattcattcatttaatcaatatttttctagcacctacttggctccaagaatggttctaggcactgagaatgcagctatgatcaaaacagacaaaatccttgcactcatggaactcaacattctagcgggtgaaggtaaatgaccaataatattgataaataaaacagaagtggtagatagtgatacataagcagggaagagggatagggaacatgtatgtgtggtgatggagaaggggattgttgaattacaattttcaataaagtggtctaggaaggcttcagtgagaaagtgacatttgagcaaagacctgaaggaggtgagagtgcatgcagagtgaacagcaagtgtaaaggccctgaggtaagagtgtgcctggcaagtcctagcaacaacaaggagtcagtgtgactaagcaaagctagttagggagagtggtgggaaatggtgggagatgtccgaaaggtgatgacagcttgtcttttttttttttttttttttttgagacaaggtcttgctctgtcacccaggctggagtgcagtggcgccatcacagctcactgtagatgtgacctcgctggctcaaggggatgctcccacctcagcctcctgagtagctgggactgcaagcacttgccaccacatccagctaatttttatagtttttgtagagacagggttttgccacgtttcccaggctggtcttgaactcctgggctcaagtgatcctaccacctcggcctcccaaagtgctgggattacaggcatgagccactgtgcaggccagtttgtcttttaacttgtttatattgtcttaaagtacatacattttgaaatttcatgtagctaaatgtcttattctcattccatattccaagctcatactcaatttttttttctgaaagttataaagttttgcttttcacatttagatctttaatccacctggaactgatttttcttccatggtttgaggtaggggtctaatttttataattttccatatggataagcagtagtcctagtaccacttagtggataatccattctttccccactgatttgaaatgtcccacacgctgcatatcaaccttccgtatatgtgtggtctgtttgaggggtttatattgtgtttcattgattgtctatctccacagcatacttttaattactacagatttacagtcactcttgatatctagtgtattatagattctggagcaaatgaataacacgatcgaaaaattactttgggaaaaatatttttatggctgtcaacagagtaaacatgtcaaaggaaagagtaaacccaacaggatttatttaaagaaaagtgcaataacccagataggctatcacaagggcttacaataaagttatggcagtgtgaatggagagaaaataaggaatctaaaagtaattccacgtaaaatattaacagggtgtgttgactgattggatatagagatgaggagggggaagacgatatatggctttccagtgaaatgataatgagttagttttgtgacgcagtgatgtgttaacaatggactctattaggtaagaggtctgggccagggatatatatttggacattgtctagttagaggtgaactggaggggacgcagaggaggagcaaaggtctgggctttggggaattctccgatttagggcgtggaagaaagaagaggaaaggaaatggtaggataaccaacacgggacattataaccttaagaaatatatatatatatatatatgtatttttttactgaatgatgtgggtcgtattgacacaacaggtttgagatctcccataggtatgactgtgttttgtttctgtggccttcaaagtcctcagaacaattttgatgtcacaggtggcatttaaaacccattccttgctggacctggtagagacgcccccagtccgtcaggtctctcgctgcagttccgcagtttgaccgcaggggacggaatctgcggcggcctggaaaactggcgggggcgcgaggcgccgctctctcttgggtcagattctcagctcccagctccccgctcccggctcccggcgcccggcgcccggcgcggagctgttcctcaaacgacacgcagccgaggtgggtgggtgtggggacgcgggagccagtgtcgtcggatcggcccgcagtccgctgtcctgctgagcccggaggccgcctggatggagccgccgctcccggtcggagcccagc

SEQ ID NO: 44453 - DNA, 2300 bp, Homo sapien
ctcagtgatcagggtgagccttgtggggaccccagaactcaaggcagaggctgaagcagctgcagtggggagcttagtgaaggtctttccttcctttccctctccagccccagccccctcacagatggcgccaagagggtagctctatgacagtcagacagaagcagcccccttgttccatccatacttactgctccaaagtgctaagataattcttcttttaattctcataggttatgaatttaagggataagttggcacggaagtgtggctagttaaccaaatgacccaagtcaacagcggggtcctcatgggcctggcaatttttcttggggaaagagggaaggagggtgcaggcttggagaatatgtgtttatgtgtgtgtgtgtggagggggtgggtatgtctgggtgtgagtggggagaactgcaggctcagaagcctgggggaagagggccctaaggccaaacccacccacttttggcccaagaggaggctgaacacttggaaattgtgtgcaagcagaggaggactcacaaaaaccaaggagccaaggaaggaacagagcgtggggatgttggaggcagaggcagaggggaagggggagctgccaggggtatgattggggtgtgagcagccaatgggaggctctatggaaactgtgagcaagtggtgggaattcctgggtagatggcaatggggctcgagggacagggatctagatgcaggcaaatcagatggtgtgcagggggagagagactgttattcattatctctggcctcagatgctgtatctgcacaggcctgtactggacattgcacaagtaccctgcctggctgcctcttccccagcaccatctcatctccacacactgcctgccaccaccagccaggcttgtcttgggggtggcagctcagcttccctgcatggactgcaggcttcacgagagtcggcctgcatgccttttccctcactgcacccaaggataccctgcaccacttggattccattgtcagggctcagtctggtgtcaggaggcctctactctaagcctcctgacagatgtggacagatgtaaagaggagccccagagtgcagaatagaagccagctgggattgaaatggaaggaatttacatgagacacaggatgcagggtgtgatctgggaatttcaggaggtagggcattggtggggaggtaccaactgcaacagcccacccccctcctggtgcacagacatgctgctgaaggtgaccattgtttcatttattcattctcaaatattcatgcaatatttattggtctctaaatctggtctcaggtctctaaatctggtcacagcatgaggcaggctgagtcagagacctctcccccttaacccgcctggcccagccccatccactgggaggacttggcgccctagagatgcctaaccaccgatgagacacccaggggcgagatatgagctccctagtactcacaagtgggtcatcctgcatatcaaaggatgtaggagtacaatgacgtgatgttcgggatttgctttaaaatactgcagtcaaggaaaatagaaaagggataactaaagcatatgtgactccatctggataactgttgaatctgggtgatgggtccatggcggtgggagggtcattgtaatgtcatatgtctgaaatgtttgaagtgtaccagttgcaggggtgccgtggtgattactgcctcctgccccccagccaagtacaggcgtgacaacccaaagtgcacaccccccaatgacgttccaaagaaagaacccacttgtgcctgtcagaaacatgatataactgtcaaaaggacagaaagtcagctacatcaatggcaagatgtgagtagtaggttccgtttgtcccaggacagtgcagaaatggcaaattttccctcaatatgaaaaaaagaaacaaagaaaatctatgagaagtgccaccacatggacagaccacccctcccgcgggcctgtggtctgcagcccctgcccgtttccaacaaccttcctcactaacaggctttctccttcctgcagggtccctgatgccgcttcccgatgggaatgggctggaagacggcaatgtccgccacctggtgcagcccagagggtcaaggaatgggccagggccctggcagggaggtcggaggaaattccgccgccagcggccccgcctctcccataagggacccatgcctttctgaagcaggtacttgagcctctgttcagtggacagtgctaaagcggagggagaaggacagcctagaagccgggtga

SEQ ID NO: 44454 - DNA, 2300 bp, Homo sapien
gatggcaaggccctacagcaaatgagggtggagactagaagccaggtgtttctcctcctggttagaaaatgctttccatccaggcgtggtggctaacgcctgtaatcccaacactttgggaggccgaggcgggtggatcatctgaggtcaggagttcgagaccagcctgaccaacctggtgaaaccccgtctctactaaaaatacaaaattagtcgggcatggtggcgcatgcctgtaatcccagctactcaggaggctgaggcaggagaatcgcttgaacctgggaggcggaggttgcagtgagctgagatagggtattgcactccagcttgagcgacagagcaaaactcggtctcaaaaaaaaaaaaaaaaaaaagaagaaagaaagaaaaaagaaaaaaagaaaaagaaaagagaaagaaagcaaactctttccaggggaacagtgaagggagaatggtctcctgctacccatgtctgctactcatatcctgggtctcaaggatgaagaggggtgccatgcttcacatgctttttttttttacttgagtgtggttaatgggccataggctattaatgagaaccttatcttattcccttcctgctacctgaatttaggcagtaaagatgtttttgaaaatttcatttatatattcaaaattatgtattgagtaccagtcatgtcgcaggtactgttctaggtctggggacacagctgtgaacaaagcaaagatccctcccttgtggaggtaacccttctggtggagagagactgataataaatacattgtgtatatataggatttttgcaacatttcaaagatattttaaatatgccatggtctctcatgtcttttatggcacacacgcaccctgtccaatgtatcttttgtgtaaatctggacttaacacttcaagcaaactgcctggcttgctgaaaggtggagacacctttcgattcagtcttttaatatgtgttgagtgccacctatgtgcagagcaagatattggggactttggagagatccagaagagtgagaagacagtatcctaccttagggggttcccagtccaatgagggaagcagccccatgccttgggagctcccaagctatagaagcagctaacaatcgagtctggaaaggcaaacaacttcaggacccgcttctaaagcggaatcgcaagtacacgcaaaatgaatccagccttgactgtgtggagttgggtaaaccacctgcctcttacgttgatggggaactagaatgaggacagctccagggaacaagaaagggtagaccataggagctgtcccatgtcccaacagtggggaggagctgatgggcggcccctgctggattagtgttatcctgagaaggcttctggatgcgatgggatttgaggtgctgctgcaaagaatgaattgctcacggaagggtggggtgggggcattccaggtagagggtgcctcctgggggatgcagggaacatgaggggcctgggcaattaatcaagccttgggcacaagcctaggcagtcacccccaattcaaagccagttgaaaatgcagaggagagaggagggccagtgtttggttgtcttgaccaaacccttgaagctggccagcggcaagggcaaggaccagggtcagaggtagagggcgtgagtgaaggcaacccagactgagtccttccctaagcgcccaggtttcctgacagctgttaaggaagcaaggtgagaaagggttaagtgtgcccctccaccgccccaaatgcttcctgtgtttgaaatccttcaggtctctgcaaaccctctggcccccggccaggcgggcattgtccggggagcggttgtaggttgtcagagaggccgcgcagcctttgttgtggggccacctcggggttccctctcgcgctcacgctcgggctggggctgcagagtgcgtgcctggaggggggcggtgcgggaggctcgctccctctccctcttcctgccccccctctagccctcccgatgaccacatgaccaagtgggctcgcggccaagccacaagctacaaaatgcagcccctggagtgagcggggagcattctctctggcagccggggtcacgggcagttgcagccgcggccgagcagccagccgctaagaaagagctcgccgctgccgctcccggagccgccgaggccagcttcgcggcgctgccccgcggcgggagaggaggctgcagaagagcggaggcggccagcgggagcggcggggctcagcgcgcacactcagcggccggggagcctcccgagctc

SEQ ID NO: 44455 - DNA, 2300 bp, Homo sapien
ggagagaaagaacaaagtacagatgagactggctttatttagttctagtatgtgaattaacaaacatttgtagaacatttactcttgtctctgcgaggcatgttctgagagcatcaccaacattagcccattgaatcctcataacaaccctaagaagctagtactattattatgccaactcacaggtgaggacactggggactcagggagataaagtcacttgcccaagatcacacagctagtgggtgccagagctgggattgaaactcaggctgattggctcccaagtcagtgtttcaaggctcagttcactgacagaaagacaggaccatgtttgtcctcaaaggctatcttcaggggtcttcccctgcaaaatcccatcagctctacctgcttgcttgcccttcaggatggctactgcagcaaacagaggaggcaggagtctttgagggggcattttccagtgctctggtctctgggaataatttcattaccagtcctggaaggggtgggagagaggagcctggggaaaaggctgcgggagcttcagcagttattgaatgacagcattctcatgttctccttgtccctggtctgtcctctgaggctgtgggctcctgccctctgcttttattcctgagaatgaagttcactgggccacctcactcattttgactctgccccttcagagactcccatgaaggtccgttttccctcttcaaaatggcctattttgtcattcttgaatggatggttgaaagttgctttacacttgatgtggacataagcagactgtaaatccattaaaaatagaaacaaaaggaatggtggccaggcatggtgacacgcacctgtggtctcagctactcagaaggctgaggctggagaatcacttgagcccgggaggctgaggttgcagtgaaccgagaacatgccactgcactccaccctgggcaacagaataagaccctgtttcaaaaataaaaatagaaacaaaaggaatgggcagtttgcctctggggcctccaggctaggtgagcatccatccccattgggtctgtttgtctctctaaagcattcctctctgggaaatcaccttcctcgaacccaaagagcaagggttctgtagagcatttactaggagctgccttgaagctgccctctgattcagctgggcgtgaagacaaggcaggcctcagcttctccatttccctcattgggagttgtgttgtttacgagtgactcacacttcagggtaaccaaatccctgttctagaagctacagcagaaacagcatttccagttcaccaaattagtcttctcagagcgcccaaactcccctttctgtgtcttcttccctattcagtggcatcccccaaaccctccagataggggcatctttgggctttcatttcctcccaggtgtgagtggctctaacagcctcggttccccagagtgcaggttcagaaaatgcaggggaatgggactccccagatcccaagggaagagctggcatcacttcttcagagtgggcactcctggggggactcatcccagctcaagaaagtaactctccagtcacaaccaactttcccaaggggtacagtgggacttgccaagcactacaagaagagaggacactggcttttccagtcagcttggaggaagagagggaggaaaaaaggagggggaggaagagcaaaaaggaggaggaggaggaaatggacaaggaggaaaaaaaaaaaaaggaggaggatgaggagggaaaaggaggaagaagaagaggaagtggaggagcccagaaaaggaggggaaggaggaaaaaggaggaggagaaggaaaacgaggaggaagaagaggtggggaggaaaaggagcagcagcaggaggcaaatctccatccccacagcaaaagcagtgctggagccagagcccagagtgtgggagctaatgggaatcagcttgctggagggaaggggaccgaattaaggaatggctggggctctgccgctgagagggggctgggaaaagcaggctgattgagaccagctgttgtgcctctgtctctgagatctttggactctgcccaggatagcctcacaccctatcctacacgactaggaacttgcacagtccgcctcgggcagcccaaagctcctctgcccaccctggctcccagagccctccaaaacaaaagaccagagaagcactctccacccagcagccagacgcctccttcttgacgccagcccccaccctctgtctgctcgagcccaggaaaggcctgaaggaagaggccg

SEQ ID NO: 44456 - DNA, 2300 bp, Homo sapien
cagagggcataaagcagaatcggagaggaagtcacgagaacatcttgggaacaggggtggacaagcctagtatttcacaagtaccacagaattgaaagccttaaaaatgtgcatacctttgaccccagcaattcctcttctggatatttcccctacagaaaaaaaactatggatgtgaatatttaccataagtatgttcaatgaataatttaaaaatttaagccaacccaagttcatcagcaagggcttggtgaaataagcacggcacatccacacaatgggatgttccacagccgttataaattacgtagttgaagactatttcatagcatgagacaatcttgatactgtgttcagctggacgtagtggctcacgcctgtaatcccagcactttgggaggatgaggcaaagaggtcacttgagaccaggagttcaagaccagcctgggcaacatggtgaaaccctgtctctacaaaaaatacaaaaattaaccagggtggtggtacgcacctatagtcccagctacttgggaggcagaggcacaagaattgcttgaactcaggaggtggaggttgcagtgagccgagatcacgccactgcactccagcctgggagacagagtgagagactccatctcgaaaaaaaaacaaaaaagatactgtgtttagtgtgaaaagcagacaccaatagtgtgaattatgaccttttttaattaaaaaattttaaacagctttattgaggtataatggagctacaataaactgcacatatttgaagtatacaatttgatacgttttgacatgtgtattcccccatgaaatcatcaccacagtcaagatagtgaacatattcatcactcctaaaagcttcctgttaccctgtgtgatgtctcccttcccttctctcccctccccttctccccaaaccaattatctgttttctgagcagtatgatttttgtaaaaagaaaaaaaatgtttatagacagagagtagatagatgcttaaaacagtgtagaggacaatgatgggaaattttgaaattttttttgtttatgtgtttgtgaaattgtatgacaaatacaagttgcttttgtaataccaagaagttattaaagttattaaaatctgccacagacaacccacaaattgaatatactgcataggtgtttgataaatgcctgttggatacttgctagaggtgtggagttggctgtaagtgcttttcagctgtggtggtgataaatatactcatgatggctgaggggtactgactggaggggtgactgctctagtgatgatggctttaggtgtactgatggctgtaggagtgatggctgcagggctgatggctgcacggatgtgatgatggttgtaggagagatgactgtagggacgatggttataggggtgagagggtcatgagtgcggttggctgtaatgtccagaagggtgacagctgtaaggatgatggctggaagggtgatagcagcaatggtgatgactgtagaggtgatggctgaaggatgtcaactgtagaggtgattaccatagtgacaatggctataggtgtgctgatggcagcggggatggctgcaggcctgatggctgtaggggtgatggctgtatggtgatggctattgataggagtgatggtagcagtggtgatggtcacaggggtgatggtagtggtagtgatggcagtgacgaccttgaagacgtgagttgaccgggagcattgatccaacaggcagccagatggtccaacttctggtttctggattctggtcagtgagataaagggcttgggtacgccatataatgtcgagctgattgtccacctctaggaagatggagcagaaggactgatgatgatcgacatgagacaacaaggtagggactttctctgactgttcaacccaagagccgtctgcatcagaatctctggagactgaagcttggacttccttcctccctaggggccggcaggggctgcgattgctgtaagagtaggtcacgtggcagggcttcctgtatgctgctgctgccgggtgtccatggcccgcacccccaagctgccactgcagcagtcagagtggcagctgaaggctcggttcatgccgtgcccccgggcagttctggtgaggctaagcaagaggcctctgcatcttgacacctaggagagcagggacggagtctcccagggtggaggaccatgctgcgccgcaagccctccaatgccagtgagaaggagcccactcagaagaaaaaggtgaggagcattttgggaactcacatctt

SEQ ID NO: 44457 - DNA, 2300 bp, Homo sapien
cggtagttctctagcaggtagcaagaggataggctttgggaagaagaatatgtggtgaggagaagagaaagttgactcacgtcttcattggttgtctggttgagagccacgaggaaagtatgaaatccagtcagtcccacgacggaccagagtgtaaagaagcaaatgaggacttctagaacagtgaggtgtggttaaggagtattgaagaactcaacatcaggagacttgatgcctccgcccatattcagagcaccagtcagaccatctttacctcctggaacgtatatcacaaaaagccatgtttccatatataacaatagatgaattctgaacttactggatagatcccttatgaaagaatttctagcgtatctagggtatttaagggtgtgcctatttacccatcattggctcttggaaggggatgcatgggaggggccaaagctaaacaatgttggccatcactgccaatggaaattctgtcaaaaaacaaaattcatgtaatcccggcactttgggaggccaaggtgggcggatcacaaggtcaggagttcgagaacagcctggccaacatggtgaaacccccgtctctattaaaaatacaaaaaattagctgggcgtggtggcgggcatctgtagtccaagctactcgggaggctgaggcaggagaatcatttgaacccaggaggcgagctggggcaacagtacaagactctgtctcaaaaaaagaaaattcataaatgaagaactggtgggggaaaaaaaagaggatgtgatttatagaaatctcatctgaaccccctttgcagaaatgcagccactgtcctgagcagggggtgaaggaaagacctcccttttagtcccggtcatcttccattctggttgctaccactaagactatatttttttaaattattttagaccttggcactctctgatatctgaaaaactagatagtgggagaactgtggggaaaaagcatgctggaaagtagcttaagaaggcttcacagggacatactgccagcggaggatatgttccaggagtttctttcaatgtctccaagaagccaattttcaaagattctgtgaaattggatggaagagtagagagaaaaattagtgacttcagtcaaaactacacactatcctagtgcctactcacttccttccctccctctcccgtgttacacactggcaagagctaagctctcactcgggcaagggtgaagagcctcatctcctagctggtagtctcatgactaaagagttcacatttccagtgcaggaccaggccctggactagacaggcaggcagaagagcagcaggctcccttcccttttccctagcccccaactatggacatgttagggggatattaacagataaaagaaatcagaaatacccaagaaaaatcctctctccttgccaatacgtgtccctcccttgttcaaaatccagctcagaactcttctctttccagaaagctgtcttaagaccactcccttaactccacatcacatctgctcttagattggcgtgtgtgtgggtgtgtatgtttgtgcacatgtacatatgtgggtgtgctttctatctcccaaactagaccatgagctacaaaaagacatttctcaggcaaaacccttacccttttctaccccttagcacaaggcaagttttacaaggcagaagaagagaggatgctccgagacaaaatacatccccagcctttgggattacctcagaaatgccccagtactctggatacagaccagtaattatggccccagtgcccagcagttggccaaagagaaggccaacacactgattaatactcattgatgtgcactgaggtttgcaaccctgctcaagagcagataactgtgctcatttctaacctgtcctaaagtacctttcacaatggtaccaccaggaaacccaacaaccctctaagctgcccttaactcttcccccacccagccccactccaacaacggacactgccctgtatactcactgagggccacatagacgatgttgaaggcgaagacatagattgtgaggagggagagagaaaggatgaagaggtagaagtagcggtagttcctctttccaacacaattccccacccaggggcagtgatggtcgaagcgctctgtgggagaaagagagagtccaaagccaaaagcctccagaacaaaaatcaaccccaccatccctataatacctaattcaaagacctccaggatcattgtctatttcagttgtaaaaaatatagggttttttttttttttta

SEQ ID NO: 44458 - DNA, 2300 bp, Homo sapien
aaaaaaaaaaaaaagaagaaggtctatacccagtaatgggattgctgggtcaaatggtatttctggttctagatctttgaggaattgccacatcttccacaatggttgaactaatttacattcccaacaacaatagcgttcctatttccccgcaaccttgccagcatctgttgttttttgactttttaataatcgccattctgactggcatgagatggtatctcagtgtggtttttgatttgcatttctctaatgatcagtgatgttgagcattttttcatatatttgttggctgcatgaatgtcttctttcgagaacaatgagaacacatggacacagggaggggaacaacacacaccggggcctgttgaggggtggggaagggagggagagcattaggaaaaatagctaatgcatgctgggcttaatacctaggtgatggctttataggtgcagcaaaccaccatggcacacatttacctatgtaacaaacctgcacatcctgcacatgtaccccagaacttaagtaaaataaaaaggtctgatgtgaggtagtatttcctttccttattaatactcttaactataaggaactcatacaaatcaatttttttaaaaagcactgatattccaggagaaatataaacagttcataacaatataattggctagttatcatgactaatagtcaaataaatgatttcaggatgcttttgttttgagataggatctcactctttttcccaggctggagggcagtggcacgatcacagctcactgcagactcaacctcctgggttcaggtgatcctcccacctcagcctcccaagttgctgagactacaggcatgcactaccatgcctggctatttttttttttttttttgtattttttgtagagatgggttttccccatgttgcccaggctggtctcaaactcctgggctcaagcagcccacctgctgcagcttcccaaagtgttgtgattacaggtgtgagccaatacccccagcccaatatgcttttttaaatctagaaaattagcaaggaaaacctgatgtttattcttccactagtaagagtgtaaattggaacaaactttttggaaggcaatctaataagattaatcgaaagccttaaaacatctataccttttggtgccagtggttcactttctagggagtctgtcccatgaaatcagagatgtgggaaaatatttcggggtggaaatgtttaactcaggattattatgacaattaaaagttgaaaagaacctaattgtctaccaatagatgagtagccaaataaattatagagccgggtgtggtggctcactcctgtaatcccagcactttgggaggccgaggtgggcagatcacttgaggccagaagtttgagaccggcctgagcaacatggtgaaacctcgtctctactaaaacatacaaaaattagctggacgtggtgacatgtgcctgtaatcccagctgagaccctggctgaggcatgagaataaaaaacccatgaggtggaggctgcattgaaccgagattgtgccactgcactccagcctgggcgacagagtaagactctgtctctaaataaataaataaataaataataggacattcgtacattagactgatggaaagagttcataccagaaagctaaatgacaaaatgggagataggctacatttacagtgtgaagtcagttacctatttttaaaaaatctaatgatgtataaagaaatatgcaaggaaatacaggaaatatgccacaatttttatagtttattatctataggttgtgggattatgagtgattttgtttccttcattttttcatatgccatcctccactactgtgatttcttcatttttccttttatttttttcaagttttctacaatgagcatgtattacttgtattatcagaaaaaatgtgatttaaaatactgtaaaaaatatatatctgtataaccattcttctctatacctttcttccctttcctgaaaagatgtagcttcctcagcaggagatagaccatttttacagccttattttttcaccagtacacagctcacttttctttcaaattgatatattttattctttttttttttttttttttttttttgagacggaggctgtctctctctcccagtctggagtgcagtggcgcgatctcagctcactgcaagctccgcctcctgggttcacgccattcttctgcctcagcctcccgagtagctgggactacaggctcccgccaccacgcctggctaatttttttgtattt

SEQ ID NO: 44459 - DNA, 2300 bp, Homo sapien
ctgataagtggaggtgatttttgcttctgaattccctttttggttaatctgtaccagtgaaaaggagtagtggaaaatagggtaatccacaagctagtgatatgtaagaaccttaattaccctgaactcagctgccagatccttcagttctccagttttcccccaacccttggcttttaggagaaggaagtaaatcattaaaaaagcaacttaagatgaaggattttgttaaaaataagcaagcaagcaaacacaaaagtcacgaaaatcatccttcaggttcagtacatatgtgcaccttcatcaaaaactgcttagtctaatataaaacttggcttgtgtccccccatgaagttgtgtgtgtggcagggagctaggggaagacctcatgggggttgttccgaaactgcagagaatatataaccaggagttaaacgtttgctttgaatggccagtagcttgcttacttcccatgctgatgaggtaagcgtttttcttagcttactttctctgctctctctctgctccttgctcatccacttatagtctgcctccaagtgaaaactctgttttcaaggagaaatgtgcctcaggaggaggaggataaaaataggtcagcgataactctccttacatattcctatttattttgtttgaaattcagttcagatcaacaagtatttattgatagcttctttgttcccttacttgtattaaagctctgggagatacagaatcatggtgttaatgttaatagctaacattttacttagtgtttagtatttactgtgtgtcaagtgcagttctaagcactttatttatactagtgcgtttgatccacacaatgacctcatcaagcactgttattatcctcattttatcgataaggagactgaagttaactaagtcacccaactaggagctggtagagccagaattcaaaccggagcattcccagtccaataagactaggtccttgctcttaggaagtccagttgagggagatgccatcaacatactgagaaatagctaggaaataatgcaaggctctggaagtgaggaccacagggagtagagaagagagagattagtgcagcttagcataagccttttggaggaggtaagaattctctaagtctcagattcttcatctatcaaatgggtatagtaggatctatttcatagatttagtgtgagaattggatgggataatgtagatgaagagcttagtgcagtgcctgtcttatggagagccctcaataaattatagttgcaatgatgacaatgatattgatgtctctggcacctgaaagatgagtagagttgggatattcagagaggaagagaaatagcttgccagatgcattatgaggaaagaggggagtgaacatgatgttgggaaggggtactaaggataaacgattttcttattttcttgctgatggtcattagtcacttattagctgagctaattgaggagaccagaggaatggatgttgcagagtcagtcaacagccctgaaggttttcactggtcttgaagcatgctgagatactctctgtctgacactgtgaacctgctttctggttggtcctcatcttttctccctcttcatcaagctcagcttgaatgccagatcagtggttatgagaagccctggacattcccagagtgagatcaacctgtgttgcttagaaatccaggttcagttgcttccctattcttagcaggtgtgaacctttcctgaggtagaggaaatgtagctcccagtgggttgataggatagattggacttgggggtaagagagtgtcctcaagcgtgtcttctgtatgttataggtggcagcagtcaattatttgttgagctcctactatgggtaaagccatatgttaggggtttggggtaattcaagagaagaaacatggtccctgcccttgaggtgctgctgattctgttgtgggggccagattgacatactggtaacaattggagatcaatatagggtaggtatcattaaatgctgaattgcctgctttcttcaggtgccgctacctggctgttcagctgtctcctgccatccctgtatttgctgccatgctcttccttttctccatggctacactgttgaggaccagcttcagtgaccctggagtgattcctcgggcgctaccagatgaagcagctttcatagaaatggagataggtgagtcttccaaccagctggcaagctgctgtgtagtgggtggccctaatcagtaagagaatggaatcataatagtagttgcagattaataatcac

SEQ ID NO: 44460 - DNA, 2300 bp, Homo sapien
agctttggcagtctcttctgtactaattccaaataccaaatctctaaaactttgaaatttttatcacgcttaggaaaacctaggctggtaatgtaggcattctcctccaatcttcaaccttttctcttatctcctcttacacttggaaaggagatgccaccttcaaccttttctcatatttcctcttatatttggaaggcaggagccatactggtgaaaacagacctagtgtcttttaaagtcaccctatagtataatactgtggttctcaattgtttccccccttcaatctcaaacttttttttttttttttttaagacagggtctctctctgtcgcccaggctggagtgcagtggcatgatcttggctcactgcaaccttcacctcctgggttcaagtgatcctcctgcctcagcctccctggtagctgggactacaggcgagtcccaccgctccccgctaacttttgtctttctagtagagacgggttttgccatgttggccaggctggtcttgaactcctgacctcaggtgatccacctgcctcggcctcccaaagtgctgggattacaggcgtgagccaccgcgcccagcccaatctcaaacttttaatgcatgcaactcactcggatcagtagcagtggctcatggtggcagtaatgcagagctgggtggcagaaggaaaaaatcaatctggttggtgggtgggaattctgccttggattctccccttaatcatcataagctttccaaaccgaataaaaatttacaacctttttggcaatctttacttcattacctacctggaagaatttatgtcctcagtggagtttctttaactccattaatgtcaattagttgttttaggtgctgcaaaatgataatacgttcttggggacatttatcctttacaacatgctttttatgcttgtttgtgtgttttgatttgaaagacttagagatgcaggctagggtgactgggacagatatggggtccctggctactgaatgagacttgggaggcagatgacttgtttttatgccgataaagagtaaaatctcaagttgcggttgattttaaaatgcaagcagggctggagaggcccatggcagacctagtttggggtgagcacccggatctgtgagctagtgttgcttcagcatctcactgtgtgtgtgtgtgcgcgcgcgtgtgtgtgtgtgcgcgcgcgcgcgcgtgtgtgtaggctggttccaccctttgctgtcccatcggcactacccttaacctccgtctctgcgtaactatattaatagaaggcaacacttcacatactggcgctcagaccccaaagagaggctggcagtggcttggcaggtgggcatgcagcagggagatgggtggaggagtgggcggaggcatcgtcgagtggcgttaggcaaaaccaatggcagttcgggataggggcggccggggcggaggcgccgaggccgatcggccaatagagggcgagcaactactggagcgacctggtgacgtgaggagcgttccatttggccagtggtgggcggttgccacagctggtttagggccccgaccactggggccccttgtcaggaggagacagcctcccggcccggggaggacaagtcgctgccacctttggctgccgacgtgattccctgggacggtccgtttcctgccgtcagctgccggccgagttgggtctccgtggttcaggtaacgaggggtgggggcgggggtctcctgggctcggctgcagggtgggctgcctccccttccgcggcgcctggaggcggggacgtcggcaccgcccttctcaactcggcagccgccgagcccctggcccggggtgactacacgtggcggggcgtgtgtgagtgtgtacgagcgtgtggctgcgtgtgcgtgtggatgtggcgcgcgtcccaacctgcctggggcggtggtccgcggcgtggcggagtcagggcgggcctcgagaggccgcgcccgcggctcggccccggactccggcctccggcctccggccccccgctggggagccggtcgctgcttcccgacggattttgatctttgttcttccaggccggctcccccttcctggtctcccttctcccgctgggccggtttatcgggaggagattgtcttccaggttagttttacacaaaggacgggttctctgcacctctgggcccccctccccttccccgaaccttctaccttctcgtttccctgctccgctcctaggctgtttttggacctttgccctctccagcccgcgagttggctgtttc

SEQ ID NO: 44461 - DNA, 2300 bp, Homo sapien
gaatgtgtcaccatgacacatcgattccaggactcctcaggcttcacctgcacctgagctatggacaaaatatgtttgagtgctacagaggcttatttttcactgctccatagtcagaaggatggcagctggggtgaccatactattcctaagggcatctgatatacataggcttggaaatccacagggctgatgaggtttagggaagttcttctccctcccataccaagtgtgtgcaataccagcaccctccagaattcaaagcgggagaattggaggcaatgatactgatcgtacacttcatgaggaataaactgttgatcataatcagcatgagtgctaaggaacaatggaagctttataaagacaaaccttcctttgcaagttaattacaacacatctcagaattacctagtgttttttaaatcctttaagaattttgaagggtgccatgaaagtgtcaaatgtaattattatgtagctttttgtttcatattgtgtgggacacatatactgtaaaggaaaaatagttcttgaccatgtatgtggtccttcaactaacatacaactgccttaggaagagctttggcagtctcttctgtactaattccaaataccaaatctctaaaactttgaaatttttatcacgcttaggaaaacctaggctggtaatgtaggcattctcctccaatcttcaaccttttctcttatctcctcttacacttggaaaggagatgccaccttcaaccttttctcatatttcctcttatatttggaaggcaggagccatactggtgaaaacagacctagtgtcttttaaagtcaccctatagtataatactgtggttctcaattgtttccccccttcaatctcaaacttttttttttttttttttaagacagggtctctctctgtcgcccaggctggagtgcagtggcatgatcttggctcactgcaaccttcacctcctgggttcaagtgatcctcctgcctcagcctccctggtagctgggactacaggcgagtcccaccgctccccgctaacttttgtctttctagtagagacgggttttgccatgttggccaggctggtcttgaactcctgacctcaggtgatccacctgcctcggcctcccaaagtgctgggattacaggcgtgagccaccgcgcccagcccaatctcaaacttttaatgcatgcaactcactcggatcagtagcagtggctcatggtggcagtaatgcagagctgggtggcagaaggaaaaaatcaatctggttggtgggtgggaattctgccttggattctccccttaatcatcataagctttccaaaccgaataaaaatttacaacctttttggcaatctttacttcattacctacctggaagaatttatgtcctcagtggagtttctttaactccattaatgtcaattagttgttttaggtgctgcaaaatgataatacgttcttggggacatttatcctttacaacatgctttttatgcttgtttgtgtgttttgatttgaaagacttagagatgcaggctagggtgactgggacagatatggggtccctggctactgaatgagacttgggaggcagatgacttgtttttatgccgataaagagtaaaatctcaagttgcggttgattttaaaatgcaagcagggctggagaggcccatggcagacctagtttggggtgagcacccggatctgtgagctagtgttgcttcagcatctcactgtgtgtgtgtgtgcgcgcgcgtgtgtgtgtgtgcgcgcgcgcgcgcgtgtgtgtaggctggttccaccctttgctgtcccatcggcactacccttaacctccgtctctgcgtaactatattaatagaaggcaacacttcacatactggcgctcagaccccaaagagaggctggcagtggcttggcaggtgggcatgcagcagggagatgggtggaggagtgggcggaggcatcgtcgagtggcgttaggcaaaaccaatggcagttcgggataggggcggccggggcggaggcgccgaggccgatcggccaatagagggcgagcaactactggagcgacctggtgacgtgaggagcgttccatttggccagtggtgggcggttgccacagctggtttagggccccgaccactggggccccttgtcaggaggagacagcctcccggcccggggaggacaagtcgctgccacctttggctgccgacgtgattccctgggacggtccgtttcctgccgtcagctgccggccgagttgggtctccgtggttc

SEQ ID NO: 44462 - DNA, 2300 bp, Homo sapien
tggctcacgcccataatcccagcactttgggaggccatggtgggaggatcacctgaggccaggagttcgagaccagcctggccaacatggcgaaactccatctctgctaaaaatacaaaaattaggctgggcgcggtggctcacgcctgtaatcccagcactttgggaggccgaggagggcggatcacgaggtcaggagatcgagaccatcctggctaacacggtgaaaccccatctctactaaaaatacaaaaaattagccgggcatggtggcatgtgcctgtagtccagctactcgggaggctgaggcaggagaatcacttgaaacagggaggcagaggttgcagtgagctgagattgtgccactgcactccagcctgggtgacagagcgagactccgtctcaaaaaaaaaaaaaaaacaaaaattagccaggcgtggtggcgcatgcctgtaatcccagctacacgggaggctgaggcaggagaatcacttgaacccaggaggcggaggttacagtgagccaagatcgcgccactgcactccagccttggcaacaagagcgaaactccgtctcaaaaaaaagaaaagaaaagaaaagaaaagaaaagaaaagaaatcaacagttactaaatgccacacaaagttctgggaagccaaagactgagaggtatccgttttatttagcaactttgggtgtcgctgatcttgtccagagcaatttctgtggaataatggggcaaaagcaaaatgggaatggattacaagaatgaaaagaacgggccgggcgccgtggctcacgcctgtaatcctagcactttgggaggccgagacgggtggatcatgaggtcacgagatcgagaccatcctggctaacacggtgaaaccccgtctctacttaaaaaaaaaaaaaaaattagccgggtgtggtggcaggcgcctgtagtcccagctactcaggaagctgaggcaggtgaatggtgtgaacccgggaggcggagcttgcagtgagctgagatcgcaccactgcattccagcgtgggcgacggagtgagactccgtctcaaaaaaaaaaaatgaaaagaatgttcttgtctattatttttctacaatcattaattaatatatatatatattaggccgggcccggtggctcacacctgtaatctcagcactttgggaggccgaggcgggcagatcacttgaggccaggaattctagaccagcctggccaacgtggcaaaaccccgtctctactaaaaatgcaaatattagccgagcatggtggcgggtgcctgtaatcctagcgactcgggaggctgaggcaggagaatcgcttgaacccgggaggtggaggttgcagtgagctgagatcacgccattgcactccagcctgaacgacacagcaaggctctgtctcaaaaataaataaataaaattcttaaaagttgatgggagaaaaaaagttgtttaaaaaaatttttttaagttgatgggaggtgaggaagcgtagttactgatggccccttcttggataaaaaaaatcttttgactcaggaaatgaagaacaaagctgcaattacaagggatcaaaggcgatttttccttaaatggaaggaaacttgttatgttcaccatcggatctccggggcccggcacaatctggccacttaataggcattcaataaacccccgagctggcttgtggtcggcttgcaggacgccgtcgcacaaggacgggcgctgtagtctttccttctggattctgcagtgacgaatgaaggcgcgggctcagcccctgagagcgcagcaccgtcgccctaagctaacccaccttgggccacgtggaaaccaggggccaggaggacagacacccgcgcgccagagaaatacggggtgggtggagaaaggaatgccccacccgctgacagccgtttcatctcaggcctcccagttttctgcaggcccctccctacacggctcctgcttctctcacgcctcgtacggaacggaagtgacgtgtacgtcgcgagcgattgacggaaacagaaattgctttgcggcccgcacggaaattgctttccttcggcttccgttcttggtccatgtgagagaagctggctgctgaaatgactgcgaaccggcttgcagagaggtgaagggcaacgaggggaggggggattctgggtctcgttgggggccgggttccccagcttttgggaaatgggagccccccctttaacagatggcagtggttcccctgaagagctggccattcgttcctattttccgcgatccagc

SEQ ID NO: 44463 - DNA, 2300 bp, Homo sapien
cacgcctgtaatcccagcactttgggaggccgaggcgggcggatcacgaggtcaggagatcgagaccatcccggctaacacggtgaaaccctgtctctactaaaaatacaaaaaattagctgggcgtggtggcaggcatctgtagtcccagctactcgggaggctggggcaggagaatggcgtgaactcaggaggcggagcttgcagtgagccgagatcacgccactgcacttcagcctgggcgacagagcaagactccatctcaaagaaaaaagaaaaaaaaaaacatatattggtaacctgaacacagtgatccccctcagcagtattagagagtagcctcagcgtctccctgctgaagttgtcttatataagaatcaaataaggctttatttatacttctgacaacaagactggaacccccttctcttgctgtaacagccaatcctatccacttatgattccaattatagtgtcataagttagagaatcataggaatgtaaagagagaaagctgtaagagcatggcttaagactcagaatgttttgttgcttctttaaggcaagaactcccctggagcaggaaattttcaacctcctccataagaacaagcagccagtgacagaccctttactgacccctgtggaaaaggcctctctccgagccatgagcctagaagaggtaagtgtgtcataggcccttcagcacacccaggcatgccacgcttctcctagcatttgtcctctggcccaggtgtcactgtaagtctcatttgttgtaggcaaagatgcgacgagcagagcttcagagggctcgggctctgcagtcctactatgaggccaaggctcgaagagagaagaaaatcaaaagtaaaaagtaaggaggcccctgtgaactggccttgggttccacagaagaaagtcatgtggttcatcatgaattctttggagagaacctttgatgcagcaactagagtcatgcagatgaggtcccaaacaggagtgactagccttttgttccccccaaaccaacctcatacagttttgccaaaaagatgactattcagttactttctctgccttccaaggcatcacagagtggttctgcagaatcagctctgaattccagagctgttaaggccaatagggcttccttcctgcctttttgcctctttgaaacttgttcggccgggtgtggtggctatgcttgtaatcccagcactttgggaggccgaggtggatggaccacttgagctcaggagttcaagaccagcctgggcaacatggcaaaactggctgggcacggtggctcacacctgtaatcccagcactttgggaggctcaggcaggtggatcacttgaggtaaggaattcaagaccagcctggccaacatggcgaaaccccatctctactaaaagtacaaaaattagccaggcatggtaatgtgcacctatagtcccagctacttaggaggctgaggcgggaggatcgcttgagcccagcgggtggaggctgcagtgagccaagatcatgtcactgcactccagcctgagtgacagagtgagaccctgtctaaaaaaaaaaatgaaacttgttctacccctcccttgagttatagaggcaaaggagactctttgagctgcagaggtccaccctgaggactgtgggtaccaagaatcttgccagtcctgtcaggtcccaaactgactccctatagccaactagctctatgatgcccattccagccccctgcctagggaacccattgggtagtatgggcacttgtgcctatgacatccgtgcttcagctaaattgctaaactcttccctcctacccctacaggtatcacaaagtcgtgaagaaaggaaaggccaagaaagccctaaaagagtttgagcagctgcggaaggttaatccagctgcagcactagaagaactggaaaaaattgaaaaggccagaatgatggtgagactacctcttgccccacccccacccctttgaaccagctttccttggaaggcactaaagatgtaaatctcactctgtcctttctttctaggaaagaatgagccttaagcaccaaaacagtgggaaatgggccaagtcaaaggcaattatggccaaatatgacctggaggtaagagacccttggggtgagagaagatctggaattggaggatgctagcagaagcagagttggggaagagccatgaggatggatggaaaaccaggaatctaaaaaggcatcagaaaaatctctaaggcagaaaggaaaatgaccaggaacaaggtggaaa

SEQ ID NO: 44464 - DNA, 2300 bp, Homo sapien
ccctctgacttcctcagcatggataaatatctaacaaataatatcaatatatctgcacataaagacttttttcgaattcctgctattcatttcaaattccgtttacaaagcactgaatcctccaggaactgctgggcacctcccctaataccctctaggctgaggcgatgcctttgaagtccctgtcatgggctcagggctggagctgctaagaaacaccctaagactgagagcaaatcggccggcagcttcagctccttcgcaagctgctagctgctagctgctctcctcggagtcaatgtaaagtcatgagagttcgaatgtggaccgcaagcttctcagcccttcagtcccagggatggcctgggatgtaaacacacacgacggtttattcctttggccaggcagagagtcgttagggtaaagggtaagggtcaagggagctcggattggtgactgaggagcccaaggaaagccggcagaagccgagtcctctagagctgggcttttggctctgaatcgtgcaggcttcccactttacacagacctttcatccccttcctccttcttcctcactcgggtctctcgccaccgacccctacccccccgcctccatccccagatgcctccacgcccaggtggtgttacccactgagggtggcccagggggtttgcagccgggggaggttgccaccaagggtgggccgccctggagacgagaggcaaggcggcgagccctggcattttcctttccccagcacctgtcccacttcggcgccggggctggggctgcgcccgcgggcggcctcggagcttgagcgccagaaccacgcactgaggtcgcccagggtggggaagtggggggccgggggaggggcggggcatccggcggggaggtctcccccaccgcatgcaagaccctttgcccccccacaacatacactgaggctaaaacggggatgagagtcacacagagcaggagcgaaatctttcgctctccgacccgaacggcgcgttgctcgaccccccccttcctggagccaggggctggccgaggaaggtggctccgttcttcccccgtggccagtgcggggtctgcggctgcccggcgaggttccggcttccccgggactggcagggggagccccgagaactgcaggcccgcccccccttcctcctcctccttcccctcctcccccacgtgtcctccctgagcccagcagcctgatcccagcaccccccgccacctccctcctcccgcttcgcccgcttccccggcggcgtggagaagagcaaagttgcgacagcggccgggggctctgcccaggtaaagggggcgccgtgaggcgggggtggtgggggaacggtgcggccctgcggcgggggcggggggaggataaagaaacttgcttcccgcggcccccaccccgcgtgggttccgatcttgcgtggaacgagcccgcgtggcgagtcgcggcaacactgccgggaccgaggccggcacctggacccggacccggaccgcgcgcttgggccggctcggcgggcgcaggcagcgggccaggccagcacccaggcaagggcggggtgggtggccgtacaccggaccgaatcggggactccggtggcgtgggcgcgggccgaaccccgaccgggccgagttgggtggcgaagtaggacgtggattcgggggcggggcgcggcgggagggggaaaccaggcctggccagactggcctgggcgtgggggcggggggcgagttcggggcacttgctgggctctggaccgagcggtagggcggggcggcgctaggggctgggccggacccgcagggagagggcgaggggagggagagccgggggtggagtaggggcgtggagttgtgagcggggtctggcctcggccgggggcgaaggtagatcggcggggccgcgagcggagggagggaggcccgcggcggcgcggcggcagcgaaggccagcttccgcggagtttgtgcccgggcttcccgggctctggccgcctcacgcgcacaaatggggctaggggactgagtggtaagcaactccgagtgttagacggtgatcgggcggcgattccgggaaaagcgaggaaagacacagtctgcgattgtgccgcaccccccacccacctcttagcatctggattctgctctcgtagtgggggccgcggaccctccccgccacagtccttttactctccagcactcccaccgccttcccccttcttcagccatctgactctcctaggggtatgtgtttttgggggtggacggcgac

SEQ ID NO: 44465 - DNA, 2300 bp, Homo sapien
gggccggctcggcgggcgcaggcagcgggccaggccagcacccaggcaagggcggggtgggtggccgtacaccggaccgaatcggggactccggtggcgtgggcgcgggccgaaccccgaccgggccgagttgggtggcgaagtaggacgtggattcgggggcggggcgcggcgggagggggaaaccaggcctggccagactggcctgggcgtgggggcggggggcgagttcggggcacttgctgggctctggaccgagcggtagggcggggcggcgctaggggctgggccggacccgcagggagagggcgaggggagggagagccgggggtggagtaggggcgtggagttgtgagcggggtctggcctcggccgggggcgaaggtagatcggcggggccgcgagcggagggagggaggcccgcggcggcgcggcggcagcgaaggccagcttccgcggagtttgtgcccgggcttcccgggctctggccgcctcacgcgcacaaatggggctaggggactgagtggtaagcaactccgagtgttagacggtgatcgggcggcgattccgggaaaagcgaggaaagacacagtctgcgattgtgccgcaccccccacccacctcttagcatctggattctgctctcgtagtgggggccgcggaccctccccgccacagtccttttactctccagcactcccaccgccttcccccttcttcagccatctgactctcctaggggtatgtgtttttgggggtggacggcgacgggggtgggggatactttccttcccgtggcggcaacctagttcgtatcttattcctacaaggtagcgtcgcttcgagtcgcatggacattggggtttagataatttaccccccacccaagcgatttaatggcttttaagcaaaaggcgaatacctggatttccatgggagggatgaggtttgaagattgggattcacccctagctcacttccactaccaacccctctttcttgtgagccacttccacgggtattcaaatctgggggggaggggggacgggagtattaatatgcttctctatttctacacagggtcggcgtggcgaaggacggctagccttggagggaaagtagccaccagtccaactcgggtcgcccccaccattatttcggtgagggggcaacgctaagaaggggatactggtgggtaggggcccagtataagggagggggctgggtagtcgtccccagaaggactccgtgtcttggcggggagagagagaggcgagccccggcttcaggggaggggttccggggagggagatgggggggtggcgacgacggtgggggggggagcgggaagaagggggagtcacgccctgcctgcaaggggagcctccctcaggcccctgggagaaggggactgaatgcgtctgttctccgctgcccggcagaggagatctggggtctcgagatttgcacactggatcggcaccagtggcctgagaaagtcaggtcggggcataaggtggagaacgttggaagaaagagagagaaccctttggccgcggctcactgaccctctcccttcctcaacctcccccttcgaggggcgtcgaggtggggggggacgtggggctcctgcagccccgcagattgagcgcctccgcctctcccaggagtctagctttttgcccggcttgctgcagccactgctgcctccctctccggaatccgctcggtcctctcagcgatcccctcctcctctcctcccctcccagtgtcaccggggctgcttggctctgcccccttcgccgccgcttgctccctgctttcgtccctccctctcttgctcgctccctcccttcgcctcctcctccccattcccccccacccgcgtaggccgcattctgggagttgtagtccggtggagcgggggttggcgccgcccgcggacccagccggactccacttcccgtcgagccctgcgaccggcacccactccaccaggcttcgctcgcacacagacacacacacacaccgctctccccctcactctttcgctcgccgcggctgctgccagtgtgtggctctgtctctcctccgctttgctgagccctcccttcttcctctcagttcctagagtccgaccgccgccgccgccgagagagaggagaaggaggtcggtggcgataaggggcggaggggggcatcagatcggggcagtattaggcgggtggcggttaagagggagtaagagggagcccgggtggcggcctgagcctccccgcggagccgacccgggaacaggt

SEQ ID NO: 44466 - DNA, 2300 bp, Homo sapien
cctggaatgcttttctcccaaatatccacgtggctactcctttacctcattccgatggtttaaatgtctcctttacagcaaggcctatcctgttcaccgtatttcagatagtagccctccccacctagactgtgcccttgccccttagtctgtgttgtattatctcctcctcctcctccttcttcttcttcttcttcttctttttttttttttttgagacagagtttcactcttgttgcccaggttggagtgcaatggcatggtatcagctcgccgcaacctctgcctcctgggttcaagcaattctcctgccttagcctcctgagtatctgggattacaggcatgtgctaccacggtggctaattttgtgtttttagtagagacagggtttctccatgttggtcaggctggtcttggactcccgaactcaggtgatccacctgcctcggcctcccaaagtgctgggattacaggcatgagccactgcacctggcctgttgtactatcttctaacatgccgtgacatagaactatttaacatgctatgacatagaagtattcaacatgtttattgtccatgtcatccccctgggatgtaagctccacacgggcaggcattttgttctgtttcgttaattgctgaatcctcagtacctaggatggtgctggctcatagtaggaatgcaataaattgtgatactgtgttgaaagtggacaatctctgaaaattgaaaaatggatacatgaaacaaatccctcgtacaactatatcttattgtgatttactttggaaagtggagaacagcattcaattctgatcactgtagggttctgttcagttgaacttcaatgaataaggattttagctaataagctaactcaagagcttaagggtctcaaggcaagctcattggataaaggtttttcttggtgcctcattttttctagaaggtaaattaactgtgccctgcttgtcaaagcgagagagggacattggctggtgaagagagtggtggaacatggagacaacagactgacaggaagggacaaggacagaaatgtgtggtttttttttttttttttttttgagacagagtcttgctctgtggcccaggctggagtgcgctggcatgatctcagctcactgcaacctctgcctcttgggttcaagcgattcttgtgcctcaacctcccgagtagctgggattacaggtgcacaccaccaccccaggctaatttttttatttttagtagaaacggggtttcaccatgttgtccaggctggtctcgagctcctgacctcaggtgatccacccgcctcggcctcccaaaatgttgggattacaggcgtgagccaccgcgccctgccgaaacacgtagttctggatggaacgttgttttctgtttgtttgcttgttggtggtcagcgtgcaaggagtactgcacctgatttggagggagcttgaaaccaggttagatacgtgtgttatttccaactcaaagtcaatggagtatttttgaaggacttacgaaaaaaagcatgtgcttcctctgaagagtgtaaattggctacgtcactcaaatacttcagtacccatggattagagagtagacgagaaaaaggtcaccagtagtgttttagtgcaccattcatatatgggtatgactctctaattgtagttggttaggctaaatgtgtgtagaaatatatactgtcatctcatttgtctgaaatagattgaatttcctctactcaagcatatctgtcttttaagataatttaaaactcactctaggtgattaacaatgtcctcatctccatcctgaaacctatggattcctagaaagctggtgctccctcttcccggtttagaccttaattttccatagcaggctggctgctttaacattctgatgctgtaattacctttattgaaacattgctgtgtaaaaggtgattgaagcagctgtccctgttacgagttttgattttctggaattcttttccccagggggagtggccacagcaggtcctatctggtggtgagtggctgtcatgatctctacagcaccgctctacagcggcgtgcacaactggaccagttctgaccggattcgcatgtgtggcatcaacgaggagaggtgaggaggccaggaaggtggccgctgctggcctccagtgagcagtacctcgtcaccagagggatagctgcatacaatagggcctggggagggaccctggggaggagaagactcttagttgtttctaattttcctgtggtgggatggggatggggct

SEQ ID NO: 44467 - DNA, 2300 bp, Homo sapien
tgatggcccctctcagcatcttctatgaaaagagagatcgaaatctggttgagcagttttaccatgggcccaggtgtcgagttgggaatttgattcactgtgccacaatgcccagctccttgcagagataagagagccctgggtgggggcaggggacaaatagtcctcaaatattgcccactgtttgaggattatttgttcaacttttcagagcagggatttgacatctcttgttgggagctgatggtggaaagaggtaaggcctgtgccactcgggaaagctggttcaactccaagctttggcacctcgtcattactggggctaatctcaggcacagacatttaactttctaccttggtcttattgccctatgtgacaggcagcctcaaagttggaaaagtcattgaatcgtcagggctggcagaatcacatttggctccctgaatttgtgttggtcaacctctagggactaaaaaaagctagccctttctagccaccactaccttctgctagcctccacactggtatccagggctggagatagttgtcccagttcacccaatttccatgcaaattggatagaatggggaagcaaggtatagtgtaaactcagttatctgacattctagtaaccggcaccttagcacatggcaagcgaggtggtaattggggctcataatgatggcctggaggccttacaaaatcctgaagtgtcctctgaattatcaaagagcaattacattacagccagtcccattttagtgttaaacacattgtactgtatttgattctttggaaattggtgatccctttgtgatctctatgatgattctgtattaaccagaatattagattaaccagaacactttgttttgcctagtctatataatggaaaatgtgctgttatttgctgtcttttagcagtgtgactaacttgaagctttggtcaagggctacttactctatttgcctcgaaccatttctttcttctgctgacttcgcttgggtctggggactgttgagttaatagctgggccttgggagaaagatggtggtgtctcacagctgcttccgaggaggaaggtgtcaaatctcctgtagtgtgaaaccaggccaatttaggatgtactttcgttgttagcagagttgaaggaaagagtggagagagaaaatggcctcttggcaaggtggctgaggaaggcaggaaaggtaccaatccatcctggggtggtgggggaggagggggaagcgcttgcccagcggtgaggaacagctacaaccgggtggagggaggtgcctgggaggaagctccacccctgaactcttggcaagtcgggaggaggtggggtcaatttaagggaagtgggcgtgcctgggtgcatttgggcgtgacccaaccaggctctgtcacagatcacaggaaagggactccttcttgcttcgcttttcttgagactcttctcttgtgatgattctgcttggccggggtggctctgtccccaagattggtggtgccacaaaaggagtatatcctcccttgccctgtctgagaccccaattgccctctcctagcccctgatttcccagggacccgtggccctctcctgcccttcacaaaatacttggcactttataagagctaagcaagagttttgggtgtggattcaggtgacactgtaacgtggatgagtaagggtgtgtgtttttaatacttgatgttgtctggtatattggactctgtaaagcacatatgcgtgaaaaatcttatttgagcctcaaaacagccctgtgaggtcagtaaggggagaacagtatccccattttatagatgaggagactgcactgaaggaactttcccgaacggtacagctaataactggcagagcctgaacttgaacccagaccttcaaactcctagtccagggcattcacttcgacaccatgctttgtcctttgaagaagtacctgaccatcctctgtacatcccatccacaggaagcatctgtagctcctttgctggcatggcagacagtgacatgggaagccaggaagtcttccccacagaagaagaagaggaggtaacccccaccccagctaagcgtcgaaaggtgagaaagacccaacgggacacccagtatcgcagccaccatgcccaggacaagtctctgctgagccagggccgaaggcacctgtggcgagcccgagaaatgccctggaggacagaggctgcccggcaaatgtgggacaccaatgaggaggaggaggaagaagaggaggagggcctgctgaagaggaagaa

SEQ ID NO: 44468 - DNA, 2300 bp, Homo sapien
ggaccttcgaggttgcctggtccagtttgccacccaatgcaaagatagagatctccacagcattcttgacaggtagccagccagccttttcatgaacacacctccagtaacgcagagaacaccaccaatcaaggcatcctacttgatttgggggcagctccagttgttggaaagtaggtcattcttcctctgtggatgtgtctaagggttttgcattgaggcagctggatttggcacatggtctggttactttcctccagatctgatgatggcatcttcgtgcaggaatttggcaaaggccaaatgaggcaggttaccctgcttctgtctgagcctcctgacttttcttttcatcctggttttggttatctcccttcttgacctgcggagcaggtaggcagagccacttccactcacacacctgccacctccgctctctagtcctttgtgggctactataaagccttcacttctctgcaattgaataaacacccgagcctgccctgccctgggtaaacaaggtggggggctgtttctttgcctgtagcattgaacactgtaatatgacttcttcatgtttcctggggtcctcacaaggcatggttctgttccttcctcttttgcctcagcccaaatgtgtcgcatcaaaagctggagtttagaacattctgactggaagtgctattagagaccatgtagtacagcaattcctggacaggctatggggccccactagcgggctgaggctagctgggagaaagggatggcatgacagctggccttccaggaactgtgcataagctgcagccaactccttgtgctgaaatgatggcttccacatctggatctgcctttgtcaatgtcacatgtgagagcccgtgtcagggttgagagaggcgagttgagaactcttcaatctcagtcccttcatttcactaattgctaggcatggtgttcattcctttggggaggaaaacacacgggcatggctccacctcaagagcttgtgcttaaataacacaataatgatgtcttacttgttataacactttttgaaaggggttttgcatgtattatcttatttaattctcataccactcttgtgatgtagattatattctccccattttacagatatggcaactgaggctcagagcaattaggacttgagcccagccaatcacacaattgatggccaagccaagcagcactaatcttgagagatgaggttaaacacacagtcgcccctacacacggggttaggacagaccctgtgggatgaagctcttgataatggagttcccggcaggcctttttgaaattagaatgtgctttgttcagcaagctgtggctaaattagagatgttgctggtgtgttctagtgacaccagtgacttgattttcacccagaaaaggcagcaggtttctgcccttgactgccagctaggtaggctcatgatgccttctagtttcagggagttcctgtagctttgatctttgtgtcctcggagagtgacaaatggggcagtcaggtgagtagagctgaggccatgaaggcagccttctaccttttcctccctgttccccatgtacttgatacttaatgtcagcaggaccaccagatttgctttcatacgggactggagaaacagacaaagggaatgggaaaaaagcaaaaagaaattctgatttgctctgggctctgggaaaaatcctgttaaaattacccttatcttagggctagccagatgggccgccccctgctggcagggctgggagctgtctcctgcttgtagatgagggacttcgatgttgaagtatggtgtgttcattcaagaagtatttagtggaatagtcagcacagcactagatatcgatagctgatagttatacaactttgcactgcagttctaatccccaaagtcctctgattcatcttagaggaaggcgttgcttttctgtgttccatttctctgacatccgttcttttcctgtttcttgccttcagatttaaaggcccgtaagcagaagacttcctcctcccaaagtttggagcaccgcctcaggaacaggaaccttctcttgcccaacaaagtccaggggatctcggattcaccaaacggtttcctcccaaataacctggaagagccagcctgccttgaaaattcagaaaagccatcaggaaaacgaaagtgcaagaccaagcacatggcaaccgtctcagaagaggcaaaggtgtgtagctatcaaggggtattgtagaaggtgtgtgtggcggggggtcagaggaggcaggaggg

SEQ ID NO: 44469 - DNA, 2300 bp, Homo sapien
cacggcagctggctttccccacgagtgatccaaaagagagcaaggcagaaaccacagtgtcttttaggccctagcctcagaagacacctactgtcatttctgcagtctcctgttggttacataggtcagccctactcactgtaggaggaaggtgcataagagcatgaagatcaggggatcactggggccatcttagaggctgactcccacagtctgccctctggcctcccccagtgattcctgtccctcccacatgcaaagtatgccacctctcccagtgccccccaaagcttcatccaattatagcatcacctccaggtcgagaatctcttctatttatttatttatttatttatttatttatttatttatttatttgtaatggagtttcactcttgttgcccaagctggagtgcagtggctctatctgggctcactgcaacctctgcctcccaggttcaagtaattctcctgcctcagcctttcgaatagctgggattacaggtacctggcaccactcccggctaattttttgtacttttagtagagatggggtttcaccatattggccaggctaatctcgaactcctgacatctggtgatccacccgcttcagccttccaaagtgctgggattacaggtgtgagccaccatgcccggcaattttttttcttttcttctctctttttttttttttttgtaacagagtctcactccatcacccaggctggagcgcagtgccgcaatcttggcatactgcaacctccccctcccgggctcaagtgattctcatgcctcagcctcctgagtagctggaactataggcgtgtaccaccacgcccagctgattttttgtatttttagtagaggctgggtttcactgtgttggccaggctggtcttgaactcctgtcctcaactgatctgcctgccttagcctcccaaactgctgggattataggcgtgagccaccgctcccggcctctcctagtgttttgtgagcacctaccctgctcacagttctggagcctttgtagttcattatctcaaagaccctgcaaggaagaaagtggggctcagagagggagggccttgccccaggtcttctagctaggggatggcagaggcaaggttcaagcccaggtctgccttagatctttctaccaccccaggggagtctgagtatgatatggggacacagtgtgatggaagatgggaacattctgtgaggactggatgtggaaggaaggtttttgctacaagtgtgaagctttagcagctgtgactagtcaaagatagccggccgggcatggtggctcatgcctgtaatcccagcactttgggaggccgaggcaggcggatcacttgagatcaggagttcgagaccagactggccaatgtggcgaaacccctctctactaaaaatgcaaaaattagctgggcatggtggcgcatacctgtaatcccagctactcaggaggctgagggaggagaatcccttgaacctgggaggcagaggttgcagtgagcagagatcacaccactgcactccagcctcagtgacaaagtgagactcggtctcaaaaaaagaaaaaaaaaagatagctgtctcatttctctttactctcagagtttgcttctgcctatttacagataggacttataaaaacctcaataaatggtgattgaggcaggtaaagaaggcatgcagagtcttgagagaagctaggatatcccctcaatctctgatttacaatccctgtggcattccttggtttatggggttgagcatttgaacctcttcatatctccccaccggctacaaactcatgggaacctgtgttgatcctggagagacttcacatggttagcgcctggcccagcgtctggcctcaaacctgacagtagtctcggccatttagggtagtgtaagcaaagtacagcatggacacagataaggtgagatggccttggccactgagggcagtgatgaccctggtggatggataagctgcctggcctgacctgacctaggactgcatctctgctttccagggcaaaggtcgttggagccagcagaagacacgatctcccaaatctcccaccccagtgaaacccacagaaccatgtacaccctctaagtcccgaagtgccagctcagaggaggcctcagagtcacctacagcccggcagatccccccagaggcacgtcggctcatagtgaacaaaaatgctggtgagaccctcctgcagagggcggcgcgtcttggctataaggtaagggagttttcgactgaccac

SEQ ID NO: 44470 - DNA, 2300 bp, Homo sapien
cccagcctagtttttgtttttgttctgttttaaagaagaaaagtgaggctcagagagtttaagtgacttgcctgaagtcacacagctggtaaatagtgagctggaataggaacccaggtctgtctgaggttacagaccactgagctcttagcaaaatgggaaagtgtgtgtgtgtgcacgcgtgtgcagacgtgtctgtccattcgtgaatttcaaagtcaaggtaaagagggcttagggacatccggaacctaccccaaatttgagaggggacctcgtggatgagaggccagcagagaactgtgtgtctccaggatctggaatcccctgggaaaagcatgcccgcttggaaaagacaaagtgcttgttttggggacttgattctgagtatccaggaggtctcaggggccggcgccccagtccagccacaggatctttccttgggaacttgtaatctgcagctgcctttgtggccatcatccaccaccactcctgtcccccagtcctgcgcctgagatgatcctttcccaaggcaggagaagcaggccgatgctggaggctgagtaggtccttcaacctcaagccctttagaaggccccatcccctggggctccttcagtcttgatgctttctgccaaggcttaggccttgctgcccccacccccaaaaaggccacgtggaactatacagagtaacaattcccagcgcactctctccagagcctcctatcagcagacccacgtaggcggcggtattgatgttgaggcaggtcagagagggcaaaggggagatagaaggggagcgtgcctgagtggctttcaagtgggcgcgtggagcagagcagcctggctttggacaggggaagaaaggtaggcatgggctttcttccagcacccgaactctggctctctttgcacttgctgggccagcccctctccccctagcccttcccctgactcatatcttgccagcgtcccccaccccaacttcccgcaggagtcctagactcgacttccctaagaagtcgccgaaactctccagtcaccccaggtgttacgcccaggattctgcggagtcgggcatatggttccaaaattgtatcctctgggcatctcgcggcctcacccgccgcacggcccgccctcccgctggggcctgcacaccccaggagctcaataatgtggagcgcagggcttggcccaaaggcgtcaagcaagtctccacttgcacgggccgagggggctggacgaaaccttcccgagtccgcggggaagggatttctctgcggggcgttgtatgggggcttcgcaccgggaagggcgcggaacgagcagagagctcggagtctcgctggctagaagcagagtggggagcgcccgcccgggccgcggcgcacgacgcgggctctgcgggcgccctgcctcgtggtcccccgggcgcgagcgagccgcgaggggaatgagaggccgcgcgggcccctggcacggctccccatgccgtgctggcgaccgcggcgggcgggccggggcggacgggcgctgtttccaccgagatgcctcgtccctccctcgttccctcccccaccccgcccgcccgcagtccctcccgtcggtccctccctccggctcttccctccctcccgccctgcctccttcgcgcccgccccatccgccgcctgcggggacgtgtgtgtctctactgcatttcccctttcgctcgctcgtttcggtgcatgtctgcgccggttcgcgccccctccccgggcgcccctgccgccccgtgtcttggcccggccctccccggcgtccgccccgctccccgcgcgctccaccccgccccccgccccgttttatcaggggcgccgccgtctcacctggtatttgcatctctccctccaacttgccattggcggcgcgaagtgtgggagagccctgcgcctcgcccgcccggaccagcctgccccggcgccgaggtgagtcacgggcgcggggtggcgggggcaggcgggcggggaagaagggcgggcggggaggagggcgggggacggcggccccggcggccgcggggaccgaccgggcgccgcgctcaacttccacttctcctttcgccggcgccgagttcctggcgccgctcgcccggcccggcttccgaggggagaggacgggctggcggggctggggacccgcgtctcggcccccggagcggggaccacggagacagaccccggcccggcgaccgagctgggcccgtgagccactcggcctcaggtacgtcgatggcgccggttcttcgagccttgg

SEQ ID NO: 44471 - DNA, 2300 bp, Homo sapien
ctctcctgcctcagcctcccgagtagctggaactacaggcatgcaccaccacaccggctaatttttgtatttttagtagagatggggtttcaccatgttggccaggctggtcttgaactcctgacctcaagtgatccaccccgctcggcatcccaaagtgctgggattacaggcatgagtcaccacacccagcctagtttttgtttttgttctgttttaaagaagaaaagtgaggctcagagagtttaagtgacttgcctgaagtcacacagctggtaaatagtgagctggaataggaacccaggtctgtctgaggttacagaccactgagctcttagcaaaatgggaaagtgtgtgtgtgtgcacgcgtgtgcagacgtgtctgtccattcgtgaatttcaaagtcaaggtaaagagggcttagggacatccggaacctaccccaaatttgagaggggacctcgtggatgagaggccagcagagaactgtgtgtctccaggatctggaatcccctgggaaaagcatgcccgcttggaaaagacaaagtgcttgttttggggacttgattctgagtatccaggaggtctcaggggccggcgccccagtccagccacaggatctttccttgggaacttgtaatctgcagctgcctttgtggccatcatccaccaccactcctgtcccccagtcctgcgcctgagatgatcctttcccaaggcaggagaagcaggccgatgctggaggctgagtaggtccttcaacctcaagccctttagaaggccccatcccctggggctccttcagtcttgatgctttctgccaaggcttaggccttgctgcccccacccccaaaaaggccacgtggaactatacagagtaacaattcccagcgcactctctccagagcctcctatcagcagacccacgtaggcggcggtattgatgttgaggcaggtcagagagggcaaaggggagatagaaggggagcgtgcctgagtggctttcaagtgggcgcgtggagcagagcagcctggctttggacaggggaagaaaggtaggcatgggctttcttccagcacccgaactctggctctctttgcacttgctgggccagcccctctccccctagcccttcccctgactcatatcttgccagcgtcccccaccccaacttcccgcaggagtcctagactcgacttccctaagaagtcgccgaaactctccagtcaccccaggtgttacgcccaggattctgcggagtcgggcatatggttccaaaattgtatcctctgggcatctcgcggcctcacccgccgcacggcccgccctcccgctggggcctgcacaccccaggagctcaataatgtggagcgcagggcttggcccaaaggcgtcaagcaagtctccacttgcacgggccgagggggctggacgaaaccttcccgagtccgcggggaagggatttctctgcggggcgttgtatgggggcttcgcaccgggaagggcgcggaacgagcagagagctcggagtctcgctggctagaagcagagtggggagcgcccgcccgggccgcggcgcacgacgcgggctctgcgggcgccctgcctcgtggtcccccgggcgcgagcgagccgcgaggggaatgagaggccgcgcgggcccctggcacggctccccatgccgtgctggcgaccgcggcgggcgggccggggcggacgggcgctgtttccaccgagatgcctcgtccctccctcgttccctcccccaccccgcccgcccgcagtccctcccgtcggtccctccctccggctcttccctccctcccgccctgcctccttcgcgcccgccccatccgccgcctgcggggacgtgtgtgtctctactgcatttcccctttcgctcgctcgtttcggtgcatgtctgcgccggttcgcgccccctccccgggcgcccctgccgccccgtgtcttggcccggccctccccggcgtccgccccgctccccgcgcgctccaccccgccccccgccccgttttatcaggggcgccgccgtctcacctggtatttgcatctctccctccaacttgccattggcggcgcgaagtgtgggagagccctgcgcctcgcccgcccggaccagcctgccccggcgccgaggtgagtcacgggcgcggggtggcgggggcaggcgggcggggaagaagggcgggcggggaggagggcgggggacggcggccccggcggccgcggggaccgaccgggcgccgcgctcaacttccacttctcctttcgccggcg

SEQ ID NO: 44472 - DNA, 2300 bp, Homo sapien
aagtactggcattacaggcatgagccactgcacccggccctgtaatttcattctctatccccattccaccaaaaaaaaaaaaaaagtaacttcattacctccaaagttagggcccaactcttgccagttcaaatctggccccccaccatacttgcctgtctttatcactacttctttatttttttctttttggagacagagtcttgctccatcatccaggctggagtgcagtggcacaatcttggctcactgcagcctccacctggcaggttcaagcgagtctcctgcctcagtctccctagtagctgggattacaggcgcatgccatggcgcccggctaatttttggattttttgtagagacggggtttcaccatgttggccagactggtcttaaactcctgacctaaagtgattcacccgcctaggcctcccaaagtgctgggattacaggcatgagccacggagcctgaccacatcaatacttcttagtatgtactctctatcattgtcccccgaaaatgtgctgggttttggttttttaaaacagttccaagccttttcatttaacaaacagcatggtgcttcctctaagacactttacaaatattagctcatttagtcttccgaacaccctcctgagatttgtagatgaggaaaatgaggcacaattaagtgacttgcccaggtggcagagccaggattcaatgtgggttggtctggatccaaggtcaacatgtttaacaatgaaaaatgttatctttggtccgaaagtattcaccatctgaaatatcaatccttttcctctactgtttgaattttactactcatccttcaagacacaactcaaataacttcttacacgaagttctaccatagtgattccatcccatagtcttctctcttgctctgtccggcactacaccagatattatttcaatgaccggtatatgtcatctccccaactagacagtggccacttcctatatagatgctatgtccaaataaacccattgtaaactgaaaatatcgttaagtcgaaactgcatttaataccctgataaacccatcataaagtcaaaaaaccgtaagttgaaccatgcttaagtccagatgctcctcgactgacatggggttaggtctcattaaacccatcataaagtcgaaaaattgtaagtcgaaccattgtgaggggtaagtcggggaccatccgtacttttcatacccaacagagccccttttatagtacaatccaagaggtaagtgctcaataaatacttgttaaatgaatatgtaagctgaatctttgaaacaggcacattgtatgttctgcatgcagccaaaacattatttccaatttagcttatatctggcagagtcaaaacacttatttacactcagcccctcaccctactcccataactgaaagttctgcttagcagacttctcttcccagaaagtccgagaagcacgaacgctttttgctaacatcctgctcccaagcacagaaaccacagcaggagactgtgtgtatctgtagcacctggtatacagcatctaggacacacaactgaactaataaataaaggtgacaggcgggaagaagagcgcagaattacttgtccaggaaacgggttgggtgggaaagagccggcaactggtaaaagatggaagtacacgccggatctgggaagccaggttccgcgcctcggactcatggaaaaactggatctggatcactgcaaaagaatcaggaaggcttcggtatcaagtaactggtgtcctaaaaccaaaaaacaaagtgcgatgccggggctacgctgttgtgagatgctgttatcagttctcgtcaccaacacagcggcagcaccaggcacaaccgccaatcaaagcggccccacgagtccctccttgaacaggttccttaactcgttcagtccaacactgtgccacaaactcgcgaaaaccggctacctagagccagcgtctttgcgagcttgcggccagctagtgcatgcgcaaatcctctcgccgtgcggaccaatcgcaatgcggcagcgagtgctacgcctgcgcagtaggcctccggtcgccgttccccttccccggctctagcaggccggcttctctgtccaatgcccacccggagctgggaggaggagtctgcgtaatgtgcgtgtgaagagactgggggagctggccggggctcacggtgtttgacccgtcggtcgtgcgtgagaggaaagggaaggaggaggtcccgaatagcggtcgccgaaatgttccggtgtggaggcctgg

SEQ ID NO: 44473 - DNA, 2300 bp, Homo sapien
cattgaattaattccaaaaaatataagtggaaatcccccaaagtctcaccccacagaagtaacagacaccttttattagggcaagaagcccattttgagatatcatattttcagaaatcaaagtttcttccttacaaaagtagactcagtgacaagtttttgctagaagcttacattgaaataatcttattatgtacatatgtttttttaatatctctcaggaagttagcattaattctagctgtgaattggcaaagggcaaagcccctttctactttgtgtacaggatgtacctaattaatagttacccctctccaccttaaagctattctgtagataaagatcatcaggggcattaacttccaatacagaggggaacgatccagcaaactaggcatcagactaatcaaaaccaaaaatactgtacaatgatgattgatacataatacaatgaaaattggtattcataaggatgattttggattagccaactaagaggaaatccttatctgggtagttttaatgctgagtagtataatgtagggttttagaaatgggcgacccacatatatgataaaagggttagctgtaaatatatctgctagctcagctaataaacttattaactggaagatgccattctgagtaacttggacgtccttgagtagtcacattccaatttgctttcaggtatatcactgatgcactgaattgtttttctctcagcagaaatggatttggtcatgtttgtctcttcctgcagctcaacctcccaaataagatggcagctcaactgtgctgtttgaatccctgaccttgatggcattagcaataactcacgagtcagtgctagtgacatgtgtcagtgttaccttagcttatgaaatatgtagggggagaggtaaagtcttaaaagaaacaaatgggtgcactttatcgtatgtaaattgtacccccagtaaagtcgatttcaaacaaattctgaacccgcgaatgactttagggagaaggaatactggtcttgaccaagatgtgtgtgatgattagtaagctttgggcagcagccccctaatactgtaaggaggttgtgttcatttatcatcttccaagcataatctaggcttctggcaaattagacccaaccactttgttctacattcagctgcagggggaggtgaaccctcctagggattcccaactccctctgaaactccagcgttctggagggacttatggttatatggagggcttgggaatggaaggcactgtggagcttatgccattgtcccaagatcctccacctgggccagtaatggctagccccgtaaacaaagtccccttttgctggaactgccaccactagcttcccccccttctcctagcctctgtgtggccctctcccgcggcgggccttccccattggccagccaaacacaaccgactgcggcagccaataggagccgctctcctgaacattcagaggatgggtgcgcgtggtgtgataaggggatgttggcgcctggtacgcgcccccctacatctggcaagtctgtaacagaaacagttacaccccctacacacgcacacgcgtgcccgctggctccctcctctcagctgtacaggccccggacaacccactgcgtgtcttggcagcggcctcccaggctgcctggggcccgcgagtgcacctgctcactcattaagacagagcatccctttatcccaaggcgcgggtcgggtagagggtgggggtagaggggacggggtagcggggaccgggaaggcgcggctcagctgcccgctgctcccgaggtgaaagaggtgcctccgcccccaccccatccccgcagagttgcgttgctccagggaggccgaagtgatccagtgatgtcttaaggtgcagctctttgtcctccccagctgtgctccctgcccgctgaccccgtgcgctcgagccagtgggggtggggagcccgaaacctataacataaacgggggcaaggagaaagaagtctatcccggggtggcgtgtgccgctgtccccaccccgtctctttcctcctgaggcttcttccctcgggtccgtcccgggaatgcaggcaggggagggtgtgggccgaggcgcggcggcggctggagcagcgcggtagggtccttcgccagagcatccggtccgagggcgcacacaggcagaaggctcgcggctcgtccactctcctccctctctcctcctctccctggcttttgtgttggtgcctccgagctgcaaggagggtgcgctggaggaggaggaggggggc

SEQ ID NO: 44474 - DNA, 2300 bp, Homo sapien
ttgggtgtataagtgttttctggtcatcctgctgaggcagtttgaccattcctcctcgtaattttaggttggatgtggacactcgtgacactagatatgacaagagaatttgagagaaattttattaccctggggactagtgggggtaagtgagggagggctgggtgctgcaaacaggtctgggctggtttcagaggcagaggaagttggatgggcctttatagcatctaggaagtggggctggtgaaaatgccgcacaggctgtagatttgcaagttttaaatttctcaactgcaccaatttttgttgccagttttaaatttcccaccaatgccaaagaaggaggcaggctggagaatcacaagttttaaatttcccactacagccaaaagcagagtcatgcggctgtagatttgctagttttaaatttcctgctggcatcaaaggaaaaggtgcccggactttcttatcaccctgaccggaagcagggaccaactatgcatgctccaagattttgggacttttcactgttttattttgattattctctgtcttttcctgtaaagcttattttcagggtcagaagcaaatagctgtataaataagaaagaaaaaactagctcaaataaaaaaaatggtaggattcagtgacaggatttacgtgtgtgttatgtaagccacacgatattttcagtctgggcaactcttaagagatgaattgggccaggcgtggtggctcacgcttgtaatcccagcactttgggaggccgaggcaggcagatcacctgaggtggggagttcgagaccagcctgaccaacatggagaaaccccgtctctactaaaaatacaaaattagtcgggtgtggtggcgcatgcctgtaatcccagctactcgggaggctgaggcaggagagtcacttgaacccgggaagcggaggttgcggtgagccaagatcacgccattggactcctgcctgggcaacaagagcgaaactccgtctcaaaaaagaaaaagagagatgaaccagtactgctataaaccttgtggagaaatttgggagaagaaacttttacagttcaaagcacaatgtctagaaaatgtttctgtaagcagtattttggcaagtgtttttcttgtaaatgtatttacaagttccagtgattctcccgcctcagcctcccaagtagctgggattacaggcatgtgccaccacaccctgctaattttgtatttttagtaaagatggggtttcactatgttggtcaggctgactggggttcagagaaggaggaggagaaaggcgaggaggaaagggaagtggtctcaaactcctcaccccaggtgatccacccacctcagcctcccaaagtgctggaattagaagtgtgagccaccgcggccagcccacggacggacggctggtacttacatgtgcacaagtgcagctactttacttaccgtcgaaggcagcggaggaagtgtaattgactagcgtggatgcagcttttctaagcaaacgctcgatttaacctggagttgtcatcccacaaaatacattgtacctgactacagagaaacatgaattctgggtcttccttgtgtgtaagagtaaatgtatttttccttagcattttttgtacctactataggcatccatatggcaattagaagtaacagagagacaagcaaaaccatatgtttaaaacaaaaggtaaaaataactagtattttgacacgtgtttcaagtacagtatttccagaaaacaatatatttatatttttaactcgtgtctttagccctcacacacaaggaagacccagaattcatgtttctctgtagtcaggtacaatgtattttttgggatgacaactccaggttaaatcgagcgtttgcttagaaaagctgcatccacgctagtcaattacacttcctccgctgccttcgacggtaagtaaagtagctgcacatgtgcacatgtaagtaccagccgtccgtccgtgggcggttaaaaggccccggatgttcagggggtggagtcggcgtctacccatgaggcagcgcgtgcagttatatacttctgcccccggctgagacgccggttccgcgctggaagtctccgggggagtcgctgttgctgaggctgtcgcctgaggtttttcgcgctcctccctttcctcctcctctttctcctcctccttatccgaaccccagtcagaccgatctgctctgctctcggtaagcggcccccgcccccgcctgtgccgcgcggaaggaggcagcagctctcccgcgcggcc

SEQ ID NO: 44475 - DNA, 2300 bp, Homo sapien
tgggctcaaatgatgttcctgcctcggcttcccaactatagtatagatgagagcaacatagcatagtggttaagagcaatcccagctctgccattttctaaattactctcctaaccttttatggcctgtgttctcaaccgtcaaaggggaaaaataatagtacctgtcttatagggtagttaggaacacaaaaagctcttggcatcacccttggtacatggtaggtactgcacaatgtcagctaatattatcgtcatgtgtgctgcctggagaaatttttaagtggaaaacaaaacaaacaaacaaaaacacaggccagacgaggtggctcacgcctttaatcccagcactttgaggggccaaggcgggtggatcacctgaggccaggagttggcgatcagcatggccaacatggcgaaaccccgtctctactaaaaatacaaaaattagctgggtgtggtagcaggcacctgtaatcccagctactcaggaggctgaggcaggagaatcgcttgaacctgggaggtggaggttgcagtgagccgagatcgcaccactgcactccagcctggaccacaaagtgagactctgtccaaaaaaaaacaaacaaaacccaacaaaataaaacaaggtgaactaaaatgagaaatatccttttggaagaacatagttccaaatatttattcattcaacaaataaccatttagggccaacttgcactgacttttccttataacacataagcaataaaccctattattgcgtactctcgcgtgattagggaacgttgttaagaggctcaaaaatcggacgtcatagctcaaaaatcggacgtcatagcacattggctaatggaatcacccaggggctttgcggtttccccttccagcagccagaggggccagagtcggaagctgggggtcggactcttggcatcttctggtggattatgaggtttggattaactgggatttcccgttggtgtttttctgcctcatctgtttagctttttgtggtcccctttttggtatccaacttgctctttcttaagtgaagtttctgattaaagcaagagcttcgagtaaggggtctgaccgtaatttttcactggttaatgtctgacgtccagtaggtgctgtctggatcattctccgtccctccctcccttctttccctcccccccttcctttctctccctttctcttttctttctctctctccctccctccttcctttctctttctctctctctctctttctctcctttcttggatggagtcttgctttgtcacccaggctagagggcagtggcgtgatctcagctcactgcaacctccacctccggggttcaagtgactctcctgcctcagcctcccgagtagctgggaccacaggtgcgtgccaccacacccagctaatttttttgcatttttactagagacgggatttcaccatgttggccaggctggtctcaaaactcctggcatcaagtgatgcgcccggaccctcaaagtgttgagattacaggcgtgagccaccgcgcctggccttgaactttattttctcattgagcccaggcacctcactaaattcggctcacccctatgtctcactttcctacttttgttttgaagcctttgccccaccccctccacgttgccgcctttttcgtactgagcgcgcagggcactacgcccaccactccccttgacccactcctcaagccctgataccggggcgaggccccttccttttctagtccttctacgcgccaggtgggtgggtttcgcggtgacgaggcgacacctctttcccctctggcgagcacgttaactggggaagctaccaaattctcacgccttagctgccctgcctccacctcccgcaagtccggttgcccctctaggcttctgcgcctgcagtggttccgaccctcgcctttagaactctgccgcttccgcctcttatttcgcgcctttgtttttagttttggaaggggcggagttgaaatggctgcgccgcggttgccgaagcaacgctttggttacttccgttggtttcaatgcttccgggttggcgctgcagtggcgtttccgactgtgggagcctcagcttcccagtcgtccgatgagcccgagcaggtgagggggagctcctggacttccaggctggggagcggggctgggccgcgccaggccgcgcggggccgggctggcctggttcccggcctgggaggggcttaacggtcctctggtctctctctcccctcagctgagtcccttccctgtctttcactcttc

SEQ ID NO: 44476 - DNA, 2300 bp, Homo sapien
actagagcagtgcttctcaaagtgtggtccctgagcaagtaacagcagtatctgggaacttgttcgaaatgcagattctggccaggcacggtggctcacgcctgtaatcccaacactttgggaggcccagacaggtgggtcacctgaggccaggagttcgagaccggcttggccaacacggtgaaactccgtccctactaaaaatacaaaattagctgggcgtggtggctgcacacctgtaatcccagctactcaggaggctgaggcaggagaattgcttgaacctgggaggtggaggttgcagtgagctgagatcacaccattgcactccagcctgggcgacaagagcgaaactccttctcaaaaaaaaaaaaaaataaaaataaaaataaaaaagaaaagaaagaaagaaatgcagattctcagactcaccaatgacctgaaactctgggagtaggacccaagaacctgggttttaagacaccctccaggtgattctgatacactctcaagtttgaacatgggtttgaaaagggctaacttgactccgtggagtcaagagctggggaaacccaagcacaccttaggtccaggtataaaattaggctaggttctaagcaactggaatcaatctcctaatggacataccaaagaataagaactgttttcaggatggcaactagaatactgaatccccacaacacagtctttctgatccttttttaggagagacatctgccaaaggccctctcagactgtcaaaacatcctggaatatatttgcgtccaactctgcaccttgctctctattccctcacttcaaacactaacctttcccatttgtgctctcacctgaactgagtaaataagcttctaaccactcttctccccacccctctcttcttggtatccaagatgagagtggcaggcgaaagggtagttctaatgtacccaagcaaatggatacacatcctaaaacaggagtgacttatgcagctgcccctccagagtgcatctcacctgcttcagcaacacagttgccctttggtctaacctccccccctcaaccgcccccacgttcctattcctggaaaatggaaaattccatagccaaacatcaagcagacacttcccagaatgcagctcatctcctcttctcctcccgcagagatacctcaggtctataggattaagaaaggcaagcccagcagccactactcactgaccagacctggcccaacatgctgcagaaataattatcaattagtatacttgagagacagcagcgtgaggtggagaatgggttctaaactgaatgacagctgttaacagtttttggccctgtttttcctgtcctgaatcctcaactgagatcctagggatgagaaacgggggaacagcacgccctacttgagagaattagaatttgaggcgctaggaagcaaaaggtaagaaacagcttaaatgtgtggtagcactcctgaaaatatgctggggcccctcaaaaagctcaccttccctcacttcccacttcaactgattatgagcatcttgcttgattaaaagcaattcataatagtaattgagaattagtaagaaaaagcttaattaagctgagattaattatttaagctggtactcgaggttttggaagaaaagtagaaatttaatgtcaaggtatggaggaagaaaaaagtatgattggagtcaattatatcttttgacagacaggagacctgatgaatgtccctgtccctccagagtccctgaagcaccagtgaagggagagggcctggcgagacagcatgtacaggtacttgggagttgtctagtaacttgctggttggagggggagggactagctcagggcccagggggaggtctatactgaagttgctgcctttagagagctggagaggcaggaggctgaggactgaaaagagagggtgagtaattcttcatgacctgtaggatcccaaagatggcgacctgccagcctggactgccagcgaaggccagaatcgtgctgtagctctgaacccacagctcctctgcccctggcccatgagaatttcagctggagagatagcatgccctggtaagtgaagtcctgccacttcgagacatggaatcatctttctcatttggagtgatccttgctgtcctggcctccctcatcattgctactaacacactagtggctgtggctgtgctgctgttgatccacaagaatgatggtgtcagtctctgcttcaccttgaatctggctgtggctgacaccttgattggtgtggccatctc

SEQ ID NO: 44477 - DNA, 2300 bp, Homo sapien
aagtctcagaaacctctcagttccaggaaaactggagcaatattcagctctctcaccttcagaatacctctgctgaacctaccagctgcatagtaataatagccttctcatgttctcaatctaaattggtcttattctactcttttgctccagcttctctcggaacactgatgactaatccccaggtatagtcttaactctctcatttcacagccatttgaagaagtcagcaagataatgctgcatgctagtttaccactctgcaatggctacttcaacccacaactaagcaacctgagattcctaggagcagataaaccccatgtgcaatctgtcactgtttagctttcattgccaagataattttacaaagttaatgaatagctgggttggaatggggaggggggaacagacacagaatgaatgaggaggaactgtcattggtgggcagcctctgttctccttcttggcaggacattggttacatggtgggccacttgagggtacagttgttatcatcatcaaaatgcttttatgaaggacctaatatctggtgctctgagttaggccgcacagctctggactttcacttttagaacatcatagtccaagagcaggtattgatgtggacacatgcaaaatggattcaaactgtcaatatgggttaaatcacatattatacattaataatctcttccactggtttctagatatttctggttgaaatctatcaagcaaatatatcttgtccccttaattataatattagctccttgaaggcagaggacccaccctgatactcctgtctacagaccttagctgtacaggacaaatctagatgttcagtaaggactgattaaatcaacctgacctgacgggtgcaggtagagtacctttcaagttaatttattcctttgagcctcatttcttcctctacaaaatgagggtggaaattttttttcttttctttctttttttttttaaataaaaaggagtctcactctgctgcccaggctagagtgcagtggtgcgatctcagctcactgcaatctctgcctcccaggttcaagtgattctcctgcctcagccccctgagtagctgagattacaggcgtgtgacaccatgcctggctaatttttgtatttttagtagagacagagtttcaccatcttggccaggctggtcttgaactcccgacttcaggtgatccacccgtcttagcctcccaaagtgttgggatgacaggcatgagccaccacacttggcccccctttttttccctttattttagagacagggtcttgctatgttgcccaggatggtctcgaactcctgagctcaagcaatcctcctacctcagcttcccaaagtgctgggattacaggctgagctgctgtgcccggctagggattgtaattttctctgctttattgggttgttgtgagggtggagagacaatacatgtaaattgcttagtacatactctagcatcgtatagtacatcatctgctcaattgttagctattaatttaacaatattaatttctgcctcctgctcaactaggagagagcctatggaaaagagtaagtgcagcagttctcatgcaaatgtgtaggtattcgattcagcctatagaagcacactggtctgttgcctatgtattgggataaggacaacagaagatttaccttttcacctatcttcttcacttttctgccatgacagggatgctttgatgggtctgtgctttagcaactgactaggagcgaaggtccaagtgggactctggactgggagcgagggctgagactaaagtcgccacatcaggctgcttgttccgttcactcagcaaatatttatagctaatctaaccagtttcagatatcgttcaagaggtgggggtcctgcaacagcccaggcttgtgcctttaccccatttcacagagaagaaaaagcgaaaaactagagaaaaaccacctctccaagaggtaaccgcacgcagcgcggaaggctgctagtgcgcaggcgccacgccccggtacgccccggctcttccggcgcgaggtcaccgaatcgactggccactggcgccggggccgcgcatgcgctgcgctgcctttcccgggcgctgattcctgagtgctgagcgcgaacccgaggagatgaagtaaggcgtcagcttccttttgaggaaggagcagcgggccactgggggtggtccaccgggactggtgtggtagagcgtctgcggggccgaggggcgggagcggcgcggggactggaacagctcgtccccta

SEQ ID NO: 44478 - DNA, 2300 bp, Homo sapien
tagccattcttgaaattgggcagtagcctaactgtcacaggctctctttgttttacataatttatttaccttttcaatcattttctgaaacataaaaaggagtaaagcctttatatttgccagacataaacctgtcctttgatctgtcttatgtttcaggcttagtaaacatcctatgctttgcaaatggctaattctgttagcctacatttaagtctagtgtggctccatttcagacaggtgaattttttttctctagaaatgaaagacaaatgtctcattttatcttttacagatcttttatagaggtcttagccttttgatttgttaccttaataaatacttctaggtcaaaatattataagaacatattctgcgtaggaccaaaccttacataaaacttttcttacaggccccaaataaacaaatttaagtatttaacttacttgttctcttatacagtttctttcaaagtctaattttaaactagtcacatactgcctgtatttactcaactccttcaagggacatataacctacaaaaacaaaaaccaacaatataaatacaaggttgtaacaatgataacactttacagaggagagggtgaaaagaatattcattttaataaaaatttgggataaggtctaataacaacatattttggtgacaattttgaagtcagcatctttatacaattgctgtctcaccaagaaatttctatccaaacattgttttattagtatggttcatatcataatcaggaatttactattcccaatcaaattgttattaaaacacgtatataataatgatgcttaactccccaaagaatttattctatcaatctgtattttgctagtttctcattttatctccagttttctcaaagtgtatgagaaatattctttgacaggtagacggtgatattaccacttttggagccagaggaaaagcactacaatacaactgggtgaaaataaataaataaataaataaataaataaataaataaataagtgtgtgtgtatctttgcatactcaaatcattggtaatatctgttgctattaaaatggaaataaaggtcaagtaggaatgagttttatttagacaaaacagctacctgatttcccttggccccagtactgagttattcattgagtcttttattgggagtcctctactgctcaattgaaagttgacacaggctcccagtgaggtaaagggaagcacctaggtcttggctggttaacaggaggtatgcttcaatgcactttattattgctagtgatgtagccacccttctttaatggcctcagaatatcttttcactgatagtttgtttttaaatgtgcatcatgtagacttttataaacctggtttcctaaatttggcagtaaggatcagtcaggttaaaatcctaagaaggttaaaaaagccacaaacaagtagattcaaaagcattacaaatgtaaaaataaacgaagccacacttttaaacatcaatttatttaaatgattaggctgttcactgaaaataaaacttgcaagcagaatgggaagtgagagaatacagacaatgggctgatttgggtaaacctaactgctttctctctctctcctctcccaggcctgtctttaggctggaagtgtcctgtggaatccctatctgtgaaccctatattcagtcttcctgtagcctcaacctcagtccaattcctgaacacagaggttgggattgactgttgtgaaggagaggaggagagtgcatgtcaagtttcagtagctggatggacgaaggcacggaagtaggaatcagcagggtatgtgtgggtaggcagaaaagaccccaacctgtcagtgaagactcttgggttggagataaggttggatggggcggctgaggcatatcatggggctttctgtcattaaaatgaggtttaagaatttaaacacttcaactcatttaacttggtatgtaaaactgaagttaacacaaagcaaaatcatagcaaaatgtttcccatttaacagcaaactgaaaagggtaaagaaaatcacttaagggaggagccaagatggccgaataggaacagctccggtctacagctcccagcgtgagcgacgcagaagacgggtgatttctgcatttccatctgaggtaccgggttcatctcactagggagtgccagacagtgggcgcaggccagtgtgtgtgcgcaccatgcgcgagccgaagcagggcgaggcattgcctcagctgggaagcgcaaggggtcagggagttcactttccaagtca

SEQ ID NO: 44479 - DNA, 2300 bp, Homo sapien
tgtttctctttgtctctagcaattaaagtctactttatctgatattattatggccactcctacttttgcaaatgcaaatgtgctttgagtatcttttcccatccttttattttcagcctacttacatgtatcattgtatttgcagtgtatagtatttgtagatagcatgtagttggatcatgtattttttaattggttctgccaatctgttttcattactgagtttagaccatttacgcttagagaagtaattactggtatgttagagcttaaatctgccattttatttgttttctgttatttcccctgtttctcattcctctatttcccttttcttgccttcctgtgggctacttgaacattgttagaagtttatcttgatttatttataatgttttgaatatatcacttcgtatagttttcttaatagttgctctaggaattacaaaatatatatatagtttaccacaacctactggtattaatattttaccactttgaataaagtgtagaagccttatttccatttatgtccctttgcacttcccacttctaaaatgtaattgttttagaagagggaaaaaatagatactgaggcctacttgagggtggagaatgagaggaaggttagggtcaaaaaactacctatcatgtactatgctctctacctgggtaacaaaattatttgcacaccaaaccccatcaatgcacaatttgcacatgtaacaaacctacacatatgcccccaaacctaaaatacaatttgaaagggaaaaataaaatataattgtcttaaatatttcctttacatgtattcaccaccacatcagatgctcttatactttttgcttcaaccatcaaatatgatttaagaaactcaagaaaaatagaatagtctattatatttatccctatttttatccattcttatgggttttttttcccttctgaagttctaagcctacttctgttatcatttcctttctgcgtagataacttcttttagccattccttaagataggtttgttagcaacacatttttagttttccttcatctcagaatgtctctatttcttcttcattgatgaaagatattttcattaggtatagaattcacagttgacaatttgtttcttaaaagaaaatgctaaagcacttaaaaaatgctgcacctcttccttcgggcctccatcgtttcaaattcacattcaaattggtgttctcctgtaaataatgtttcttttatctctgactgctttcaagaatttttgtctttgtcattagttttcagaagtttaactataatgtgtcatagatagatagatgatagatagatagatacatagatagatagatagatagatagatagatagatagatagatagatagatgatagataacgtggagacagagcatgaactaggtacagtctcagtccttcatatattttcattctactgagcttcttggcagcagacactatgttttactcactgttttatcagtgtactcactgtcaggaaccagcagagtctggcatagagtgggcactcaataaatgttggctgactgaatgagaaggtagaaacaaataagtagaagaaagagagaaagaggaagaggagggcgagagagataatgagcccaagacagagaagagaaagacaaggagaaatgtattgagcccttgaagaaaccaagtgttctacatgggactgggggtggtatgcctaggggaaggagggtcacagtgtctataaaggagatagatgtaaaagtcagtcctatggccctaataaaaactacacaattactcatcgaagtttgttgaacagaaatcagtacgatcacagctaccatggacaaagcttgatatattttggtttagtttaaatgaggggtattggtttcaaagagatattaaatttcgactctaaggggctgaagtctcgtgtgcctgtgcgtctggtgaggcttagcggtcaccactccccactcacccgctgcccaccccacctccgagggtgacgccccttgaggacgtcagctctccagcctagaaggcagcattgtgaggggcgtggcctagaggacgttctactctggccaccacgatcttggcagcccacacctgatcaggacctaaagcgtgaagggtgtgaatgaggagaaacgaggaccgcctgctaccccagcgtctggccccctggggactgaaggctggctctggagctgtacctcggcaactgctataaggctgccgaagccgccgccactaaggcggccgccagcagcctg

SEQ ID NO: 44480 - DNA, 2300 bp, Homo sapien
cacatgcaatatagacagtatattatcggttatcctacaataacccttgtaaggtgggaacagcatccctgttttaaagatgaaggaagaagttttcaggggttatataattttcccaaggttatacagtcagttatgaagttaagatttacatttaggtttacctgctccaagttcatgttccttctctctaatgtggtgacctggaatgagacatttaacctcactaagctttttcctctgtaatatcagagatttagactaagtcaatagttttcaaccttaactacacattacaactgcctgagaagcttaaaaagcaacaaaaacaaaaaaaaacgaatgcacaggctgcaccccagactaattaaataaatcagacccactggggtgggacccaggcattatttgtttaacttccaaattgattcaaatgtgccaccagagttaagaatcactggaagtgtgatggctagaatcccttccagttcttaaaaactcaaaagcataagtctcaaacaattctagacctcatcttctctattttggcccaaactacaacctcttcagtgcttgtgactaagacatttcagattcctgctcactaggttattttccctttccctctaatcctttcatatggaacaaaaaaccagtacagtgaggtcttgaaattacagacttgtaaaaattaacagaaagtttgtaagttccctgaatccctttacccctttttttgaccaaatacagggaaagagagtattatgagtaactgattattcttagccacaccaacaagacagagagtagtagcaaagtgaggaagctagagatcctgatacccaaggaggctcccaaatcaactgcttgccaacttggataagagtcaggttgggggccttggcctaatctatgaacatgactcatttatttttgcatgtgagctataatcactggttgttgagctctccaaatcttgagctaggagaattgttgttaagagctgaatggaaaagaatggattacacaaaataaatccttgcggatacaaaaccaacactagaaaacccatgaccatcatgctttgttttgttgggctacaaactgtaggagtttgcttggaaattgctttgatacatataaatagcaacaaagagctggcagatagaacaggctttatgtttaagatgagtgcatatttttttgaagcagagggagaatcatctcattaagtaggtttttaatgattctctatggccaaatttatctcactttagttaatgatttcccagacgagcttattttctctgctgtctttcatatttccctgtaaatgctgcaagacagactctggacctcacctctccagcaaggaatttgaggaaaggctcactgatattgaaaaaaacaacataaaagggatggtttgtactctgactgattttgtgaaaccaaatcattctgacagctgtaggcattgttgtaagtaggtaccccatcattgtcaaattaatcctgaatctgttccttcaaaaagcattaacagagagaatgtagtaactacaatctgaattaaacaaatccttcctcaggaaccctggttctgagaactcttgaaaataacagtttaaactgagtgggattttctcccactaatttcttaataaaaatgactaaaaatttggcatagctggattgtcacaacaaaagtaacgaacaaaactaaaggactctggatgggacagacaaataggcctgggtctttatgctccagatatcatggtcagcaaacgattgaataaaatgattttcaggttcactcagtcagttttctgtggagcagagatgaacacctcagaggccacatccttctgacactcttagacaaaagtttgacagggatagcagggaaatgttagatttcgaagaggtctgtcccaagcaaacattttaatttcaaatgtttttgcccttacaacttagatctcccacctcctgcaacccgagaaagaccaccaggatgcaaaacagtatttgtgggtggtctgcctgaaaatgggacagagcaaatcattgtggaagttttcgagcagtgtggagagatcattgccattcgcaagagcaagaagaacttctgccacattcgctttgctgaggagtacatggtggacaaagccctgtatctgtctggtaggtgtttagatgtgaggattgtgcccaccaggcacaacgcagatattaaagatagaactatttgtgtctatagcagataagtttgggcttagtattacctgctcttg

SEQ ID NO: 44481 - DNA, 2300 bp, Homo sapien
gaggtgatttttctttttctcttttttctttctttttttaattttttaattttttttgagacagagtcttgctctatcacccactacactcgagtgtagtggtacaatatcggctgactgcagccctaactttccaagctcaagggatcctcctgcttcagcttcctgagtagctgggactacaggcatgcgccactatgcctggctaattttcttgattttttgtagagacaaggtctcattatgttgcccaagctggtctcgaactcctgggctcaagcaatcctcccaacttggtgtcccaaagtgctagggttacaggcatgagccccggcacccagccgatttttctttttttaaaaaagcaaattattttcctggaggaatttaaaagtataaaaagtattaaaacataatatagcaattcaattaccaccctccagaatgattccccataataccctagctatgtgttcccagtatgttctatgtgtatatgctttaaaaaataaacactatataagcacaaaaattcctctgatggttctctcccactttcaagttaaattatgaactaattgatatgaccccttgttgctgcctgatctagtctctgcaatatggaacttttgctattgttctctgcactctttcatgcctttatgcctttgcatatgctttgtatagaatatggttgacctccctgccccaaatctgacaaatattttactggttcttcaaccagttctccagaagtagaacaagttcttcctcctctatgttcctatagaaccctatgtagacttctttacagcattttgcacattgtatactcatctattcctccccccagattctcctctactacaactcccctcacctggattttgagctacttgagggtagggactatttttccaattctgtggcaacagtgcctagcccagagctttgcacaaagcactatgctgaataaatggttgaatttattaaatcgtcttcctccttcacttatctttttaaaatattgggcaattacctcagcaaaatgcaattcccctgtctttcccttcattttactcgtgagtcgaaaagttgtcctcatcaagaagttgtagtaattcaactgtaacaaggctacaaggattcatctctaacagagaaaaaaaaaggtcaaaagttgggagtgaaattagccctaataaacaaccattttcctcaacctttaagtcacttggaagtgcttggcattccccacctatgtctttatccagctcttgtaacatatttttactcaaaaggttaagtttcttaaagacacatatagttactcgtttgtacttaagttgtattgtctatctgttctaaattgttatttatagcagtttatgtggccactgtttttcatggcaacaacatagcttcattatggattaaataggcttcttctgggctggtgtagatcacatttctatgcctatttatgacactgtttccagggggaactataatttccaattagaaaaaaatatatacattcttccatacctttcaagtgattttaatgcaggtggttcacaaggaacacactttaacaattttaaaggactataactctcaattaaaattctaagcttaccaaagaataaacatcatcttttgaaaaacacttaaaactcaataacaatttcaaatcacgatagaaagtgcttcccgcaaaatgctaagagcttaaccgacatgaaaataaatctagagccttcgtctgtccccacaagcacaaacccataaccccaagagagattctctagacagtgcacccaaactacaatacccagaatacccttccccgtctgaacgctggggacaatcggaaggggaggggaagaattgtgcgtatagagaaataagtgtcccgcaactccatctcccataattctcggtcctcacttgtgtctgtctgccaatgtcaacacgagttacccccaggaagaacagcctccagcgacctcaaactacatttcccatgaagccatgggctcgggcctccggcttccccggtgaccagtagccaataggagacgccgcagtgggcaccctgtgtgtgagagtccagccttgggccagagtgccgggtctaggcctggaagcgcgaggcgggcatttcggaagagagtggcgcggcgtggggcgccgcgagggcactacgagcccaggaactgccgcgccggcccgattttccgcggctgtataaggactagcgcttcggtagccggggagctggaggtcagagaggcaga

SEQ ID NO: 44482 - DNA, 2300 bp, Homo sapien
ggagctttttcatagctattaatatccccattttacaggggaggaaactaagcttcagagagattaaataaccctcccaagattacatggctagaacatagcagaattgagcttccaatctaggtttgtgagtttctgtagctttgttcctttattacattatacctcttgagaaaaaggcaacaaagaaggacggctgtcatgggtttgtacctcatgtagagctgccttggaagcagagcaatttcagtttccgaggactctgggattggaccaagcaggcagattttgtgccatgagggagcccaaaaaaagctcattcagttggaaaaaaaaggaacccattgaggccatttcaaaagctggtgctggataagctcatgggaagaggtaaggctgagatttcaatatccagggcctgaaactggacatttctagatgttaggcttgtttggcttggatgactaagtattcgtaaagaagaaatcggtaaaagagcaggtctggtgagtgtttgttgtctgtgattgcttttagaaaacagagaaaatcaaaatgatttagaagttggtacaaaggcagagaggtaccatttttcccagaaaggaaggaaaacaagtggagggcctttaaactctgaagatagctctgctttgctaagaattgtacagcaaagtacaggcaatttttccattttatgcaccccttttgccgcattaatactaatatcagtggttagcaaagcaaatataataactgctctccccagtggacccagtgattgaggcttccactcctctggcctgcaatcgaactgttggaaggagattttccatatttctttctacctcctcactagcattttgatcaacagagccccattctcccagtggagaaaaacaaggcacagagtcacgtctgtggagctaccactggcgaattgggagagaaattaatttgggcccctgggcttgaagtaaaaaggaaatttcgtttagaagcccttcctgcctaatgtggtccatctctggtggctgcttctaccccaggatttggggggcagggctctttttaccaccaccagaggccccaaacactgaacccattatggcacgtgcttccatatgtatttaaaacgtaaaaatacaaagccataaaagaagtgtaagaaaatccaacacagtaccaccctccattgaaatatcaaatatcaaattctttctaaaaataaatgtgggtccccctcccatatcagtgccctgagcaaaagcattggcagtggaatctgtaagtcggcagcaactggggggcaccccacgtttatacatacttgacactgggttcttttatctcagttgatgatcaaccccctcagtacaaaggttcccaggcaggagagcatctccctcttcgctgcggaattcgcaggagaagggaagtaagattactctcagatatgggacttcttgggggaggcggcaaaatcgtttttcctgctcacattcttggtcctctagaacggaccagtgatttaaatcagacttggagctactcggggctgaggtgatgcctgccctaagagaggggttaagggtgggggtgggagggtccccaagggctgagacagcatctcccctttagattcagggatcctggggaacacactgcttcccgcttagactaggcctcttgagggctgagataacgctccgctaaatcgtggagttttctagagcctgggatactgtctcgctctcagatctgaggctccctgggacaggtgcgctacctcgccttcaaattccagcctttgggggcaggcctgcttttatgtgcccgatcaagggctcctggggtggggctgggggacaaggaccttccctccctctcagatttggggctcaccagggctgagatggcgtctcccctcagactctgggctccctggggtaggggcagggtcccgccctcagaatcagcttcccaggacaggagctgtgtgtctctgcctcccttcgcgtggggcaaggggctgcgggaccagcggcctctcttctggcaggagggggggttccccggaggccctgcccccttcgtgacatgctcgaggtgtccggtgaccgaaacactcttagctgggtgcagggtgcggctcagggcgtggtcaccgggggctacttagggccgccggtgcgggggacgacgcaaaggttaactgcgagctgccgggcactcagcgcgggtcatggcgtggatactggactgccttttcgcctcggcctttgagccccgcccccgcc

SEQ ID NO: 44483 - DNA, 2300 bp, Homo sapien
tgatttctttatttagcaatgcagaatcttgcagctagtgaaagcaagtatgggtgcgtcaatggcaagagccctgagactgaagagaactgggttcttgtccaagctctgttgtcaaattgctgtgtggtcttgggaaaacccctgtctctctgtgagcctcagttttctgacctgtataatggaggtttgggaccaggtgatggctaaggtcctatttctgaaacattctaatattataatgtttctgaaactttcttatttttttgaagccagggcttttctccatatattttaacagtaatattacctctagtttatgaccttctgctataacatgatgggctgactcaatgtattgatgaacactatccccagatttaattatcttggagcgtcatcaccacattgtataaaatgagccatattgttcattgcatcagcagcctttgctgaaatggaggttatgggataacaactttaaggctaactcattaatgctctgggatgaataagctaatgtgtcagcagaccaaactggtgcccaaatgttttcgtatagagacccatatctctttcccatgttgtgatacattaatggggatgtctttatccattgccgctgcctgtagtcatttgaataatgtagatgcagtaccttctgggcacccagccccattcactatcaatttcctaaactttgaggcactctcagaggcttggaccaaaattctagtgatgccatagagtacctaatttataaggatttaaaccatggcatcagtgcagtccctgcttttttttttccataggtgtttactagtaagcactgcaccattcttaactattttatgggggtaatggagtaaattagtcctccaaatcatgaaggctgtagatttatgcctagttgaaaccatttcagtcctcacaatgttgaagtgggtaacctttctgacgttaatttgtttctccatctgtgtgccatgcattttgggaggacgtgagaaacaggcttgatgccattcaagtgtgtttcccctttttgtattgatggaaacttgatttgtgcctgtccgctctttgttcaaattctctctcttgatatctgctcatattctagcccctttacttatccaaataaaatcatatatatatatatatatatatatatatatatatatatatattgctagtgacaatgtagaattggatggcttgaaagagaaacaaattttgagacatacaggcactttattaatctgaataataacatttgaaatattaacctatgcagttagtttttctaaattttataaaatgttttttttaaatacttgactctgctgaaattggagaatgaagaagaaagatatatcccttaaaatctcctaagatctctttacataattcaaatttagtggagaagagtagattgttcaatggattgatacaaattctaattttatgtaattacttttgaaacatgattttttttgtaaactccagccctctgcaaagaaccttcactattaacatgtttattaaaaaccaatgctaaataccacacataatattattcattcaactctcagacaaccactgaaatggatactgtgtcatttcaccattttatagagaaggccactgagactcagagaattcaactgactttcttaagatcacacagctaagaaatctagaggctggctttgaactcagttatatttggctctaacactagtaaaagtatttgtctaaagatagtgtttctgcaaatgttttgaattctagactgaaactgagctggtttgctttcatcttgcttttgaatctcatggtctcttcaggctagtgccatggtatactgaaggggtaaggggaaaacactttggagcaagagaggtctcttggcacctctttcctgtagggagcctccttttgtgttcagcttgaaatgtcaggcctgaagtattcaaatctcaagatcctgttatgtgcctctctcatagtgcgaaagcctgcctactcattccccctccccaccccacccatctgcttcttgtctggggacattggtcttcctaaatctgcttctgtattgtatgctactggcaccttgagaaggttgaaagcaagtaaggcaatgccaatttttctgttagaactgcagcatataactgctcttaagtttagccctgtgtgctggagcagggaggcaatgacaaacggtttattctaaggcctttgatttccttcggaattgtaagcatctaggctgactcatctctcaaaggctt

SEQ ID NO: 44484 - DNA, 2300 bp, Homo sapien
ccaccaggtccagtgacaattggatgatgcagccttgataatcatccgattccagaatgggtggctgcattccttttctgaaggcagcaagggcactgtgccccagaatcatgccccctttgctgttgttgtccgccttcatttttttagtgagtgtcttgggaggagccccaggacacaaccccgaccgcaggacgaagatggtatcgatacacagcctctctgagctggagcgtctgaagctgcaagagactgcttaccacgaactcgtggccagacatttcctctccgaattcaaacctgacagaggtaagctgtaccccggattgtggcatcctcgccttcgggagagtggaccctccgggcaggacggggcggattaggggtctggcagggtgggaggggctcacgcctgatctcggacttgatcagttctcctggcgtctggggaactgaagaagccggagttgaaggctgtttgttgaattgcggaagaggtaaaaattagttgagtttggtcgaaggctgggagttgagggggcagtaagacagacgggcagatgtcagggacagacaagtggacagagggccggtgaagagacagccgcagcaggtgcggtgcgagaatagggcagagcgagacggaagcgcagagggacactctggagagaactgggagagatagagacagcgcggtcgagagacagagagtagagggagatagcaagacagtgcgtgagagagagacgctcctagccgggcggtgaacgggagggcggtgcgggcgcgggggcggcggcaggaggtgcgcctctagcactgcccacctcagctggctgccggggagcgagcaggacgcggcgcaggacgaggttcgagtgcaccagggaatctcaggggtaagcgcgcggatttggcagcggagcccaggcggttagcgcggacccaggcgcgccccagaggtattggaaagtgctgggggtggcagcttcgctaggcgcgcaccgcgaacgcagcttgaattgagcgaagcaaagggcgaggagcccccgctggcagccactgatgccagattcggagtgcggggacagccaggtgtcgccgcttctcctaccgcagcgcagggagccgacggcaacctggtgcgagcgcgcccgcagtaacttggcgaccctcacccgcggtggcgctgcaggagagcccctccctcccctctcctgttgcgtgatctgggggcttcagagccccggaatttatgttttaagtgttgtattgagcgactacgggtgcgtagcaagatgcgcggtgcgcacgcggcgcattagattgtctggtttggttaaattcttggagtctgataagagtgagataggcttgtccttgttgttaggtggggaaactgaggctcatagaaagcaaattacttttcgcccgctgggcagagctcgcctctctgccgctccctccccctgctgcagatcagggcattgggatgttttagtcacttattaagtcctatttgtaagtgtatcttttcttttttctctttctgtagctctgcctattgaccgtccgaacaccttggataagtggtttctgattttgagaggacagcagaggggtgagggggctcttgtattttctttagaaaagaaatagaatgctaaccccctgtgtagtgtggccctggctattggagactgggtggcgtccactgtcccaggggacactctcctcagctcccaaaccccacagtgggtgatatcaggaaatggcgcagtagctgtaggtgcttggggcggtcctctcagaccttcctggtggactcaccccacacagatcaacccgaagaaatcgccctctttgtttcaaggtagtcacccccagggaaaatttaaggcagggacctcgagcctcgtcggggtggttgagtggagctgagtcctttcgccaaaccactgcggggtctttttggctagctccccagggaggggcgctgcggttctggagaggtggggttggctgcgggtggttgctgggaggagtgctacagcccctgcttcctcctgatttaagcgctgcgaggctttgacgtttctcattctttctctcgtggctccccagctgtatcacacaagacatttggcattagcctggaagaggtcctggtgaacgagtttacccgccgcaagcatcttgaactgacagccacgatgcaggttgaagaagccaccggtcaggctgcgggccgtcgtcggggaaacgtggtgcgaagggtgtttggccgcatccggcgcttt

SEQ ID NO: 44485 - DNA, 2300 bp, Homo sapien
cttctctagtatgatttatccttagactacaaactccttaagaagagaaactgtcatcctttctgaactgtcagcatctagaacaatccctgacacaaagaaagtacttaacatttgtgttgaatcaatggctgcttgctgtgtcctaggtgctatgtggtggcttacaggaaggtttccattcaatcctaccccaaacccttcattgtagtaagtgcaattattatccccattttacaaataagaaaactgaggcttggaggctaaataacttgcccagaaacacatctttttattcatatgcctattctattcattacacaataatctatagtttataatggaagccacaattgatatcacctgatgcatgaagatatgataatcaatttggctgtaaaagagctgttactttatttttacacagtttgttcttgaattaaagtgtttttcattagataatttgaaatcttttatgcaggtagaaaatgtacataaaaggctgggcatggtagctcacgcctgtaatcccagcagtttaggaggctgagcctccagaccagcttggccaacatggtgggaccccgtctctactaaaaaatacaaaaactagctgggtgtggtggtgcgcgcctataatcctagctactcgggaggctgaagcaggagaattgcttgaacctgggaggtggaggttgcagtgagccaagatcgcaccactgcacgccagcctgggcgacagagtgagactgtcttaaaaaaaaggaaatgtacataaagaaaaatttgtctattttttagccaattagtctatcatgttgatatttcttatcaattagtctgtgagcccattggatgctatactttaatctcatcatatgttatatatcaggagctttgattagtgtcttattcatacattatcattataaaaagtctttcataatcaacatttgtgaaaggttgctctatattattaaaatcatgttactctaagacatttggggaagggcttacagattaatagtagtagtagtagtggtagcagcagcaaccactaccatttattgagcacctactacatgctaggcctattgtgctgttagttttacttacatcatcccattgaggccttgtgaaataggttctgctgttttttgtttgtttgtttgttttttactttactgttggggaacctgggactcagagagtttactcacttgcttgaggtcacacaactattgaatgtaaaatgtggactaaaatatacatttgtatgtctctaaagcctgggcttttaccccaagatggactttgaaggctgtccaagttacttaaccctctctgagtttccgtttcctcatctgtaaaactgaggggagtaacacttattttgcagagttgctctgaagatgagaaataatggatcccagggcccaggggcacacagtaggcacttaaactgtggtgatgtttatgcataaatggggcgttaaaatgggcaggggaagatctgagatcccgataaaggtattggggagctggagagaaggatctacaaatcttcttgagagctggccttctcccccccacaatacagtgacccagtgaaactctgagagacaggcgagggggcaggggcctgaatttggctccagcaacctctgcagggagtccggagagaggcggggagctgggaggggcgtagaaatccccgtcgtcagaggactgcaggtgccaggcagagttggtgtaggtgggctccccgagcccggcgcagggaggggaggaggttggggcgggccggcaggcgggcgggggagagaggaaggcggggctcagagccgaagaggctgtccttagacagctcttctcatgccgggcagtttgctgcatctggaggagctcactggagaatctccaacatcggagcgggccttcaactaccgtaagtacctacaaatgagcgcatagttcagtggctgaatattaaatactggccaccggatcctaaacaaaaccccgaaagagtctccttgctgtaattaattgccgtaaatcaaactgctccccagtctgtccccccacccgcttcattcctgcctttctcctttccttcccggatcccagacctgcctcggtgagaatctctgggcactgtagatatctccccttttccttctcagtcttccctccaaaccctcagctgagcatgtacccggcaccccgccgagcccaacccctttgattcctggagccctcaaagctatgcagggggcgagccattagacatttcagat

SEQ ID NO: 44486 - DNA, 2300 bp, Homo sapien
tccaaacaaccatcaagtttgtctaatgttgccttctcaatgttttgggaactctgaccctcccctccttctctgctactgctccctagtttaggcacacagtacaagcaaagtgcttgcaattatccaaacacatactatcatgacttacttgatgatcttttctattgcaatcctctttgattctcaaggctcctccttctctggctgcctcctacttcttctctagtatgatttatccttagactacaaactccttaagaagagaaactgtcatcctttctgaactgtcagcatctagaacaatccctgacacaaagaaagtacttaacatttgtgttgaatcaatggctgcttgctgtgtcctaggtgctatgtggtggcttacaggaaggtttccattcaatcctaccccaaacccttcattgtagtaagtgcaattattatccccattttacaaataagaaaactgaggcttggaggctaaataacttgcccagaaacacatctttttattcatatgcctattctattcattacacaataatctatagtttataatggaagccacaattgatatcacctgatgcatgaagatatgataatcaatttggctgtaaaagagctgttactttatttttacacagtttgttcttgaattaaagtgtttttcattagataatttgaaatcttttatgcaggtagaaaatgtacataaaaggctgggcatggtagctcacgcctgtaatcccagcagtttaggaggctgagcctccagaccagcttggccaacatggtgggaccccgtctctactaaaaaatacaaaaactagctgggtgtggtggtgcgcgcctataatcctagctactcgggaggctgaagcaggagaattgcttgaacctgggaggtggaggttgcagtgagccaagatcgcaccactgcacgccagcctgggcgacagagtgagactgtcttaaaaaaaaggaaatgtacataaagaaaaatttgtctattttttagccaattagtctatcatgttgatatttcttatcaattagtctgtgagcccattggatgctatactttaatctcatcatatgttatatatcaggagctttgattagtgtcttattcatacattatcattataaaaagtctttcataatcaacatttgtgaaaggttgctctatattattaaaatcatgttactctaagacatttggggaagggcttacagattaatagtagtagtagtagtggtagcagcagcaaccactaccatttattgagcacctactacatgctaggcctattgtgctgttagttttacttacatcatcccattgaggccttgtgaaataggttctgctgttttttgtttgtttgtttgttttttactttactgttggggaacctgggactcagagagtttactcacttgcttgaggtcacacaactattgaatgtaaaatgtggactaaaatatacatttgtatgtctctaaagcctgggcttttaccccaagatggactttgaaggctgtccaagttacttaaccctctctgagtttccgtttcctcatctgtaaaactgaggggagtaacacttattttgcagagttgctctgaagatgagaaataatggatcccagggcccaggggcacacagtaggcacttaaactgtggtgatgtttatgcataaatggggcgttaaaatgggcaggggaagatctgagatcccgataaaggtattggggagctggagagaaggatctacaaatcttcttgagagctggccttctcccccccacaatacagtgacccagtgaaactctgagagacaggcgagggggcaggggcctgaatttggctccagcaacctctgcagggagtccggagagaggcggggagctgggaggggcgtagaaatccccgtcgtcagaggactgcaggtgccaggcagagttggtgtaggtgggctccccgagcccggcgcagggaggggaggaggttggggcgggccggcaggcgggcgggggagagaggaaggcggggctcagagccgaagaggctgtccttagacagctcttctcatgccgggcagtttgctgcatctggaggagctcactggagaatctccaacatcggagcgggccttcaactaccgtaagtacctacaaatgagcgcatagttcagtggctgaatattaaatactggccaccggatcctaaacaaaaccccgaaagagtctccttgctgtaattaattgccgtaaatcaaactgctccccagtctgt

SEQ ID NO: 44487 - DNA, 2300 bp, Homo sapien
ttaccattatgtaatggccttctttgtctcttttgatctttgttggtttaaagtctgttttatcagagactaggattgcaacccctgcccttttttgttttccatttgcttggtagatcttcctccatccttttattttgagcctatgtgtgtctctgcacgtgagatgggtttcctgaatacagcacactgatgggtcttgactctttatccaatttgccagtctgtgtcttttaattggagcatttagtccatttacatttaaagttaatattgttatgtgtgaatttgatcctgtcatgatgatattagctggtcattttgctcattagttgatgcagtttcttcctagtctcgatggtctttacattttggcaggattttgcagtggctggtaccggttgttcctttccatgtttagcgcttccttcaggagctcttttagggcaggcctggtggtgacaaaatctctcagcatttgcttgtctgtaaaggattttatttctccttcacttatgaagcttagtttggctggatatgaaattctgggttgaaaattctttaagaatgttgaatattggcccccactctcttctggcttgtagggtttctgtcaagagatccgctgttagtctgatgggcttccctttgagggtaacccgacctttctctctggctggtcccttaacattttttcctggctggtctctctctctggtcccttaacattttttccttcatttcaactttggtgaatctgacaattatgtgtcttggagttgctcttctcaaggagtatctttgtggcattctgtgtatttcctgaatctgaacgttggcctgccttgctagattggggaagttctcctggataatatcctgcagagtgttttccaacttggttccattctccccgtcactttcaggtacaccaatcagacgtagatttggtcttttcacatagtcccatatttcttggaggctttgctcatttctttttattcttttttctctaaacttcccttctcgcttcatttcattcatttcatcttccatcgctgataccctttcttccagttgatcgcatcggctcctgaggcttctgcattcttcacgtagttctcgagccttggttttcagctccatcagctcctttaagcacttctctgtattggtaattctagttatacattcttctaaatttttttcaaagttttcaacttctttgcctttggtttgaatgtcctcccatagctcagagtaatttgatcgtctgaagccttcttctctcagctcgtcaaagtcattctctgtccagctttgttctgttgctggtgaggaactgcgttcctttggaggaggagaggcgctctgctttttagagtttccagtttttctgttctgttttttccccatcttagtggttttatctacttttggtctttgatgatggtgatgtacagatgggtttttggtgtggatgtcctttctgtttgttagttttccttctaacagacaggaccctcagctgcaggtctgttggagtaccctgccgtgtgaggtgtcagtgtgcccctgctggggggtgcctcccagttaggctgctcgggggtcaggggtcagggacccacttgaggaggcagtctgcccgttctcagatctccagctgcgtgctgggagaaccactgctctcttcaaagctgtcagacagggacatttaagtctgcagaggttactgctgtctttttgtttgtctgtgccctgcccccaaaggtggagcctacagaggaatgcaggcctccttgagctgtggtgggctccacccagttggagtttcccagctgcttcgtttacctaatcaagcctgggcaatggcgggcgcccctcccccagcctcgctgccgccttgcagtttgatctcagactgctgtgctagcaatcagcgagactccgtgggcgtaggaccctccgagccaggtgtgggatataatctcgtggtgcgccgttttttaagcccgtcggaaaagcgcagtattcgggtgggagtgacccgattttccaggtgcgtctgtcacccctttctttgactaggaatgggaactccctgaccccttgcgcttcccgagtgaggcaatgcctcgccctgcttcggctcgcggacggtgcgcgcacccactgacctgcgcccactgtctggcactccctagtgagatgaacccggtacctcagatggaaatgcagaaatcacccgtcttctgcgtcgctcacgctgggagctgtagatcgcagctgttcctatt

SEQ ID NO: 44488 - DNA, 2300 bp, Homo sapien
tagacagcgtctcactctgttgcccaggctggagtgcaatggcatgatcatggttcaccgcagtatcaacctccctgggctcctgtggtcctcctacctccactacctaagtagctggggtttccattgcaagccaccatgcctggctattttttggattttttgtagacacggggtctcactacattgccaggactagtcttgaactcctgggctcaagctatccacctccttggcctcccaaagtgctgggattacagttgtgagccactgtgtctggccaatgctatatatttttaatcctgataggtgttatagtgagtatatgtttgaagatggtatttttggccaacaaatcgtgtctttaattcatcattatataaacagagacactaatgaagcattctagtggcatgtgagttgtgtgaatgcatccatcttacagttttcttaggtcacacatcaaggtgactgaatgtgagagatgcctatttcaactatcatttattgagttttgttatctttcctttgagatttcaaagatcaatttttaaggaaagaattaggaataaaaattcaaggagaattaaaaatttcagttttcagcggtataagtgtgtataatacatatgttcatattgcatataaatatgtatttatatgtttatatgtgtataaatatatatattatacttaaaagtacaaattgagtacttattttttgtttgtttgttttgagatggagtctcactctgtcgcagaggctagagtacagaggcacaatctctgctcactacaacctccgcctcccgtgttcaagtgattctactgcctcagcctcctgagtagctgggattacaggtgcctgccaccaagcccagctaatttttgtatttttagtagagtcaggtttcaccatattggccaggctggtctcgaactcttgaccttgtgatccacccgcctcggcctcccaaagtgctaggattattggcgtgagccaccgcgaccggccgagtacttatgttttcatgaatagtccaatcaagaagttctctgcaaatattttattgtcttaaatttagatattgcaaattttttatgagaatatgaaaaactcaggaatcatatgtgaaactttcttcaaccttatgtatagctaaattcaactaaaatgtaaatttattgtcgtgtttaactgtatagatagaactttttctctgtgttgaaaaaatgggagtaaatatggaactgttcgtttgtttggttttgaaacagagtctcgctctgtcgcccaggctggaatgcaatggcgtgatctcggctcactacagcctccgcctgctgggttcaagcaattctgcctcagccttctgagtagctgggactacaggcatgcgccaccatgcccggctaattttttgtatttttagtagagatggggtttcaccatgctggccaggctggtctcaaactcctgacctcgtgttctgcccgtctcggcctcccaaactgctgggattacaggtgtgagccaccacgtccggcccataatatggaactgtttatcagtgtttaatacacaattttatggcatcgattttctcctgatcagcacatggttatttttatcttctttgcaagttccatggctttgttaataatgagaaaatacaggactgattcctaactgaaaaacaataagacacatacaaaacaaagtcacaggacacagtcgtaagtcacagccttttaaagacactggaaaatatttctgttccaatgttaaataatgaaaccatgagacaaaatcctgttatctatctgattagcatttatagtcatttgtgtatttgtgtccattcaaatagggctgtgtgggtcttgtcaggctggagagctatccgtacccttatgttagagctccactacatatcggcctccccctcaacatgtaaggcctactgcctaggtcagatatggagtagaactgctagggaacctgggtaggcagtcaggacaagaaccacatggcctggtgcctagatttgctcttctccaagaccttaagggtaagctttttttctcttctctccttaggcatggatcactaaggtctgttcccaatacaagaagactctttgacatcataataaaatactgcagatacgatgctgagtgaaaaagagtagaaatgggaagacttggttgtgcagaaactgagttcttaaagagaggagatactttatgagggtgagtggataacctctcagtttaatatccaatggaaaccaaaagca

SEQ ID NO: 44489 - DNA, 2300 bp, Homo sapien
ttggttaatgtttcatttactaaaaattcaggtcttgcaaatttttcatgataatgacaaactgcccaggaaacagaagtgaaagtatactccaaaccataacatacaaataaacctcattttaatgtaaacttactattgtgtatgacacgaaatataaatgtttatgtgtatatattgaaatgagtgcatgagtatatgagtttgcatgtgtatgttgaaactgtgaaaggaaaataaatctcagggccccaaaatcactaagccaaagggaaacgtcaagctgggaactgcgtcaggcaaacctgcctcccattttattcctaaataagatggctacaatgattgaacaaagcaaaaacaaaaagctacatatctccctcacaatttgcccactaggaaattccttgtgagccccaagatttttaccctgaaacagttctgttgaatttcaccctgacaatgtaaattttggcttatcctcacaggtatggaacaaaagacagaactcaaagtcttccctccgctcacttgagacaaatgcatgtctgattgcttcctctgccctgtgtttattttatcctatgtaaaaaatgcagattcactgagctagatgaatgtgtacgtgactattcctctaccctcatctcgcctatgaagggctgatcaaagactcaaaagaatgctaccctttgcctcttatctacccacatcttttcaaaatttcttcccctttccccagtatctgccctttcccctttaaatattgaagccctcaaaatcatctttgaagaaaggcatggacctatctcccaggcatgcgtgtacttaaacttgcaaaataaatttctgaaactattgagacctgtctcagacactttttagttcacaaaacataatccagatgtttatcagtattactaataggtactgtttatgacagtgctttactcttggtcagcacatggttcttttctgaatcctttgcaaatcctttgcaagcaccatgtcttaattacgtaagataaaataccataagattgacccctaagtgataagcatatacacactaaagtcacaggaaaccattgacagtcatataagaacataggaacatgcctgtgttccgattttaaattattttgactatgagactgtatcagtctcctctgactggaatttatacatatttgagtttgtgtacccttccaaatgggcactgtatagcacgcagtcttgagaaccatctagacacttagcttagggttccagacaactgcttctccctcaacacacaggcctagtgcctaggccagaaattgagtaggactcccgggaaacctgggaagtgagtcaggcaagaacaacatggatttgctcttctccaagcccttagatgcaaccatttgcttttccctctaggcctggatccctgaggtttgacccctgatacaccaagacaatttagtaccatgagaaaaagttaggtgaagaaaaagcagaactgtgaagactaggtaagtggaaattgagttcttgaactgaaaagacccctgatgagagtgtaggtttaggcgccagtttgatttcagatgaaaaaccaaaagcaaaatcacaatagtatgagcgagtttctcaagtcagccatatttcctggtgccttaatctgttggtcacatttttttttcataccagacgggcgggagaagagggcttgggggcagtattggatagaattccaggagcaacactgccatcgtgaggaaatttctggaaaaagccccatcccttagagggcttatattggaaagttccattctgttagaggctgagcaggctcggaccatgagctggatcttagttccacctcctgaggcctacctgaagctctggacagagtgaggtccaggtgtaggaactggcccgtggggagggaagactaagtcggcctctggcaggaagtccaggcccaggaagttgtagggtggggtcttggtattctcccagtatgggcgggactggaggaagccaccaaccaacgaagtactgggcctgtgggtattcgtctctctccccgcccctgagagtctgggaaaggctgacacgtggtgccttcaggctctggggcctaggacctttgtggtagcagagtcactgcagagaaccagacaataccaggttgcttataaaaggatgccatgtgcttgctggaggtcccaggtgcaaccaaattgcttgcagctaggaggaccttgaagagaaatgggatcagcccgccaaaccaagaagggttagcactt

SEQ ID NO: 44490 - DNA, 2300 bp, Homo sapien
tatagtgtatacattatgcacctagtaacctcagtggagaattcaaaagaagttcattcattcattcaacaattatttattgagggcctactacatgccatgaacctagtctctggggatacagcaatggacaaaatgtataaaaagcttgccctcagactcctgccatcctacctgaatcattctcatgtaagagaggctggatctctgccctcaaggacctaatatgggcacacaaaacaaatgaaatatatgaaataagaagaaagaactacagtgtgagcgctgctcacattggaggagtttgaaggagggcttggagcaactaggaagggtcaatggaggtgagatttgagacaggtcttaaatgatggagcttgattcagacccttgcgacttaaaagtgtgatctaaacatcatcaccatgtgagagcttgttagcattgcagaatcttgggcccagtccagacatgggagataaaaatctgcgcttttgagggagcaaaagaaccctcggatttctatggacattaaaagtttaggtggcactgcaggtttccggtcaggctggcaatgttgtgagctgggttggtgggaaatcgagactagattggagcctaacattaggttagaaatagtgaagggctggacttggggaactaggagtaaggaaaatgcaattgtaccttttatcatcattaaacacaaacagaaaccatagagaaagtagtaagtttatcaccagtcagagggacctgcgtctgaattcccagctgtaccacttcttaattgcgtgacatttcggtcaaattatttaacctggttgagcctttttcttcatctgtaaaatgaggggaaatcaataagactccagaaggcccttgtacaggttcagtaaggtattaataacacatagaaagcacttagcagtccctggcacaatgaaaataatatccattaataataacgatattgataagaattatatactattctctgaaaaagatttaaaaggaagaagagaaactatcttttaccactagaggccccccaccgtgtggtgcgtagagacccataacaaatttcaaggtaaggaacttcatcttcattttaaactggcactcgactattacttttttaaaaagtaattaaccccttacgtgttcccaaaggtgccttcataatgaaattcctgttactattattaccagtgttactgtcgctactgttagagtactctcaaaagagcctgtctccctctcctggagtagaacttaaaatggggcggaggcagggagttaccaaaaccactgcagtgtatgctgatttcaataacctgtactgctaacgatccaatctcatttcccaagcctctactatcctcattaatttttctgccgatgtaccatctgttttccaatttccctctgccttacacgtgcagaacttgtggtagagagaagccctagtttggccgttctgcaagggatagcccaggaggtagggggaaccttaagttgaagtcacctgaagcatgtttggggtcagggaactcggaaagcaagagtgtggccacagatctgcccagaggcgcgacccccagctgaggagaccagatggcgggaaaaagcgggggtccaccgactccgcggctatctgtaatcctacccttggccaggccggggagccaagaaagacttccaacactccccaagtttcagctcaagtcgtctccgaggctgcgtgtgccccagcctcgcacgcctccctgcaacgtggccgcatctggggcgccctcataccctcagggtttcccaaactcttccattctcttcccaggcccagccatgtcccaggtctccgggtccccgggttctcctctccgcgtgccgggagagtctccagcttctcagactccagcaaccccagccaaacctcttcgctgcctggagccttggctcccgcgacaccgcccggctgcggggcgggggcagggccaacggcggaaccgcccccaaccgcctcccaggccaggcgagcaggcgggtggctggggcgcctccacctcctcttcctaaagcggcgaggcgcagaggagcggcatcactcgagcccaggtcccagccaccaccactcacagcgctcggcgttcaggaagaggagcagcagcggaggcggctgcttcagcggcgggcgggcgccagaaaggtagactgagtcccagggagctgcgccgctaacagcccacctcctagccccgggctacgcgccgccagcccagtaaccccacttttgtgtg

SEQ ID NO: 44491 - DNA, 2300 bp, Homo sapien
gaaaaacaatttattgtatgtgagcagactttgagtatattgcacatcattttattgagtttattatgctccacttctttccaaaaagaatcgtggtggcttgcaacaaaaacacatataataagatgactagaataaaacatgagccccaagaaaaaagaaacaatatgctaaccataagagagggcataaaatagcagactgcattagggactggctggaagttaaattgtgacaaagatccatgagctcacaaatgtacagtcttcgaaagagtcaaggtccctctcttgcatattcttacttgacaacagaggcaaattacacaaggcaagtacactgccctgggacagagatattatctgttagagacatggcaagttcttcagttatcggagaaaagttcaaatggagaagtctccctgccacagagtctttcttcccatcctcctctagcacccagttaattgagatttcacttttattgaattttaacatgaacctaaaatatagcagataagctcatgaatctttgggatcccctttttgttgtttttacttaaatatttttaaaaacttctgtattaggtaatatactggcttatttatgttacttttacatgtccttcagaatgatagctagtaggtcgtacattaatcttgcccaatcactgaaataaccaaggatatacctcccctggtcttgccaatgtcctgtgatcagatgatactaattactgatcttaagtagtgtgacatttgtcctttagttattttgtagtacctcagaagttcattgccagccatcaacaaaatagtatgccattttcaacctttctagaagactttagaaactattttaatcactactgtttgaatagaaactttggggtggaagttgatagatttgaaagtaagtagataatgttacctaggaaagggacctattgaattacagatatccctggagtatactatatacccagaccacagttaatattagatggtgagaccaaagtatgagttctattttaagctgttaaatttcaacatgaaagtgccctttattcagcataaatatggcattcatgaaagatgaaatacacaaggtgccaaagagctgtggatccctcccagtgtgaggcagagtgggcaatgtttgattttcaccacctcttccctccttccagaagcaaacagaactctacctctgctctgactttagattcccaccctttcctgtaataatattgtacagtccactgtttgtgctttatgaggtaccagaattttaaaataaccatttattttaaagagggattttcagatattccattacaagttctcctgaaacctaatcattgctttccttgtattccagttggaactattggctttggtacagggatggggaaataaagggatatgtgttacatttatttgaaaaacattatccctccatgatttaatttttttttaccatcatagtctgaatagtttaattattatattcttggctaaatttacaatttgagtctcaaaaaggctattctttgcaatattattaaaatacataaatgctgactgatatgatcaaatagttgctgtggaaatcttatggattctctgacctaaaaatcagtttcgtgtcaatatgtagtaactttttcacagcaattgcctgaatttaagtagctgatttctctttttttccatctaaagaacagatagttggttctgtcattacgtaagcatatttgtttcatctttgatgtaaatattcaggaacctcagaatttgaagcctagtatataggtaaaagggctcgtattatctttcattaaattgaatcattaaaaaacctgttcagccctttgactgaactcttttgctttcttccttcacattttacatttttccttccttgtttagatattggtttgataaacagaacggcatcatgtgtctaagtgatttcttcatttcaaaggtaccaattttgaattttatgtttccaaacttttacacatatgtgtatgtgtgtgtgtgtttttccccttaagcttcgagctggtccatttgatgagttccagattgctaccatgctaaaggaaattttaaaaggtctggactatctgcattcagaaaagaaaattcaccgagacataaaaggtatacaaaagtctaatatgaacctgagaaaaatagaagcattctgagcaagctgagtttttttttgcttttctttttttcctcctagctgccaatgtcttgctctcagaacaaggagatgttaaact

SEQ ID NO: 44492 - DNA, 2300 bp, Homo sapien
agaaagaacagatgctggcaagctccacccagtgagcaggcagacgacaagtactccgagaccacattttaggccaccggtgggaccaaaagggaacaggtgcctcaaccatcccaacagtgttctcagaggctctcaagggcattttcatggcaactacccctctgccagcctccagcagtgcttcccaaagtgttctctgtcacctgctttgcaatcagcttctgttagggcatgttttgttttggtgtgacggtcgaccctcctaaacacgggctttcctcaggctggttcaagatgggaaaggactttcttctgttttctcccaaagtgcaaccacagtggaaagcccacagtgggcttagcctgcctaagcccttccattcccattctattctttgattgtactaggaattccaggaaaagtgccttccttccctggtgaccttttcctatttctagcctcctccacgggtgctgctattttgagagctccggctcttgtttagcttttatttcaattctatcctcagtccaggtatgtatgtgaggttgtttccctcttcagccatggctataatactgtaaaatgctagtttttattttttaagtagtgcttcttaaatggtttgcatgagagccacttggagtgcatgttgaaaattgatctatttggggtccaccccaaacctaacaacccaatttggggatggggttcaggtatcggcatttttaaaaagtcagccacccttcccaggtgattctgtaagttggtccctcaaccgtacttagagaaatagtgttttaaagcagtggtccacaaagtattctgctcatgtgacccccaaaagtattttgaaaaatcatgtgtcccctcacccatctaagttgacatctaaaatttttcatgggaagttaaatacttgacaaagtatgtgtttgctggtgtcatataaatattggtattttaaaataaaaactgttacatcactattttaaacatatccggtacaatttaaatatcacaacaatttgacaccctttattcatttataaaaataaacgagctagttctttagtagttgaacattttaaattggcttttcttcttctatattttcataccactttcagccaagaatcctatcgtaatgtaatctactgtgcttggcatcttttaatcattcacccattatcttcttgtcaacaaaaaatacaaatggaggtaagttttcttagttcttgccttaagtgttatctcagtccagaataaatgtcatcgtaattattgttatataatgaaaatgatattaatgtaattctttgatgactgttttattagaacgttctttatcctaattagttcatttatccaagaatacatgaatgttatttacagctgagatggggttcgaccttagttgtattccttgtttcatttctttatagatgtaagcacataaattctatgggaatagaaagaaaaaaaattggttaccaataggggtgtattgggaacacagaaaagagggaacaggagtggaagtgaagttttctatatacctttttatatagtttttatttctaaatcatgtgaattcagataattaaaattatgcataattttatattatatatgtttctatataatagcaattatatggatatattatatctatataattatatatggatatattatatctatataattatatatggatatattatatctatataattatatatagatatatataagcatagatagatagatagatagatagatagatagatagatagatagatagatgcttcctagcttggccatgaaatttctagtacaatttgagattaacttgaatctttttacttttgagaatggctattctcagtttattaaagcttgatctagggttttcaaattgtgcccttgtgaaataaagaaaatccccagggaccacaaatgcttgctttctttatatttttctttgaagaaaggagctgagtttaagaaggctagaggaagtccagttagatttgatattgaccaaacaggagactgcccagatgctattgatcccctgcacttggcagcacaaatgcccttgggtgtgcattacttcaagcaaacggaagtgtgccccgctgacagtgggaatgcctggctgggggtgggggggcccgagtgcaccacatccagctgggagtgaaattcctggagaaagcacccacagcactctgagcctgcttgcagcccaacggcctcgctgagaatgctacatttaaaagtgcagttt

SEQ ID NO: 44493 - DNA, 2300 bp, Homo sapien
ggagggcggcgggagggggtgttggggggtgggaggggaaggtgtgggtgggacagacacagaggacttatctgtgcaacagataatcggctccaaataattttttcaaagtgctctatttacccgagattatttgttagatgttttgtcgtgtaagttaatcaatacttgttgaattgagcaagcaacttcagaaggttatattccaggcgaaatatacacagactgacatttctttttcacttttctttcacttaaaaatagctttaaaatatttgttgacgcttgttactttttactacgctctatagaaacaacccgatagtcttccatggcaggagtaacctcaaaaatgcgtcatgtctaactttcaaaagcaaagcacagtcattaatgcacggttcaagcaacccagaagtcgatgtcggattaccacacccccttctaacaaattacaagacttggtttggttacctgaaaagactgttgattaaccaggctataaaccaggatgaaaccttggccgtttttgatgtagagatctctcatggaggcaaactgctcagttcctgcggtgtccagaatttccagcacggagggggaagagtccacttcgatctctttgcggtagaaatcttcaatggtggggtcatatttctcaatgaaagtcccagtgacaaactgcacagtaagggcagatttgccaacccctccactccctaacaccactaccttgtattccctcatgagtctcaccttcaccaactcctaccagagggggggaaagatcaccccgctagctgtggcgcggctagacgaggcggaaggtgggcggaaatctgcgaactggggaggagagtgcagaggagcagagggcccaaccggggaagaagaggaagttacaggagggggaggggaaagagcgtagagtcggggagggtggggaagggatggtaatgcccttcctataggaactgcagcccgagcagggggcgtggggaggagggcgagcctgggaaaagcccggcgagggtggcgaggaggcgcgtgcccccgggagggaaagggtgggggctgcggcgaggggaccctgcggcgaggcggacgtcggaggagcccgcagcccggggctgcccggcactcctcccccgcccttcacacaaaggggcccagggaccccgcttcctgctcgcgcagcccagccggctcaggcctgagggctccgttccagttaccgctgcccgggcgggtttctgggccccggctcccgcgggggtcgtccggcctgtgaaggggagaaggacgcacattacccggctgacccccgccccgaacctgcggcgccggccgccgcctcccccaactcccacccggatcaagctactgccgcttaccccgccgtccgcacccgcccggccgccggggaggctctgtcacgccaaggccatggccacccgctggctcctctgtctctccgctgccccagcgctgctgctcgccgcggggaaagaagcgggggccttccgcggcggccgcagggactccaggcgaacccacctcttttttttctcacccaccccccacccccacccccacccccacccccacccccaccaagcacacacccggaagggtttccctgacacactggctgaggtgccccagttccccgagactggacgggatcacttccggtggggaaagtcccacctcttcggggcgagccgggtggcgctggagccgcgccctgctgagcgagcgagccggccggggacggtttcgggtcgggactccggcttcgggaacgggcctctggaaacctgcgacgtcagtccttacccgcccgcggctgccgcggaccgtcccacccccaaacccgtagaagcccctccgacctgcaacctccagccgcccggccctaggacttgagcggctccctggccggtgcggaacctgcgggctaataatctagcgaccgggagaacgccaaacatccctggactagaagttgcaggggaaatcaaacagcccagaaagtttattctccttgctggtatttcttccacttgctattttgctgagagatgcatgcaaactacccttagactttcagatgcagtgcgttttacttagccgtgcctgacaaacacacagaacttttaccgtctggtagatccgccttgactttaccagcgaatactaaagtcacttaaaaaaaaatcacaaggctcgaaaacagcagcattagaagtagactttatggtactctgctcagctatgttctcatttgattccaacca

SEQ ID NO: 44494 - DNA, 2300 bp, Homo sapien
aggccagctggagccagagctggggacttcgctggagagatggcaccggcctgaggtcaaggagaaattgaactaaactctcctttgaagactgtaagtgacattggggaatactcagggagggacagtgggacctcacactactatgattcgcctgtgttctaatgtccaacaatttaggctgagtaataaatctctttatagagtttggccatttagggcttgtaagtaagggaatttggagtcatttttgctaggctggccactgagtctcgcaggtttctgggtacatgcttgaattgaaaagaaagtgacacacctaaaatacagcctagactcctggccctggggctctgtggatccgacacaaagtttacaaatagaaagctagcaaagggaaagatagtcggaagtaacaattttatctaaaaatagaaacttagaatctaacaccagagttactacttgcttttgaatttcaaagactacataggatggcctttaaaacaaaacttcagcatgtaagagccagccaagcaaattgttatacataatcaacgattaaaataaattagtctttaggcctaaaccgtttccaatcaaatctttcttgaatattggttaccttttctgccgtgtagtggttggaatcaaatgagaacatagctgagcagagtaccataaagtctacttctaatgctgctgttttcgagccttgtgatttttttttaagtgactttagtattcgctggtaaagtcaaggcggatctaccagacggtaaaagttctgtgtgtttgtcaggcacggctaagtaaaacgcactgcatctgaaagtctaagggtagtttgcatgcatctctcagcaaaatagcaagtggaagaaataccagcaaggagaataaactttctgggctgtttgatttcccctgcaacttctagtccagggatgtttggcgttctcccggtcgctagattattagcccgcaggttccgcaccggccagggagccgctcaagtcctagggccgggcggctggaggttgcaggtcggaggggcttctacgggtttgggggtgggacggtccgcggcagccgcgggcgggtaaggactgacgtcgcaggtttccagaggcccgttcccgaagccggagtcccgacccgaaaccgtccccggccggctcgctcgctcagcagggcgcggctccagcgccacccggctcgccccgaagaggtgggactttccccaccggaagtgatcccgtccagtctcggggaactggggcacctcagccagtgtgtcagggaaacccttccgggtgtgtgcttggtgggggtgggggtgggggtgggggtgggggtggggggtgggtgagaaaaaaaagaggtgggttcgcctggagtccctgcggccgccgcggaaggcccccgcttctttccccgcggcgagcagcagcgctggggcagcggagagacagaggagccagcgggtggccatggccttggcgtgacagagcctccccggcggccgggcgggtgcggacggcggggtaagcggcagtagcttgatccgggtgggagttgggggaggcggcggccggcgccgcaggttcggggcgggggtcagccgggtaatgtgcgtccttctccccttcacaggccggacgacccccgcgggagccggggcccagaaacccgcccgggcagcggtaactggaacggagccctcaggcctgagccggctgggctgcgcgagcaggaagcggggtccctgggcccctttgtgtgaagggcgggggaggagtgccgggcagccccgggctgcgggctcctccgacgtccgcctcgccgcagggtcccctcgccgcagcccccaccctttccctcccgggggcacgcgcctcctcgccaccctcgccgggcttttcccaggctcgccctcctccccacgccccctgctcgggctgcagttcctataggaagggcattaccatcccttccccaccctccccgactctacgctctttcccctccccctcctgtaacttcctcttcttccccggttgggccctctgctcctctgcactctcctccccagttcgcagatttccgcccaccttccgcctcgtctagccgcgccacagctagcggggtgatctttccccccctctggtaggagttggtgaaggtgagactcatgagggaatacaaggtagtggtgttagggagtggaggggttggcaaatctgcccttactgtgcagtttgtcactgggactttcattgagaaatatgaccccacca

SEQ ID NO: 44495 - DNA, 2300 bp, Homo sapien
taactattacacacctgcgttttacataaacagtagcaactagacatttgttcagtatcttgctttttcagccctacaatatatcttggccatctttttatataaacacttacaaatctgcttttctcttttaaagtagctgcataatatcctattctgtgaatacagataggtaggtaggtaggttggtagatagatagatagatgatagataatagatatagagagctatgaaacttttaaaaatcacctactgaaggacatttaagcttcttccaattgtttgatttcctaatcaatgctgtaatgaatacccttcctaagaaagtttagaaggatctttagactgagtgtaatatttgtccactgtagttgacgagagtgaccccacaggacgctgtactgaggggaggagtatgtttcactgcgtggagaaacaaagaactctctcctaagcatgaccaacacattcagagatattagaattgccaacaggtgggatgacctgaaaaagaactccttgctttgacagtttagtaatagagcaaagacttgccacgattgctcaacactggctggatcagaagaggaatttccagactcagttacaagcacggctggtggagggctgtgaatcccaccagacagtctggagacagctaggcagggagatgagcagcagagctccaaatcaggcaacagcacgtgtgaaaggagcagtgacctgtggggaaactcataactcacagaccaaaccccttccagcagagggcagtgcctctgatacgacacagggcccaggccagctggagccagagctggggacttcgctggagagatggcaccggcctgaggtcaaggagaaattgaactaaactctcctttgaagactgtaagtgacattggggaatactcagggagggacagtgggacctcacactactatgattcgcctgtgttctaatgtccaacaatttaggctgagtaataaatctctttatagagtttggccatttagggcttgtaagtaagggaatttggagtcatttttgctaggctggccactgagtctcgcaggtttctgggtacatgcttgaattgaaaagaaagtgacacacctaaaatacagcctagactcctggccctggggctctgtggatccgacacaaagtttacaaatagaaagctagcaaagggaaagatagtcggaagtaacaattttatctaaaaatagaaacttagaatctaacaccagagttactacttgcttttgaatttcaaagactacataggatggcctttaaaacaaaacttcagcatgtaagagccagccaagcaaattgttatacataatcaacgattaaaataaattagtctttaggcctaaaccgtttccaatcaaatctttcttgaatattggttaccttttctgccgtgtagtggttggaatcaaatgagaacatagctgagcagagtaccataaagtctacttctaatgctgctgttttcgagccttgtgatttttttttaagtgactttagtattcgctggtaaagtcaaggcggatctaccagacggtaaaagttctgtgtgtttgtcaggcacggctaagtaaaacgcactgcatctgaaagtctaagggtagtttgcatgcatctctcagcaaaatagcaagtggaagaaataccagcaaggagaataaactttctgggctgtttgatttcccctgcaacttctagtccagggatgtttggcgttctcccggtcgctagattattagcccgcaggttccgcaccggccagggagccgctcaagtcctagggccgggcggctggaggttgcaggtcggaggggcttctacgggtttgggggtgggacggtccgcggcagccgcgggcgggtaaggactgacgtcgcaggtttccagaggcccgttcccgaagccggagtcccgacccgaaaccgtccccggccggctcgctcgctcagcagggcgcggctccagcgccacccggctcgccccgaagaggtgggactttccccaccggaagtgatcccgtccagtctcggggaactggggcacctcagccagtgtgtcagggaaacccttccgggtgtgtgcttggtgggggtgggggtgggggtgggggtgggggtggggggtgggtgagaaaaaaaagaggtgggttcgcctggagtccctgcggccgccgcggaaggcccccgcttctttccccgcggcgagcagcagcgctggggcagcggagagacagaggagccagcgggtggccatggcctt

SEQ ID NO: 44496 - DNA, 2300 bp, Homo sapien
gaagcaatcagtgtccttcaaaggggagctggctaattagcttatgatacagccatgaaataaaaattaagaaggccagacatggtggctcatgcctttaatcccagcactttgggaggccaagtcgggaggatcccttgagctcaggagttggagaccaccatgggcaacatagtaagactccatctctaccaaaaaaattaaattaaattaaattagctgtgtgtggtggcatgtacctgtagtcctagctactcgggaggctgaggtgggaggatcccttgagtccaggaggttgaggctgcagtgagctatgatcatgctactgccctccagcttgggtaacagagggagacactgtcttaaaaaaattaattaattaaagtttaaaaagcaaggtaaaaaatagtgtgtacagttgattacttttgtagtacagtaatttttaaaaatatatatagaaggtagattgatacactgacatatgaataatgttcccccctgaaaaacataagaagcttttaacaataaatatctttgtgaagagtaactgaattattattttcgtgccacttgcagatatttgagcttttaaaattttgttacccccatgtttgctattttttaaaaattaacaattcattaaatcttttaaataaaaaccaaatagcatttattgaggctttataatgtgcaagggactgtgctaagcactttacctgtaatacctcattacattttcacgttaacttcttatctcctttttacaagtgaggagttagaggctcagacaagtgaaatcacttgcttggggacacagagctagaatgtggcggagctgcaattttaatgcacctctgtctcatttcagagccttagctctcaactgccaggccgcactcttctgcttgctctttataccctcattgcttaatgagagtacactagcaaacaacaggagtctaatgagataatgtatgtgaaaatacttttctaagtatagagatgtttggggagggcaagcaagggtagggaatttgtttaaattgggcggacctgtccactgacccctagacagtcaggattttttttttttttttttacaaaaccaagatcaacaactttcttttgttcctcctttaaaaatattataaagttatatttacttcctttttcccaattattgtttataaattaaaatatggagaaataaaagccatttcataatagtcctcacccataattactttgtttcagatttgaatggctatgtaactattacacacctgcgttttacataaacagtagcaactagacatttgttcagtatcttgctttttcagccctacaatatatcttggccatctttttatataaacacttacaaatctgcttttctcttttaaagtagctgcataatatcctattctgtgaatacagataggtaggtaggtaggttggtagatagatagatagatgatagataatagatatagagagctatgaaacttttaaaaatcacctactgaaggacatttaagcttcttccaattgtttgatttcctaatcaatgctgtaatgaatacccttcctaagaaagtttagaaggatctttagactgagtgtaatatttgtccactgtagttgacgagagtgaccccacaggacgctgtactgaggggaggagtatgtttcactgcgtggagaaacaaagaactctctcctaagcatgaccaacacattcagagatattagaattgccaacaggtgggatgacctgaaaaagaactccttgctttgacagtttagtaatagagcaaagacttgccacgattgctcaacactggctggatcagaagaggaatttccagactcagttacaagcacggctggtggagggctgtgaatcccaccagacagtctggagacagctaggcagggagatgagcagcagagctccaaatcaggcaacagcacgtgtgaaaggagcagtgacctgtggggaaactcataactcacagaccaaaccccttccagcagagggcagtgcctctgatacgacacagggcccaggccagctggagccagagctggggacttcgctggagagatggcaccggcctgaggtcaaggagaaattgaactaaactctcctttgaagactgtaagtgacattggggaatactcagggagggacagtgggacctcacactactatgattcgcctgtgttctaatgtccaacaatttaggctgagtaataaatctctttatagagtttggccatttagggcttgtaag

SEQ ID NO: 44497 - DNA, 2300 bp, Homo sapien
tcattttggtacaatgttttacatttctttatctgaaagaagattcatgtttaacaaaagaggaactgattttcatctttgtaccgctaatttcaaaatgcagaggtaaatcaatagccatatctaccctttatataaagtttgagtggagagatatgtggctggttataaagacataattatttaatttattctgagcagcacactgagccctgcaaagataaattgtttaaatctgaacaataatcagtgcctttctcaccttatactcttcatatacatttgtaagatatttttgcaaattaaattcttctttgaaacttttcattttacttagagacaggaaatttaattttaccaagtggaaaccccaaggtttaaggttagtgcaaaactaaaaccatttggaattgaggagattgcccaataccttctgacttcccaggtttcagtacagcgaaaactcacttgagacccttaagtcatggaaagcctaaaataattagcatggtttcaaggggcagaagtcacaatgtaggaaagccagttaggcagagaaggcttgacgttcttatttcagaagttccttgactaaagccttcaaatgaaagaagaaagccacggcaaccatttggaaagatctgacgaaacttacagctttgaaaaggggtgttgggaaggtgattgtgggatgttactttgcaatcataggaaaatatccatcttgttagcttttgggagatcagggatgggcaaaaatggcatttcaacagaagagccatttttggggagttcactctatttttctatttaagagaaatcaaaatgaaaatactaaggaaaacttgacctgtaaaacaccatacaacttggttgaagctttagtttctttacctatagaatgaggaagttggattagatcagtattttcctaagggtgtactaaagagagatgttaacgggaatatgatgaaaaaaggggggatggtttgtgagttaaacaatgttgggaaatgctgggttaacaaaggtaaccaggtttctttactttaggacatgtgagagcctttatcatactcttgtgtattgtcagcctacaagagaggaatataaagtgacatttcttatacccgattgaccagtgaacccagcttttgaggttcctctcttgggattagttgtctgtggtacacactctggcaaatgctggactaaatgatctctaagagcctttccagctttactatttgatctttctatgatatgcccataaacatataaacttccccagagcagtacaattttactatttctgaccttactaattcttaatctttgatcattccaatgaaagagtctgcattcttaatgaaaaaataaatttaggactgtgtctagcaattgcttaaatgttcacaattgtaatgtgaggctattgtggattgccatttttctcgaatatattatttggttcattagaattagccatacctctctactttgtgctctcttttaatgtgagtaatcagggattgactgaaaaagatatctatgcaaataatggctattcatctgcatgctgtgaatctgtacctttatagcgcttatgtgtgcatatagaaacatgtgctaagtagttatttccctgcactttaatgattgacttttactcgaatttgagtattccaaagacagggctgaaggaaaaaaagaaaagattaaccacccctcacctctgcacacataaataaaaaccttaaaaaacttaaaagcctcatctttatgtaacacctcatatactcaaaaatctgttctgtaaattcggagttacgggtttaggcaggtattggtcacacaccatccccctcttcatcctagcctaaagggggagctccagcagacatcgagggtatttaaatatactgttgcgccaccggtgggtgggaaggtggagtggctgccagggtagcgagccgtgtgaagcttttggtgggaggagctatggatcaaaaattgctgtctccaacagtcaacttccttaaatttccttgcagctgatcaggtaagctggggctgagagtgtcttctactttactctgggcaaatgaaggcctgggagagcctgggctgattccatggagagggcttctaagaatcttaaggtaaagaggtaaaatgggttttcaaggatttgcctttattgagctcaacttatcaaggcagaagaacagagcgggagagggctgccagataacatattgtatggggcatacttatactaaaaaattttttttcactgt

SEQ ID NO: 44498 - DNA, 2300 bp, Homo sapien
aggaggatttctttatcacttgttttcagatactttgggtatatactgagttgcggaagtgaggaactgtcagacagtttgccatagcaactgcaacatttcatattcccagccacgatgtatgagggttcaaatttctccaatttttctgtttttaaaattatagttagactaatgagagtggtcatcacattgtgattttgttttgcatttctatcatcaggttatttttaaaatacttttcctagaagtcatttgcctgcaacttcaacgctctagaacatggtcctgcatgtaacttgatgcagaagggcctgcatagaagtaagagcagtcatagaacttctgcaagaaagctctgcatcttgttccacaggcccctcattcagtgggtaactaattgttattcaacattcatgactggctattaggttttttggaagagagctggaaaattcactgtggtagatattgtgacagagaagtgacagtggatatgacaacagtctgccacttaaagaggagaactattatacttcctaatacattaatggtcccaagtctttaattagaggccaaattatgtttgatattttttaagaaggcaaagttacacagaatacattttagaatgatttccatgaagaatgactcagagaaaaacatgttttgctcttgagtagataagcttgcttgaactttctaggtatttaatttctcaatgatatttgaaaagtcaggtgatacttaattgcatcttgaatatggaaaagacaaagagaagatttagattttgtaaaattgttgaaaatattgttgaaaaaattaaatgaaatatttttaagaactttaatctcactttttgatgaagttaacagttatttgatttttctaatactcagagctcacttttgcgttaatgctatttcagtatgtgtttatggcatatgccaataaattaacctttcctgtatcttctcagctgttgctagaaattgtagctggttcacactgagttaaactgcatactttaaagctgcataatatttaatctatttcattaaacagcacattctgtctcacttgtttgtatatgctgaaaccttcttctgagttgctccaatttcccttcatagagactaaggagcctacacagaaaaaaaaaaatcttttcagatgacttttttctttatctgaagcacattttacgtttccatcctccaccccacctcatgtgaggttgttgcctagtcttgtactacaacagtaaatctaagcagttgcttgcttttactatacagttttatactgggaaatgccctttttattgacaatggctgactgtactatgttgcactgtcagtatctagatgcttcctgttttaaataggatatagttacttcttttccaaatctagagtttgaaacggaagcattgtattattttagctaattttatttatttttttcttgcaggttctgaaaagtgccttttctgaaaactctgctgcttggattctactctagagctgtctctttataaacccctctccctaccataccgttccctgccctctccacctccccgccgaacctggtgtgcttgtagtttactgtcagcagctggtccatttcttttttctgtgattctcaattttcttagtcattttccctccacttgattttgcaacgaaactttttttgggttctaacatccttcccaatcttgttatttaaagctaataaatagggagaaaaacttttctccccctgatctgagaccattccacaaatcgaagggcagccagcagcatatgttttttgcaagaataattgaaaacatcaactgcagagcccagaattcttttgaaagtctgccggttatttaacataaattcggcaaaggaacaaaataaagcattcattatcttaacagttggcttcttaagagttggtctctaatttcatttttagttattctgatagtttttatgattggctttttgtttgactagaccagatttgactttaatgaaaacctaagtgttaacaaatagacatttcaccaaagcaacctgttatctcttcgcacttagtttgaattcatttttaatcctttaatagtccacagtaatattgtcctaaagagggtacattggattttaattttgctttcaatatgacggctgtcaatgttgccctgattcgtgataccaagtggctgactttagaagtctgtagagaatttcagagaggaacttgctctcgagctgatgcagattgcaagtttgcccatccac
